United States Patent Application Publication US 2005/0228172 A9 - sequence listing, part 5

SEQ ID NO: 13886 - DNA, 552 bp, Homo sapiens
taaataacatcatagggaagctatgtgctacatagggacagataagggtgcccaagggaaactttgaggaagtataactaaattaatacacagggatcagggttgaagtattttataaccaatactcaaaacagtaacagttagcctggckcagtggctcacgtctgtaatcctaacactttgggagtcagagatgggagaatcacttgagcccaggagttggaaaccagcctgggcaacatagtgagagaccttgtctctacgaaaataaaaaaacaacaacagttaataaagtttccaggagtagcttagataatcccagaatcgtatctatattaggagaagggctatttttaaatattctaaagtttataattggaatgcccataaaaattgcctatgagtaaattcatcattacatcaggaaaatttatgataattacttaggactctgcttttgataaatatgtatgctgtaactacttaataaaaccatgagaaataatttttaaaatgtaaatgttacttacatatcgcagtttgcagctatcc

SEQ ID NO: 13887 - DNA, 540 bp, Homo sapiens
catttctaattaaattaattagactattagactgtcttagagtatttttcagtgcctcagctggcattctttgtagttctctgtgcaacttcaatgcaggttacttctttctagctgagatttttttwaaggagtttaatattctggcatggacatggaaaaataaaatacacaacaaatcttccatttttaattacagaaaatattcaaaagtgttcattattgcaaatgtgctcagaggatgttcagaatttttcaaaatggagaaatgaagaaaacgagaagaaaattttgtttaatatataacttgagaatgcagaatgattattaaaaatgtattaactgttgagacaaagtttgcaaaaagctcctgggaattagagagccttattattcctatattaaatgctgaggttgaaagaacatgattcataactagatggggatgaccagatgaatttcagattccataagcacagttaaaaattttccctaaattcccttttgtactatagaattgcaagctatagattttgtatg

SEQ ID NO: 13888 - DNA, 540 bp, Homo sapiens
catttctaattaaattaattagactattagactgtcttagagtatttttcagtgcctcagctggcattctttgtagttctctgtgcaacttcaatgcaggttacttctttctagctgagattttttttaaggagtttaatattctggcatggacatggaaaaataaaatacacaacaaatcttccatttttaattacagaaaatattcaaaagtgttcattattgcaaatgtgctcagaggatgttcagaatttttcaaaatggagaaatgaagaaaacgagaagaaaattttgtttaatatataacttgagaatgcagaatgattattaaaaatgtattaactgttgagacaaagtttgcaaaaagctcctgggrattagagagccttattattcctatattaaatgctgaggttgaaagaacatgattcataactagatggggatgaccagatgaatttcagattccataagcacagttaaaaattttccctaaattcccttttgtactatagaattgcaagctatagattttgtatg

SEQ ID NO: 13889 - DNA, 503 bp, Homo sapiens
taaaattagccaggcgttgtggtgggcgcctgtaatctcagctactcgggaggctgaggtacagaactgcttgaacccgggaggcagaggttgcagtgagccgagattgcgccactgcactccatcctgggcaacagagcaagactgtctcaaaaamaaaaaaaaaaaaaaaaaaaacaacaactccaagccatccaactccctctattcaatctcataaatccaccatcaccttttgcctagactattagaaggctataagtcttctctctaccattctccacgtagtggccaggttgtttaacttttttggatgtataacatacatttaaaaatgtgcatatctggcctgatgtggtggctcacacccgtaatcccagcactttgggaggctgaggcagggggatcacttgaggccaggagtttgagaccagcctggccaacatggcaaaccctgtctctactaaaaatacaaaaattagccgggtgtggtggcacatgca

SEQ ID NO: 13890 - DNA, 503 bp, Homo sapiens
taaaattagccaggcgttgtggtgggcgcctgtaatctcagctactcgggaggctgaggtacagaactgcttgaacccgggaggcagaggttgcagtgagccgagattgcgccactgcactccatcctgggcaacagagcaagactgtctcaaaaaaaaaamaaaaaaaaaaaaaaacaacaactccaagccatccaactccctctattcaatctcataaatccaccatcaccttttgcctagactattagaaggctataagtcttctctctaccattctccacgtagtggccaggttgtttaacttttttggatgtataacatacatttaaaaatgtgcatatctggcctgatgtggtggctcacacccgtaatcccagcactttgggaggctgaggcagggggatcacttgaggccaggagtttgagaccagcctggccaacatggcaaaccctgtctctactaaaaatacaaaaattagccgggtgtggtggcacatgca

SEQ ID NO: 13891 - DNA, 503 bp, Homo sapiens
taaaattagccaggcgttgtggtgggcgcctgtaatctcagctactcgggaggctgaggtacagaactgcttgaacccgggaggcagaggttgcagtgagccgagattgcgccactgcactccatcctgggcaacagagcaagactgtctcaaaaaaaaaaaaaaamaaaaaaaaaacaacaactccaagccatccaactccctctattcaatctcataaatccaccatcaccttttgcctagactattagaaggctataagtcttctctctaccattctccacgtagtggccaggttgtttaacttttttggatgtataacatacatttaaaaatgtgcatatctggcctgatgtggtggctcacacccgtaatcccagcactttgggaggctgaggcagggggatcacttgaggccaggagtttgagaccagcctggccaacatggcaaaccctgtctctactaaaaatacaaaaattagccgggtgtggtggcacatgca

SEQ ID NO: 13892 - DNA, 503 bp, Homo sapiens
taaaattagccaggcgttgtggtgggcgcctgtaatctcagctactcgggaggctgaggtacagaactgcttgaacccgggaggcagaggttgcagtgagccgagattgcgccactgcactccatcctgggcaacagagcaagactgtctcaaaaaaaaaaaaaaaaaaaaaaaaaacaacaactccaagccatccaactccctctattcaatctcataaatccaccatcaccttttgcctagactattagaaggctrtaagtcttctctctaccattctccacgtagtggccaggttgtttaacttttttggatgtataacatacatttaaaaatgtgcatatctggcctgatgtggtggctcacacccgtaatcccagcactttgggaggctgaggcagggggatcacttgaggccaggagtttgagaccagcctggccaacatggcaaaccctgtctctactaaaaatacaaaaattagccgggtgtggtggcacatgca

SEQ ID NO: 13893 - DNA, 547 bp, Homo sapiens
caggttgacatattcctcttccctgaggggcacattttggaaactgtctgaggtcgcaggcttgttgccactgagtagctgggcaacattcctcccctggcctgtctattttaagccacgcagataactagggaggcgggggcaagacaacaaaggctgaacagtgggtgaaggacatctggcaggaagggctggcagcaggcagatgggttttcaatggcatggatgggctcccactgtgtagagcctgggagggcgaggaacgggctctcggaccatggcagcccccaygtgaggggaagggaggtggcaggcacgttgatcaaggcatctccccccacttattcattcattcattcagcaaatattggcctcctcaaacctgcaggttgtttttcgtcggttctggaccattctcagccattagcgattcagagagttctcatgccattctctcttgcctctctgtctgcaactccaaacaaatgtatgacaacatttctcaaagaaccttccaactctcttcttctccctttggtattttctt

SEQ ID NO: 13894 - DNA, 570 bp, Homo sapiens
aataggcagcttaggagtcagcccaagagctcatgagtaacattaagcagtcattttttctaaactgctcactgtaatttcgctgtactttttagcttcctgaaggtctccatttctgttgtccatcaggaaggcttggacaatagctacttcactctgccttgactgtgtctgtgtccagaactaagtgatggaaagggaggaggagaaaaaaaaagcaacaggcattctccccatcctcctcgggtcacaccttctctgatcagagagtttcaggtgcctgcgggtcccctctgctgccactgtcactacaccatcacagctacacaagagagtagaataaagaaaacaaaacaaamaacaaccaaaaaaaactcccaggggatttatttctactccatggtttaggatccttctcttctgcaactcaagctaaaactagagcaaatgtcctggtgttccctctggagctgacttctaagttgaaggatgccttaagtccagagctgtggatatcagggggaaaaaaataaaaatttacttttacgtttctggtacatgaaattctga

SEQ ID NO: 13895 - DNA, 570 bp, Homo sapiens
aataggcagcttaggagtcagcccaagagctcatgagtaacattaagcagtcattttttctaaactgctcactgtaatttcgctgtactttttagcttcctgaaggtctccatttctgttgtccatcaggaaggcttggacaatagctacttcactctgccttgactgtgtctgtgtccagaactaagtgatggaaagggaggaggagaaaaaaaaagcaacaggcattctccccatcctcctcgggtcacaccttctctgatcagagagtttcaggtgcctgcgggtcccctctgctgccactgtcactacaccatcacagctacacaagagagtagaataaagaaaacaaaacaaaaaacaaccaaaaaaaactcccaggggatttatttmtactccatggtttaggatccttctcttctgcaactcaagctaaaactagagcaaatgtcctggtgttccctctggagctgacttctaagttgaaggatgccttaagtccagagctgtggatatcagggggaaaaaaataaaaatttacttttacgtttctggtacatgaaattctga

SEQ ID NO: 13896 - DNA, 570 bp, Homo sapiens
aataggcagcttaggagtcagcccaagagctcatgagtaacattaagcagtcattttttctaaactgctcactgtaatttcgctgtactttttagcttcctgaaggtctccatttctgttgtccatcaggaaggcttggacaatagctacttcactctgccttgactgtgtctgtgtccagaactaagtgatggaaagggaggaggagaaaaaaaaagcaacaggcattctccccatcctcctcgggtcacaccttctctgatcagagagtttcaggtgcctgcgggtcccctctgctgccactgtcactacaccatcacagctacacaagagagtagaataaagaaaacaaaacaaaaaacaaccaaaaaaaactcccaggggatttatttctactccatggtttaggatccttctcttctgcaactcaagctaaaactagagcaaatgtcctggtgttccctctggagctgacttctaagttgaaggatgccttaagtccagagctgtggatatcagggggaaaaaaataaaaatttacttttasgtttctggtacatgaaattctga

SEQ ID NO: 13897 - DNA, 515 bp, Homo sapiens
  misc_feature (1)...(515): n = A,T,C or G
annnnnnnnnnnnnnnnnnnnnnnnnnnnnnnnnnnnnnnnnnnnnnnnnnnnnnnnnnnnnnnnnnnnnnnnnnnnnnnnnnnnnnnnnnnnnnnnnnnncaggaactgaaatccactgttctctgtaaaacagcgccaacccaagatagagtagactcggggaggtgtgggtggcagtgggtcggagtggacgtccttctcccctgatcttcacaatcaaataacaaagcctagtgttcattatttatgtaaaacatttgaaattagttttaaaatgtttcaatatcatatagcaatgagactaagtagatttctttagtccaagaataaaataaaatcatgatgaagtaaaccaagttctgattttcacattctcagtaataagcaatctagcctagtgggaacaccttggaatatgattcagggactgaagtccttgtgtactgctgtttaaatgtatgagcttgagcgagttactaasggcctttgctcccatctgaatgcactctaaaa

SEQ ID NO: 13898 - DNA, 574 bp, Homo sapiens
gttttcatcttctttccaaatattttattttcctaataaactacatatttaatgaactcaattccaagattctagttaaaagctcagaggtcaaaacaggttaaaaaaccagtctcaatttagacttgtcagtcaaacaccacttaatatactttcctctgcatgcttgaaatagtttcatggaagggaaacgaattttacaagctactaggttttttcatttgagagtagcagaaagtcttcaacatcatttaggaatgaaattaatctaccatatacagatgttaaatcaaaccatcaaaaacttggcatttgcattcttttattgttttctaagtactttgtgcccagtgctgtgttagatgctatagtagatattaaagagatgataagatagtatttcctttccagagattatggcccaattaggatatgmagtatgcacatatggaggctgggcgctgtggcgctcacctgtaatcccagcactttgggaggcagaagtgggaggattgcttgaggccaggagtttaagaccagcctgggcaacatagggagaccttgtccctacaaa

SEQ ID NO: 13899 - DNA, 1553 bp, Homo sapiens
atatctttaaaaaattgtggctatttcctaatcaaaggtttcaaaaggcatatttttagcacataagaaaatgatgaacgagaaacattgatcagccaatgggtaagtctttgggagctccatcaagaacctaacatggtttatctttaaagtctgtgcccatgagacagagacaggcagagacacaaaattttatgtctttaaatggtaaccatataagaataaaaatgtagacaactattgtcatcaaattcttagaatgctcagaatattctttgacctgataccgttgcygcaaaatcaaaaaaatagaaaggaacaaactatgagttcatacacattaccctgaagcattgcaactctgtcacagagataagttccttgttccaagatgcatatacttcggttgtgaaagtagtttatctctgtttaccacgataaacataaaaccacatgcaagaacctattacagaaaaataatagttttctgtaagtggactgtatccaacagcacagaattacattaagttcttcactttaatttgcaaatggtaactaatctagtcaaaatgttaggagtaatgtgatcactatatgttaactaccaatccctatatagtgagaaggtgaagaaggaaaatctaacattaatgatatacatagttttcttgtaataaaatgtgtccaatccatctacgattttgccctttaagcttctgagtgtgtatcagtagggtacagtctatataaagtatgtaagactgttgtctttgcatttatggtgctagatcctgaactcagtggccgtcaggaagagaagatgaatgtgaagtagagaatggaagggaaaactagaacttacaagatcaatctatcttgtaattgacagaatggaacccatattagtatctcaccatcctcaagcttccaacctcaatgatggtggtgtcctgaaaagaaacttgtacctttcctcacagagctacgcatgcacctgattcagcagtcacagaggctaaagaaggctctagcaagttggaggagctgaaaactctgctggtgcctctcatcaacaaagtgattcagcagataaaataacacatgagttaactacaacagtgtttgctgcacttttcttagtcatctgggtataaaaataacatggtcattgatttacttttacctttcaaatctcttagaaatgtctcacgtggtttaggataactgagaactgtgctaggaaaggaattataagaaacagtgctagtttagctaagttgaaataatacaaatttgccagactggaaagtgaagagcaatagggtaatatcataagacatattgcatgagggagacatgttgacacgagtggcccaattcagatctgtatatttggatacaagtgagtgatgtgtacttgcatggcctgaaaaggaacttctatttgcaaataaattaaaataattcctaaaagaaaaaataccccaccttaattatcactgaggaaaacataagaaactttcttttagacttccaattttagaataacgatg

SEQ ID NO: 13900 - DNA, 536 bp, Homo sapiens
aaccctatcagaaataactaaatatttggatatagttctttgtagatctcttatgtttctagacaatctaggtcttctaagcaaaagcatttatagtcaatttaagacttattttttatttatttatttctttgaggcagggtctcactctgccacccaggtgtaagtgtaatggcatgatcacggctcattgcaatctcgacctcccgggctcaaaagatccttcagcttcgctcttcactgtcgtctccctattgtaggggatgaggtttactatgttgtccagtctggtctcaaactcctgggctcragcaatcctcttgctttggcctcccaaagtgctgaaatgacagaatttaagattttttgtacaagacattccagaaatttaaagctaaagtcttccttttcctcccaggatgagatttgcttactttccaaggtaataagataatacatctccttggaggggagaatgtgtgtgcctaccagagcatccctataagatttgaaggagtcctaagcttagtattcct

SEQ ID NO: 13901 - DNA, 535 bp, Homo sapiens
ctaatatatatcacaaatatattcataaatttaatatcttttgtgccctttactcagttcttctcaatagtaacatcttgtaaaacaagatggcaaacaggacattaacattgatgcagccaagatagagaacatttccgtcaccacagggattctttatgttgcccttttgtagagatatcatttcacacctgtccccacccacttygtagcccctgccactaacctattctccatttctataatttttgccatttcaagaatggcatataaatggaatcatacagtatgtaatctttcaggattagtcttattcactcaggataattccctagagattcatccaggttcttgcatgtatcaataatttattcctttttattgctgagtagtattccatgacatggatatacgacaggttgtttaaccattcacccactgaagtacatctgggttatttccagtttgaggctgtcacaaataaagctgcaataaatatgtatgtgcagatctttacatgaccatacattcttca

SEQ ID NO: 13902 - DNA, 535 bp, Homo sapiens
ctaatatatatcacaaatatattcataaatttaatatcttttgtgccctttactcagttcttctcaatagtaacatcttgtaaaacaagatggcaaacaggacattaacattgatgcagccaagatagagaacatttccgtcaccacagggattctttatgttgcccttttgtagagatatcatttcacacctgtccccacccacttcgtagcccctgccactaacctattctccatttctataatttttgccatttcaagaatggcatatraatggaatcatacagtatgtaatctttcaggattagtcttattcactcaggataattccctagagattcatccaggttcttgcatgtatcaataatttattcctttttattgctgagtagtattccatgacatggatatacgacaggttgtttaaccattcacccactgaagtacatctgggttatttccagtttgaggctgtcacaaataaagctgcaataaatatgtatgtgcagatctttacatgaccatacattcttca

SEQ ID NO: 13903 - DNA, 546 bp, Homo sapiens
ggccatgatctgtagcagtgtgtgaggtagcctgaccagaagcctgagcttgtcccartgccagctcatctctgggaaaaatacaggcaggctggggaagccttagcgaatggaaccccacatggataacatggggctcctagtcttgaattccactttttacagagcttctgatccttacatttccagggtttttacctttcctgtgtctttgaccaagggaaaaataccagtgattgttaaagaactttgctaccatggatgcccagagcacaccgtggttgcctatcatggttctcattgtgctattatcattggttagtctttttctcttttgggaaacatggcagagatagaaacaaagccctttgtggtggtcatgactcttcttcccaaactatgttcttctctgggctctggtaaatagaagtcactctgaacatatggttgcatcctcccaaggtccctggatgcttgtcttccttccaggagaatgcaagacagttatggagaggctgggggtagggatggggggatcacaaattc

SEQ ID NO: 13904 - DNA, 546 bp, Homo sapiens
ggccatgatctgtagcagtgtgtgaggtagcctgaccagaagcctgagcttgtcccaatgccagctcatctctgggaaaaatacaggcaggctggggaagccttagcgaatggaaccccacatggataacatggggctcctartcttgaattccactttttacagagcttctgatccttacatttccagggtttttacctttcctgtgtctttgaccaagggaaaaataccagtgattgttaaagaactttgctaccatggatgcccagagcacaccgtggttgcctatcatggttctcattgtgctattatcattggttagtctttttctcttttgggaaacatggcagagatagaaacaaagccctttgtggtggtcatgactcttcttcccaaactatgttcttctctgggctctggtaaatagaagtcactctgaacatatggttgcatcctcccaaggtccctggatgcttgtcttccttccaggagaatgcaagacagttatggagaggctgggggtagggatggggggatcacaaattc

SEQ ID NO: 13905 - DNA, 546 bp, Homo sapiens
ggccatgatctgtagcagtgtgtgaggtagcctgaccagaagcctgagcttgtcccaatgccagctcatctctgggaaaaatacaggcaggctggggaagccttagcgaatggaaccccacatggataacatggggctcctagtcttgaattccactttttacagagyttctgatccttacatttccagggtttttacctttcctgtgtctttgaccaagggaaaaataccagtgattgttaaagaactttgctaccatggatgcccagagcacaccgtggttgcctatcatggttctcattgtgctattatcattggttagtctttttctcttttgggaaacatggcagagatagaaacaaagccctttgtggtggtcatgactcttcttcccaaactatgttcttctctgggctctggtaaatagaagtcactctgaacatatggttgcatcctcccaaggtccctggatgcttgtcttccttccaggagaatgcaagacagttatggagaggctgggggtagggatggggggatcacaaattc

SEQ ID NO: 13906 - DNA, 546 bp, Homo sapiens
ggccatgatctgtagcagtgtgtgaggtagcctgaccagaagcctgagcttgtcccaatgccagctcatctctgggaaaaatacaggcaggctggggaagccttagcgaatggaaccccacatggataacatggggctcctagtcttgaattccactttttacagagcttctgatccttacatttccagggtttytacctttcctgtgtctttgaccaagggaaaaataccagtgattgttaaagaactttgctaccatggatgcccagagcacaccgtggttgcctatcatggttctcattgtgctattatcattggttagtctttttctcttttgggaaacatggcagagatagaaacaaagccctttgtggtggtcatgactcttcttcccaaactatgttcttctctgggctctggtaaatagaagtcactctgaacatatggttgcatcctcccaaggtccctggatgcttgtcttccttccaggagaatgcaagacagttatggagaggctgggggtagggatggggggatcacaaattc

SEQ ID NO: 13907 - DNA, 700 bp, Homo sapiens
tttttttgagagatggagtctcaatctgtcgcccaggcgggagtgcagtggtgtgatctcatcactgcaacctccgcctcctgggttcaagcaattctcatgcctcagcctcctgagtagttgggactacaggtgcatgctgccatgcctggctaatttctttcgtatcttagtagagacggggtttcaccgtgttgcccaggctggtctcaaactcctgagctctggcaatccgcccaacttggcctcccaaagtgctaggattacaggtgtgagccaccaagcccagcctggaaattctttttaagaggtaaactggcaggttggaataccttctatgatgtcaattctgtaatctgctgtgctccaagggaatatagaaaccatctggtccagaaacttcaagktgtgcttcaagaatcacaagggaatctaccaggtcttttcaagggccacttactctaagcagagcactagtcctttttgtccgatagccttacgtgcaagcatttgttgaagaaagcattttgcaataacacattattattaactaaagtccacatttcacttgatttccttagtttttacttaataacctttttatcttccagcatcccctccacatcctaccccagccacattttagttgtcatgtctctttatgctcctcttggcaggacagcttcttagactttccctg

SEQ ID NO: 13908 - DNA, 700 bp, Homo sapiens
tttttttgagagatggagtctcaatctgtcgcccaggcgggagtgcagtggtgtgatctcatcactgcaacctccgcctcctgggttcaagcaattctcatgcctcagcctcctgagtagttgggactacaggtgcatgctgccatgcctggctaatttctttcgtatcttagtagagacggggtttcaccgtgttgcccaggctggtctcaaactcctgagctctggcaatccgcccaacttggcctcccaaagtgctaggattacaggtgtgagccaccaagcccagcctggaaattctttttaagaggtaaactggcaggttggaataccttctatgatgtcaattctgtaatctgctgtgctccaagggaatatagaaaccatctggtccagaaacttcaaggtgtgcttcaagaatcacaagggaatctaccaggtcttttcaagggccacttactctaagcagagcactagtcctttttgtccgatagccttrcgtgcaagcatttgttgaagaaagcattttgcaataacacattattattaactaaagtccacatttcacttgatttccttagtttttacttaataacctttttatcttccagcatcccctccacatcctaccccagccacattttagttgtcatgtctctttatgctcctcttggcaggacagcttcttagactttccctg

SEQ ID NO: 13909 - DNA, 554 bp, Homo sapiens
ccccccgaccctaccatccttcacctcttgagaatcattggtcactcatggctccatcctctcaatctgagggtgtctccagttctcaggggtgattttcaccagtttccttgttcaatacaagttcattaagcatctattatgtgctctgtgttgggatagtctgtgagcagagtgtctctgctttcatggagcttaccagccagcaaagaaggtaagcaatgagcaggcagtgaggaaatggttccacagctgtggctgtgatgaaaccaacatagattgaaagcttatgtgaagccaggcactgtgccaaggcccctaygtgcagcatttcattgcaacctcacaagagctgtgcaaaagcaagtgctaccatcatttcttgtcttattattgttcaaagtgagactcagaagggtcaggccatccgtgtaaggaaacagctaatcagtggtggtcttgcagttggacctgggattgaacacgtgtggtctgtcttctgcctatgttcttaacacctagaccagattgagtcctatgttagagaagtccaa

SEQ ID NO: 13910 - DNA, 576 bp, Homo sapiens
gtagatcaagttgatatatatataatgtatatataaaactaaatatatgttaccattctctctatatgtatatacacacactatatctttaaaatttgttatgcagtcctacatagattatgacttggtggttacacagactgccaataatatgtcaagtattgcaaaacaaattagaaatagattttatcaattttttwaaaatataagaaattagaatttaataaccaaaccagaaaggaagaaaatgctaccacctcaaaaattacaaaatatattttccttttaaacaatggaaatcattgcttctcttaagcaatgaggaatccaaatcaaaatgatagaatatctaaaaaataatgctgtattggtaacacatattggtaatacatattaataatacatatcaagacactttggaaatacagcaaaggctttccctgaaagataatgtaaagtttttaaaggcatatgttagaaaagaaaaattacaaataatacaataattagcatctatttaattagttcgaaaaatattttaaaggctttctaaggaaagcagatggaattaataca

SEQ ID NO: 13911 - DNA, 576 bp, Homo sapiens
gtagatcaagttgatatatatataatgtatatataaaactaaatatatgttaccattctctctatatgtatatacacacactatatctttaaaatttgttatgcagtcctacatagattatgacttggtggttacacagactgccaataatatgtcaagtattgcaaaacaaattagaaatagattttatcaatttttttaaaatataagaaattagaatttaataaccaaaccagaaaggaagaaaatgctaccacctcaaaaattacaaaatatattttccttttaaacaatggaaatcattgcttctcttaagcaatgaggaatccaaatcaaaatgatagaatatctaaaaaataatgctgtattggtaacacatattggtaatacatattaataatacatatcaagacactttggaaatacagcaaaggctttccctgaaagataatgtawagtttttaaaggcatatgttagaaaagaaaaattacaaataatacaataattagcatctatttaattagttcgaaaaatattttaaaggctttctaaggaaagcagatggaattaataca

SEQ ID NO: 13912 - DNA, 581 bp, Homo sapiens
aatcaagtgatttgaaccttcattttccaatgacgacaatgaggtccagagaggcaaactaacctactcaaggaagcacatctaacataactgaaactcaactcaaaattaaacttcagaatccaattcattatttcagttgaggtggagtgaggaaagactacctacactttttaaaaatttttttgaagtttagaaccaayataaattttattaaacaatggacttttaaaacaatctctccccctttcacaccagaacagtatggaaaaattggatatcacatatgcaatgctacattaatggtcaaaatatttttttcctgaaattttgcttcacatttaatatgattatttttataagagcaataactaaaaataaaggaatgctgtagatataccttcagatagtttttttgcaaggtgagtaagtttctaaaaagattgacaggtaaaacttgaaatttgggaaatacgtgcttggattcctgttgtacaacgggctacaaggaactgtcacataaataacacagcactgaaatgtacagctgacgtgagctgttagtaggagcagtgtctagc

SEQ ID NO: 13913 - DNA, 581 bp, Homo sapiens
aatcaagtgatttgaaccttcattttccaatgacgacaatgaggtccagagaggcaaactaacctactcaaggaagcacatctaacataactgaaactcaactcaaaattaaacttcagaatccaattcattatttcagttgaggtggagtgaggaaagactacctacactttttaaaaatttttttgaagtttagaaccaacataaattttattaaasaatggacttttaaaacaatctctccccctttcacaccagaacagtatggaaaaattggatatcacatatgcaatgctacattaatggtcaaaatatttttttcctgaaattttgcttcacatttaatatgattatttttataagagcaataactaaaaataaaggaatgctgtagatataccttcagatagtttttttgcaaggtgagtaagtttctaaaaagattgacaggtaaaacttgaaatttgggaaatacgtgcttggattcctgttgtacaacgggctacaaggaactgtcacataaataacacagcactgaaatgtacagctgacgtgagctgttagtaggagcagtgtctagc

SEQ ID NO: 13914 - DNA, 581 bp, Homo sapiens
aatcaagtgatttgaaccttcattttccaatgacgacaatgaggtccagagaggcaaactaacctactcaaggaagcacatctaacataactgaaactcaactcaaaattaaacttcagaatccaattcattatttcagttgaggtggagtgaggaaagactacctacactttttaaaaatttttttgaagtttagaaccaacataaattttattaaacaatggacttttaaaacaatctctccccctttcacaccagaacagtatggaaaaattggatatcacatatgcaatgctacattaatggtcaaaatatttttttcctgaaattttgcttcacatttaatatgattatttttataagagcaataactaaaaataaaggaatgctgtagatataccttcagatagtttttttgcaaggtgagtaagtttctaaaaagattgacaggtaaaacttgaaatttgggaaatacgtgcttggattcctgttgtacaacgggctacaaggaactgtcacataaataacacagcactgaaatgtacagctgacrtgagctgttagtaggagcagtgtctagc

SEQ ID NO: 13915 - DNA, 534 bp, Homo sapiens
gagagagatgcggctgggcgcagtggctcacgcctgcaatcccagcactttgggaagccgaggtgggtggatcacgaggtcaggagatcgagaccatcctggctaacacagtgaaagcccgtctctactaaaaatacaaaaaattagccaagcgtcgtggcaggcacctgtagtcccagctactcgggaggctgaggaaggagaatggcatgaacccaggaggcggagcttgcagtgagctgagatcatgccactgcactccagcctgggggacagagcaagactccatctcaaaaaaaaaaaaaaaatcatttccaaaactcaaaaggtcattttctttagttctatactttaagaagaaaataattgaaagccaaaattgacaaatgggatctaattaaactaaagagcttctgcacagcaaaagaaactaccatcagagtgaacaggcaacctacagaatgggagaaaatttttgcaatctactyatctgacaaagggctaatatccagaatctacaaagaactcaaacaa

SEQ ID NO: 13916 - DNA, 675 bp, Homo sapiens
cagagaaaagggaaaayttaaaaacttttcaagttactcagaacccagattccttgatttgctaaaacagtggcagagagctatgagattaaagaagaaactccaatcccaatatttttggcatttgttgtttaattctaaacaaatgaggaataaatatctaatctaattcagattcttacacattccttgatgtctctgacagctgaggtactgaatttcctcgagatggtagatagtagacagtgttgttctctaaagatctatcattaaatattttgtagagatgtggaaatgaagatttacctcttccagacccttcaggttatctttagagtgagatggcagcagcacgaacatgctgagcttccccttggtgtacctcatttccaggatctgtgccttcacctcctctatgaagccaattctgtagaggcctttttgcgtcatcatcttcacactcttgttttcattctgtagtagtcaaggtaggaggtcacaggacggctatgggaaactcccaaattcatatggccccagcttcacggaggacaggggttcctaaagatgagaaggttctgcaggagaagtcctgagccacaccagggatccagcctacaagagtctacccactcatcagtggcccttactttgccaacactttatctttccgtg

SEQ ID NO: 13917 - DNA, 844 bp, Homo sapiens
agggttccctttatgttaggaaatggggtcagccttggtgaataatatgactttaaaaaattacagttgtgttaaatgttgccaaggaaaaagcacagtgtgcaatgaaagcatctcacaatatatcatccgtatcttcaactaacccggaaagggtgggagaaaaatggttaaatttcagaagagacagctaagctgaaatctgaagggtgtatataagttagtgggtcaacagagggaggaggcctctctcaaaggcctgggtatgaaagctcttggtggattcaggaaaacagatgtggctggaggttggggagggaggagagtaggatatatcgctgtagatgattcttagtcaggctgaattataatcaggaatcctggcttaaggagataggcaatcttttaggctctacttcactgtgagtttagtggtaaccttggatctggttctagtaaaggggcttctctatctttcccctgtagggaatctccagttggtttgctggtttgggcatttgaatgcttatgatattcttgagagagagtctgtctcagtaacctatttaagggatggaatcttgtcactcaaccagagcactgtagctgggatcctgttctgtgctgcctgaacttcctctgtgtggggtggccgaggttacaaccctgctggtccccactctttgacagtaactctgtccccttcaccacaygttgcagatgagtcgactcctaaatgcctgccttactctgtgagtgcatccctttcaagtaagtccctgttttctcagcagtgtcttgtccaggagtttacaaaattaagctcttgttctgacgtggtaca

SEQ ID NO: 13918 - DNA, 520 bp, Homo sapiens
tgcccaattccattttgatcatgaatatataaaatgttaagctgaaaaaggaagaaatgtagagccgtgaaaatgagtatcagtggtgcatgtacttactgaactcataagcactgcttctttagcatcgtgggtgaggcaaccctaggaaagattaaaagcatgccaagmggagcaactattcatattcgttacggtctcaaagtagatctcacagaacactgagctatgtttgtcattatgtcattatcccactctaacatattccacaaataaaacacaagggaaaggctgagacctgaaagaatttttttaatggtcatcttttaaaattgagtgaggaggggaaaatatatacatgaattctttcattattttagaggaaactatcatctgtttggtttcattgtttatttggtgaaaggattatgctctcatggcttctcttttcttttgtaacagagccatattcattttttcagtgtcccctccagtttttgtgcatactcacacatatttt

SEQ ID NO: 13919 - DNA, 520 bp, Homo sapiens
tgcccaattccattttgatcatgaatatataaaatgttaagctgaaaaaggaagaaatgtagagccgtgaaaatgagtatcagtggtgcatgtacttactgaactcataagcactgcttctttagcatcgtgggtgaggcaaccctaggaaagattaaaagcatgccaagcggagcaactattcatattcgttacggtctcaaagtagatctcacagaacactgagctatgtttgtcattatgtcattatcccactctaacatattccacaaataaaacacaagggaaaggctgagacctgaaagaatttttttaatggtcatcttttaaaattgagtgaggaggggaaaatatatacatgaattctttcattattttagaggaaactatcatctgtttggtttcattgtttatttggtgaaaggattatgctctcatggmttctcttttcttttgtaacagagccatattcattttttcagtgtcccctccagtttttgtgcatactcacacatatttt

SEQ ID NO: 13920 - DNA, 522 bp, Homo sapiens
ttaaatctcaggtatgggcaattactaagataaagatatgaaggatttcagtctattgttcttaagaatttatatagtactataagccataagtccaagtgtaagatatattaccaggaacactaaggaattagaacagattattttctgtattgttgtgtttttgatccaagactcagcacaggatgcctgagaagcccaaaataaaaggagaacagagtagtctgctattaatttgtgcagcactctactgtacttggctgagtaaatcagtacctacacaatgccagcatctagagagcaataaatatttgttgaatagatatttgaatgaataaatgcatattcaggttcctttacattttaatttaaattcaagagggctcattaatggggaaatgtagataatgtagaaaatrcggactggatactggtaagcctttggttttaagttcttaaatcatcaccattccaaagcaaaaatgatggtggtaacagcggtagtgcacgtgagtatgttaa

SEQ ID NO: 13921 - DNA, 539 bp, Homo sapiens
ggctaaatagcctaaaagaactttatttaccctagtacaaaatgttgaaaagacactctactggaaactgaatggaactatacaaatttctgtcctggaaattaatgttgtttttccgtttaatcactgaaagcatattactaaacataaaaaatcatggtttatttttctttacattttattatctattttaatgttgactttttaaaatattttacctkagggacaaaatgttcatttaaacccaaatattttaagatttatttctggtgtcttttcatcaattatttataatttataatccagatttcccaaaggggattcaaagaaatccacaaaaaatttcctagtcttcactttattctctcaactagagatcatgttctaaagcaatgaatctctattttaatactaaaatttaaacagaagtctcgagatagtcaattctcagcttttggggaatacattattctgcatattaagacaaaaataggatgtaaaccagatgttcccagattatgaaatttagaaaagaacat

SEQ ID NO: 13922 - DNA, 302 bp, Homo sapiens
tgtaaatacccagtgagtagtacacagtataagagcagcaattacaaatatagatgtctacaggagcacttattcatatatgcacaagaggatattataggactgtttacaatatttagaagagttaacagcatctgagaaaccattatccagtcttactagggactatataaacaaactggyttattatttagtaaaaaataaattatgcaacattaaaaataaatgaatttgttctatatgtaatattgtgcatgaatttcagaaatccaatattaaataatgaaaaccgatatacaaca

SEQ ID NO: 13923 - DNA, 538 bp, Homo sapiens
caacaaccttgggaaattgtgtacaagttttatactcattgtatagatttgtaaactgaaatgtggagatattaagttgcccaaaattactttagaaagacccaaatcaaggcagtctagctcaaaagtctgaagttttttttaccattaagcgttcttactgccttgagacactttgtttaatacctattcctaccactaacaactcttggttttactgcacagtcatttcattccttcgagtttttagaccatagtaagtacattttatgatttaytattacacaacatgaaaaaatcctcgaaatgaccacttgctgtattagtacatatatcgaaggtatatttatctaactgatcaatcaattaaaatgttgggaaacaaccccccatagaaacagattttgggactcttgtctttgcaacctccttcatagaaactcttccaatccttcctccattatttcatagtacttctgattttcatcattaaagcaaatgaaatggtaagactgaaggaaatctggatactctttca

SEQ ID NO: 13924 - DNA, 1067 bp, Homo sapiens
atttagtataaaaaatcctcttttgctagctaatgtttgttattaaataaatatgtttggaataatttatttaaatatcaacagaatttattgttgaagaaaatattctgattatcaagacaatttataaatatgtattcaagatgtttgagatgttttaacttatgttttgatactaaagaaactaatttcatcaagtctgtaactactgtataaagacattgagagcgtgttttcatataagtattctccctgatattatggtctgtttattcaaatctattgaaacattccttctaattatgatactaagttttacattgttacagaattttccttggtgtcctgtatttaaaaaacaccaccttgctattcttaaatgtgcagctgactatttcagagtgtaatgggcccagtgataattatttttagacaaaattattattgtacaaaaaaaattagcaagatgctatttggaaaagtgttcagggtattaayatgatgcacatcatctaacaggcatgtaaaaatcatatttagcaatagactgacaatttgcttgattgtattagttagaaatccctatgtgagtgaaaataaaatttcctaaaattcagcctgtttttttattatcaagctaaataataataattgtgaaaaagtgcagattctgtactatttattttccaactgaaataaccagggaattgcatctactaggggagagagtggtattaatctttatttgtatcaataattgattttgtttgcatcagtagttaatcatagcaatttggtgggccaagtcatttgttaagtaaaatttttcatatcacagtggcgtcattgtatgttaattatttatttatatttgattacatttattttgtttgttaatagccatataatgataactcaacaatgataatatgctcttcgatacaacaaaagactcttcagttctatttagggaaaacagggtagggcattcagtttactgtaaaatcacaactttattatcaaaacaaagaaaatgttaaaaatcgaggacataaaaatgaccacca

SEQ ID NO: 13925 - DNA, 511 bp, Homo sapiens
ctctcctagtagaatgtacacagtaaacgatgatagtaaataaaaatggtatgttaaaaaaatgtaaaacaaaatcacaccacacacagctggatctattctagtgaaaagcaagtagcaaaacctgaaaactgcatttttgcttagcctcttcatccaagcccaattgtttattttatttcatttttaataattttttaattgaaaattcgtaactgtgtatatttatggggtacatcatgatattttgatatatrcaccaagcccagttatttataggtaaggtaaggtccagtatgttggaatctcctagctgtgttagaatttcccacgtttacagtttctcatgggagagtcaggctcagaatgaactttcaggagctgacaattttaattaagagtctagagccaacttaaacaggtgattagtcttgagaatagaagatgaaactaaagcacaattcatgaatttgcagatggttcttccttcacatttttgggagactaatga

SEQ ID NO: 13926 - DNA, 518 bp, Homo sapiens
aaccccctacagagtcacctgagagagtgtccgggaggccattcacagggtggtcattcgagaggaaatgcctcactggaggcactgtactgtgaagctatcagaagaggtgctgggtaagctgctgactactgttaggggcaggaacctggagccctggaggaagctgatctgcagcaggctggtgacagaggcacaaccaaaccctgcagtgcccttcactgagaagccttaccttcttgataactggcaaaggagaagtatttgcagagcccatctctcatcactgagcaggcaaagaagggtagatttggagctgagaagcaataagttaataacttaaagaagataagacttctgtcttctgggctctcaatatccatgctttctgcttccattccctgcactagctcattaaaactttcaactctaaaattctasggttttgtattcttcacttaagtgtgaattgctgtgcttgagatcccaagtccacattaactggactttaaaaaatc

SEQ ID NO: 13927 - DNA, 1278 bp, Homo sapiens
acccattatgtcctcgcctcgccccttcaggcatgtgcgttcgcagcccctgcctggttggctgttggatccaagagaatggcagagagtgcccaccccacamggtgcaggagctgtggggtattttcatgtgcccccaagtggcccagaagtagcagagagaacagctgggctaggagggctgtgggaccagcacaaggagcgtgtccaggatgcccacgatccaggctgcaagacgagtgtctcagcaagtgctgactcagagggatgtgacccaatgaccatgttagttctcactgtcacctggtaccaggtaaaccctccaaaaagggaaagggccaccctaaattgtctgaggttaaacttccactacccatgcaacacagggactcaaacagaaataatagtgaacatggcaggcatagcgatgtctaagtccttttatgagaaaatgtttttaaatgtcccagccacatgaagaaaacattctgttactgtcccatttcatagatgaggaaacacacgttcaagcccagcgtgttcaagtatacttggctaaggtcacagggctgggaggaagcaggtgcaaaccaggcattctggatccagaatctgtgcttcaaccagtttgcactaatgccaccaagatattgtgaagttttgcaacaaaaggtgcatttctgccacttcactggtggattgaggtgtggcttcacctcctctctaaacaggacccgtaaacaccaactgctttctggacctcttcaggctgaggctgccctgttgtacagacagtgaattggagggcatgtgcccatgtaaacagctgggctgtttggtgtgggggtgggcgggggcactgcagcctgacctttgctccagcctcttccttccttggggaagtggttaattggttcgccaggccagagggtcactcctagaagcccctgggacacgatcgatttctactcagaaagcctgagcctggaccagctgtcacttgtcagtgtcactggggagtcacgtgggctggagaagaaagtgccctgagctccatcctcagccacatgggctcaaactcccagtacagagactcccagcccagcctgccctcaaatagaaatgcttgttaacaggtcctgcactgctcagaaaagagtcataaaatactgtaacctagccagacaagttattttataaaggtcagtaaatgcccaaacatgctaaacagtgaaatgacagcaattcgaatcaaatgttatttattatatgataaaa

SEQ ID NO: 13928 - DNA, 1278 bp, Homo sapiens
acccattatgtcctcgcctcgccccttcaggcatgtgcgttcgcagcccctgcctggttggctgttggatccaagagaatggcagagagtgcccaccccacacggtgcaggagctgtggggtattttcatgtgcccccaagtggcccagaagtagcagagagaacagctgggctaggagggctgtgggaccagcacaaggagcgtgtccaggatgcccacgatccaggctgcaagacgagtgtctcagcaagtgctgactcagagggatgtgacccaatgaccatgttagttctcactgtcacctggtaccaggtaaaccctccaaaaagggaaagggccaccctaaattgtctgaggtyaaacttccactacccatgcaacacagggactcaaacagaaataatagtgaacatggcaggcatagcgatgtctaagtccttttatgagaaaatgtttttaaatgtcccagccacatgaagaaaacattctgttactgtcccatttcatagatgaggaaacacacgttcaagcccagcgtgttcaagtatacttggctaaggtcacagggctgggaggaagcaggtgcaaaccaggcattctggatccagaatctgtgcttcaaccagtttgcactaatgccaccaagatattgtgaagttttgcaacaaaaggtgcatttctgccacttcactggtggattgaggtgtggcttcacctcctctctaaacaggacccgtaaacaccaactgctttctggacctcttcaggctgaggctgccctgttgtacagacagtgaattggagggcatgtgcccatgtaaacagctgggctgtttggtgtgggggtgggcgggggcactgcagcctgacctttgctccagcctcttccttccttggggaagtggttaattggttcgccaggccagagggtcactcctagaagcccctgggacacgatcgatttctactcagaaagcctgagcctggaccagctgtcacttgtcagtgtcactggggagtcacgtgggctggagaagaaagtgccctgagctccatcctcagccacatgggctcaaactcccagtacagagactcccagcccagcctgccctcaaatagaaatgcttgttaacaggtcctgcactgctcagaaaagagtcataaaatactgtaacctagccagacaagttattttataaaggtcagtaaatgcccaaacatgctaaacagtgaaatgacagcaattcgaatcaaatgttatttattatatgataaaa

SEQ ID NO: 13929 - DNA, 598 bp, Homo sapiens
gaattttacatccctgtccttgcaataacagcggttcatactcaatcaacattttggagtgcattactgcattaattgcattgttttaccctaagttaaaaatacctatatttttatagtgagctatataaatgattgaatttaaaaatgtgttcatttataatcagacttgtggattttaactgctatcttcatatatgtgtatatacaaaaaaacacaaataagttataggtggaattgcaaagtctaaggaagttttgtagttgatgtgttataaatctataaatatataatctataatatttatatattatagttatatataaatatatttataattatatattaagatatttgtatagtaaatacatatttacagattctatgtatatatggtatctatttataatatatatccctatgtaatccgtaaatatataatctataaattatgtaatatatcaaatatacttttgagtaatagctaagatcaacayatgtcccattatgatccaagtcctgcccatctcttcaaactccctcacactacttttcactttattgctaactttggtaaatatggccagctttcttttg

SEQ ID NO: 13930 - DNA, 598 bp, Homo sapiens
gaattttacatccctgtccttgcaataacagcggttcatactcaatcaacattttggagtgcattactgcattaattgcattgttttaccctaagttaaaaatacctatatttttatagtgagctatataaatgattgaatttaaaaatgtgttcatttataatcagacttgtggattttaactgctatcttcatatatgtgtatatacaaaaaaacacaaataagttataggtggaattgcaaagtctaaggaagttttgtagttgatgtgttataaatctataaatatataatctataatatttatatattatagttatatataaatatatttataattatatattaagatatttgtatagtaaatacatatttacagattctatgtatatatggtatctatttataatatatatccctatgtaatccgtaaatatataatctataaattatgtaatatatcaaatatacttttgagtaatagctaagatcaacacatgtcccattatgatccaagtcctgcccatctcttcaaactccctcacactacytttcactttattgctaactttggtaaatatggccagctttcttttg

SEQ ID NO: 13931 - DNA, 702 bp, Homo sapiens
atgctgggtgtgcatgaatgaatcttaaaaacatgctaagtgatagacaccaggtagaaaagctacatattttatagtatcatttatatgaaatgtccagaaaaaagacagtaggtcagtggttgcctgggcctagaggaaatatactaagaaaaaaatgtatatgtaaataatgctaagtgtatgacagaacaaagcaattagaaattagcaattgtagcaattagcaattctgggctctataccaaatgccacctggtgtttaaggagatctttcctctgtggctggttgtaactcatgcctccaagccccgtgcaagctctgggaattgtccagcttacacatgcttccwcagtactagttgtttcctggtgatttttctggctgcttggagtctcacctcctgcatgtgaagtttactcagccaaagacaaagactgaagggcccctgagcagattcctggagttctccctctgcattgcttccttctccctggccagcagactctagctgcctcagcttctcaggtctctcatccctggcaactcagttctggccaccaggctctggcctggttcccccttcctggcccatggtctggaaagtatctataggcagaaaacctgggcagtcgaagggctcacttcccttgttctcctctcagggatcctcattttactctgcctgttgtccattgtct

SEQ ID NO: 13932 - DNA, 2180 bp, Homo sapiens
  misc_feature (1)...(2180): n = A,T,C or G
gcagattccatgcacataaatatgtatcatcagtatttcaaaatgactgcaaaactatgtgaagttctatattgtcgcctctgggaatatttacaatttaaaaagcaactggcttaattatacgcaaaatgccataactattaaaaatacattattaccttaaatacttaaacttttgtttttgcaaatctttaaaaagaacacaaaaacaaaaaaaaaaggcagatttcttaaaatctcaagataaaagtgtgctctaagtattggattgccagataaaatacagaacattagctaaattggaatttaaaataaacaatgaagtttttacctataagtatgtataacggagatacccatagtaaaacattattcactgtgtatctaaatttcaaatttaactggttgtcctatatttttatttgctaagtatggcaactctaatgtaagatgaaaacccatttaaatgtgttaattttatactggattctgctattaaaaataaatgactaaaagtagattaaactagaatgtattgaaactagtaagtttcacttggtaagaattggttttcttaaaataatttagggatgttatacctgatgcatgttaaattttcccatagtagtatgtctgaaatacatttaactattctttaataacatgtctgatacatattaaactattctttaataataaatatgagtgaaataatgatttattaaaataacctttattttaaatmtaatctttccacctgtaaagcaaaaactttattatatttcagaattcaattaaatcatttgtatattcattaaacattcatttattatacttctattgcattctcccagatacttttctgggagttactagagaaacgtccaaatgccatgaaaaagtgagatcaaggtgggagaaagagaaacaaacaaaacctaatctatgaaatatcagtgttatcacaaaagacaaaacaaagcaatgataaaattattactatccaatgaaggcaaaaaagatgatgtcactgaagagagatggcacttacaactggactgtagaaaataaatatttccatgtgggagaaagtgcattcaaggaagatgacattgcttgactaatacttggaggcagcaaatagccataggtccaagttaactgactgggatatgtaatttgtacatgtgttcgaaatgaatatattctggcaatatagctagggaggccatactatgctttgaatgccaagatcaagtttccactgtctgatttagttaggtgatatatgctaacttataagggagccacaaaatttgcactagtggtagttaccactcaaaagcaaatgaacaggttgggcacataagtgatttatgttannnnnnnnnnnnnnnnnnnnnnnnnnnnnnnnnnnnnnnnnnnnnnnnnnnnnnnnnnnnnnnnnnnnnnnnnnnnnnnnnnnnnnnnnnnnnnnnnnnnggtcactcattatttgttatgcctctctttcagaggtatatttctcagccattttaatttccttgaaatttacaactgatagatatgtctgggtatgtagttttattggaaaattacacaaatatatttattttcataggatgtaaaaaaaatctgttctgaagaatagcatttagtaagtatcgcttcatgagaatatgtgctttttgtatttgaaaactatatattgtaatgaaaagtaagtaaaaatgcagttctactgattttaattaaattcttagaatagaatctacacatttttataagaaaattcttacttaaagtggatattaggtccatataattatggttgttgggaaatagaagaatttttataggatatgaggatagtgatccttcatatttcatgtatctaccacaccttactaactcaggagcaagatagaatctgggtttgcaccattgggttaaattttcctaattggttgggcactggagactgactatatttctctgtgcagcaaacatatagaagagtaattatctcagctatcatatgtccatacaataatctaggcattttcagcagaaaatgagttacttttgagtatcatagaaaaagagtggtggtttaaaacatgttattgatgctatgatgaatagtgtatgtttaaatttgtgtccaatttctttattat

SEQ ID NO: 13933 - DNA, 2180 bp, Homo sapiens
  misc_feature (1)...(2180): n = A,T,C or G
gcagattccatgcacataaatatgtatcatcagtatttcaaaatgactgcaaaactatgtgaagttctatattgtcgcctctgggaatatttacaatttaaaaagcaactggcttaattatacgcaaaatgccataactattaaaaatacattattaccttaaatacttaaacttttgtttttgcaaatctttaaaaagaacacaaaaacaaaaaaaaaaggcagatttcttaaaatctcaagataaaagtgtgctctaagtattggattgccagataaaatacagaacattagctaaattggaatttaaaataaacaatgaagtttttacctataagtatgtataacggagatacccatagtaaaacattattcactgtgtatctaaatttcaaatttaactggttgtcctatatttttatttgctaagtatggcaactctaatgtaagatgaaaacccatttaaatgtgttaattttatactggattctgctattaaaaataaatgactaaaagtagattaaactagaatgtattgaaactagtaagtttcacttggtaagaattggttttcttaaaataatttagggatgttatacctgatgcatgttaaattttcccatagtagtatgtctgaaatacatttaactattctttaataacatgtctgatacatattaaactattctttaataataaatatgagtgaaataatgatttattaaaataacctttattttaaatctaatctttccacctgtaaagcaaaaactttattatatttcagaattcaattaaatcatttgtatattcattaaacattcatttattatacttctattgcattctcccaratacttttctgggagttactagagaaacgtccaaatgccatgaaaaagtgagatcaaggtgggagaaagagaaacaaacaaaacctaatctatgaaatatcagtgttatcacaaaagacaaaacaaagcaatgataaaattattactatccaatgaaggcaaaaaagatgatgtcactgaagagagatggcacttacaactggactgtagaaaataaatatttccatgtgggagaaagtgcattcaaggaagatgacattgcttgactaatacttggaggcagcaaatagccataggtccaagttaactgactgggatatgtaatttgtacatgtgttcgaaatgaatatattctggcaatatagctagggaggccatactatgctttgaatgccaagatcaagtttccactgtctgatttagttaggtgatatatgctaacttataagggagccacaaaatttgcactagtggtagttaccactcaaaagcaaatgaacaggttgggcacataagtgatttatgttannnnnnnnnnnnnnnnnnnnnnnnnnnnnnnnnnnnnnnnnnnnnnnnnnnnnnnnnnnnnnnnnnnnnnnnnnnnnnnnnnnnnnnnnnnnnnnnnnnnggtcactcattatttgttatgcctctctttcagaggtatatttctcagccattttaatttccttgaaatttacaactgatagatatgtctgggtatgtagttttattggaaaattacacaaatatatttattttcataggatgtaaaaaaaatctgttctgaagaatagcatttagtaagtatcgcttcatgagaatatgtgctttttgtatttgaaaactatatattgtaatgaaaagtaagtaaaaatgcagttctactgattttaattaaattcttagaatagaatctacacatttttataagaaaattcttacttaaagtggatattaggtccatataattatggttgttgggaaatagaagaatttttataggatatgaggatagtgatccttcatatttcatgtatctaccacaccttactaactcaggagcaagatagaatctgggtttgcaccattgggttaaattttcctaattggttgggcactggagactgactatatttctctgtgcagcaaacatatagaagagtaattatctcagctatcatatgtccatacaataatctaggcattttcagcagaaaatgagttacttttgagtatcatagaaaaagagtggtggtttaaaacatgttattgatgctatgatgaatagtgtatgtttaaatttgtgtccaatttctttattat

SEQ ID NO: 13934 - DNA, 2180 bp, Homo sapiens
  misc_feature (1)...(2180): n = A,T,C or G
gcagattccatgcacataaatatgtatcatcagtatttcaaaatgactgcaaaactatgtgaagttctatattgtcgcctctgggaatatttacaatttaaaaagcaactggcttaattatacgcaaaatgccataactattaaaaatacattattaccttaaatacttaaacttttgtttttgcaaatctttaaaaagaacacaaaaacaaaaaaaaaaggcagatttcttaaaatctcaagataaaagtgtgctctaagtattggattgccagataaaatacagaacattagctaaattggaatttaaaataaacaatgaagtttttacctataagtatgtataacggagatacccatagtaaaacattattcactgtgtatctaaatttcaaatttaactggttgtcctatatttttatttgctaagtatggcaactctaatgtaagatgaaaacccatttaaatgtgttaattttatactggattctgctattaaaaataaatgactaaaagtagattaaactagaatgtattgaaactagtaagtttcacttggtaagaattggttttcttaaaataatttagggatgttatacctgatgcatgttaaattttcccatagtagtatgtctgaaatacatttaactattctttaataacatgtctgatacatattaaactattctttaataataaatatgagtgaaataatgatttattaaaataacctttattttaaatctaatctttccacctgtaaagcaaaaactttattatatttcagaattcaattaaatcatttgtatattcattaaacattcatttattatacttctattgcattctcccagatacttttctgggagttactagagaaacgtccaaatgccatgaaaaagtgagatcaaggtgggagaaagagaaacaaacaaaacctaatctatgaaatatcagtgttatcacaaaagrcaaaacaaagcaatgataaaattattactatccaatgaaggcaaaaaagatgatgtcactgaagagagatggcacttacaactggactgtagaaaataaatatttccatgtgggagaaagtgcattcaaggaagatgacattgcttgactaatacttggaggcagcaaatagccataggtccaagttaactgactgggatatgtaatttgtacatgtgttcgaaatgaatatattctggcaatatagctagggaggccatactatgctttgaatgccaagatcaagtttccactgtctgatttagttaggtgatatatgctaacttataagggagccacaaaatttgcactagtggtagttaccactcaaaagcaaatgaacaggttgggcacataagtgatttatgttannnnnnnnnnnnnnnnnnnnnnnnnnnnnnnnnnnnnnnnnnnnnnnnnnnnnnnnnnnnnnnnnnnnnnnnnnnnnnnnnnnnnnnnnnnnnnnnnnnnggtcactcattatttgttatgcctctctttcagaggtatatttctcagccattttaatttccttgaaatttacaactgatagatatgtctgggtatgtagttttattggaaaattacacaaatatatttattttcataggatgtaaaaaaaatctgttctgaagaatagcatttagtaagtatcgcttcatgagaatatgtgctttttgtatttgaaaactatatattgtaatgaaaagtaagtaaaaatgcagttctactgattttaattaaattcttagaatagaatctacacatttttataagaaaattcttacttaaagtggatattaggtccatataattatggttgttgggaaatagaagaatttttataggatatgaggatagtgatccttcatatttcatgtatctaccacaccttactaactcaggagcaagatagaatctgggtttgcaccattgggttaaattttcctaattggttgggcactggagactgactatatttctctgtgcagcaaacatatagaagagtaattatctcagctatcatatgtccatacaataatctaggcattttcagcagaaaatgagttacttttgagtatcatagaaaaagagtggtggtttaaaacatgttattgatgctatgatgaatagtgtatgtttaaatttgtgtccaatttctttattat

SEQ ID NO: 13935 - DNA, 524 bp, Homo sapiens
tgctaaaagtttttaatgccctttaaaatgaggctttgacacagaaaagattatttaagtttatttttaaatgaacatttattaatgtagagagttacaggcttggttttcctctattttatatagaagttgctaattttattctctttataaagtttagaaaattttttttgaggcagagtcttgctctgtcacccacgctggcgtgcagtggcctgatctcagctcaccgcaacttccgcctctctggctcaagccttcctccctcctcagccccccaagtagctgggactataggcacaacaccacacccggctaatttttgtattttaatagcaatggggtcttaccatgttggcaagrctggtctcaaactcctggccccaagtgatctgcctgcctcagcctcccaaagtgctgggattacgtgtgtgagccaccatgcccagccaaatttagtaagttttaactttcacctttaagacagcctttgaacaacttaaattttcagaccatatatatat

SEQ ID NO: 13936 - DNA, 545 bp, Homo sapiens
atcaagaaacactatatgcaaaaaaaaaaaaaaaaaaaaaaaaaaaaatgaagacactcaacatcatgaaatccattaaaaattaccaggcctatgaaaaataaataataaactacaataaggaccaagaaatggctggggtaagtaaaggacatttgagtaaaagaccttataacagctattagaaaagagtttaaagacctaaagaaaaacatcaacacaatgaagaaaaaaggaaatacctcatagagaagtggaaaccaaacatrtgtaagagaacttctagaactaaaaaaaaaaaaaagggggggtgtctgacatgaaaaattgactggacaggcataacagcaaattagacaaagaagctattaacaaaaaaatcagttaccctgaagacagggcagcagaaaatttccaaactaaaggaaaaagaaacagattggaagaaaaatggacagggcctcagtaaactgcaagttaatattaagtggttgaacatatgtgggattagagtctgtaggagaaagacacctgagaagaaaaaa

SEQ ID NO: 13937 - DNA, 545 bp, Homo sapiens
atcaagaaacactatatgcaaaaaaaaaaaaaaaaaaaaaaaaaaaaatgaagacactcaacatcatgaaatccattaaaaattaccaggcctatgaaaaataaataataaactacaataaggaccaagaaatggctggggtaagtaaaggacatttgagtaaaagaccttataacagctattagaaaagagtttaaagacctaaagaaaaacatcaacacaatgaagaaaaaaggaaatacctcatagagaagtggaaaccaaacatgtgtaagagaacttctagaactaaaaaaaaaaaaaagggggggtgtctgacatgaaaaattgactggacaggcataacagcaaattagacaaagargctattaacaaaaaaatcagttaccctgaagacagggcagcagaaaatttccaaactaaaggaaaaagaaacagattggaagaaaaatggacagggcctcagtaaactgcaagttaatattaagtggttgaacatatgtgggattagagtctgtaggagaaagacacctgagaagaaaaaa

SEQ ID NO: 13938 - DNA, 560 bp, Homo sapiens
tgaggtgggaggatcacctgggccaatgtgggcaagagtgagaccctgtctcaaaaaaaaaaaaaaaaaaaaaaaaaaaaaaraaggatttaccagaaaattggttgcactgagaggcataaagaacagcattccaggtaggaggaataaaacatgggaggtaggaaaagcaagaatttctatgtcattgcataatgagggagaagaagaggcagatcgaggagggccttataagctaaacacaagccttatgtgtggaatagcaccctatttgatgaaatttcaaaatgaggactaaggaaagcacttgactcctctactgggtatttaaaatgttgttgtaagcaaccccagtgatactcacaagtgaatttaatccttctaggtggagcttattaatattatctaaacttcctctttctttccagctagtgttgcaggccatgaaccctcgtcctagtgttgcagggctgaactacctctaaaatgttggtcaaaaatccctaccatgtaaaactagagttttcagatgggaaacaacagcgtttatatttctcttt

SEQ ID NO: 13939 - DNA, 510 bp, Homo sapiens
atctgaaatagcagacaaggtaaattgaggttgttaccaaaagaattcttgagagcatgtcggagttacagcctaaatagaaggctaactgaattccttttagaggaatttttttcacctctttccatagactatacacaaatttcattgatgaacatgaaaatatccctttgtgccaaataaaagtcattgcaataatgaaagagtaggaaagttgaaagtacagctgacatgtccaaacattattctcataagcattgctctagttgctctagttctcataatattatcaakcctaaatttggctgcacatattcttatgctaacatattaagctaatttccaaacaaaagcaattatttcaatatctattcctatataaaccacatcaaatagcacatatgttctggcaataggtgtcagatgataagatcttttatttaaaaacagaaaatctaacaaaatggacattcatggttcctttgcatccaaaatgtgagtaacttaatg

SEQ ID NO: 13940 - DNA, 529 bp, Homo sapiens
attttatcacaataaacagttataccactgttaaaatattaatcagtattttgagaaaaatgcttatagcttagaaggcaatactcacagtttttggggattcttgttaaattcctgtcacaaactttgagggcctgttataaatgaaaaggcacaagctgggcatggtggctcacgcctgtaatcccagcactttgggaggccaaggcgggtagatcacctgaggtcagcagtttgasaccagactggccaactaaaaatacaaaaattagccgggcgtggtgacgcgcgcccgtaatcccagctacttgggaggctgaggcaggagaattgcttgaaccctggaggcagaggttgcagtgagccaagattacgccactgcactccagcctggttgacagagtgagactctgtctcaaaaaaaaaaaaaaaaagaaagaaaagaaaaggcactgccttcaaggagttcataatctagtcaagatgttaagacatgcacacacatattttgaatggtacttggaaatat

SEQ ID NO: 13941 - DNA, 529 bp, Homo sapiens
attttatcacaataaacagttataccactgttaaaatattaatcagtattttgagaaaaatgcttatagcttagaaggcaatactcacagtttttggggattcttgttaaattcctgtcacaaactttgagggcctgttataaatgaaaaggcacaagctgggcatggtggctcacgcctgtaatcccagcactttgggaggccaaggcgggtagatcacctgaggtcagcagtttgacaccagactggccaactaaaaatacaaaaattagccgggcgtggtgacgcgcgcccgtaatcccagctacttgggaggctgaggcaggagaattgcttgaaccctggaggcagaggttgcagtgagccaagattacgccactgcactccagcctggttgacagagtgagactctgtctcaaaaaaaaaaaaaaaaaraaagaaaagaaaaggcactgccttcaaggagttcataatctagtcaagatgttaagacatgcacacacatattttgaatggtacttggaaatat

SEQ ID NO: 13942 - DNA, 516 bp, Homo sapiens
acggtggagctgaggctggaactggttttggtagtccacattagatttgaaagtttgggtgatgttaaagtgcacaagattgctgagattggaggaggaaagaattgtgctctgaaggatgtcttcagatggaggatgggaaatgaagaggacttggagaaaggagtaggaggaaagccacaaggttgcaaaagtccctagagggagatcaaggaaattttctcttggggctctaaagtrtaagaacttaggtgtatgttttgtaggctgagaggaagaagcaaatatagagagaaaaagagtaaaaattgctagagagtccgggcacggtggcttacgcctgtagtcccagcactttgggaggaagaggcaggcggatcatgaggtcaggagattgagaccatcctggctaacatggtgaaaccccatctctattaaaaatccaaaaaattagccaggcgtggtggcacgcgcctgtagtcccagctactcaggaggctgaggcaggagaatcgc

SEQ ID NO: 13943 - DNA, 1038 bp, Homo sapiens
taaagtattcaagttaattttaactatataacaccataccttttggtcaatttttcaatttttgtcccttttctcccatttttcctcagtctccatatatttgtctcttagcacttccttttattttccataacgtacctctcagtagagtataaaatggagatattttttatttttaaaatatgagttttgtgttgcttgttcctaaccttaaaaaatgattggtatatggtatgtgcctttcttgacagtgaactatttgatagtcatatatttaaaattaagaatttaatagaccttcccactagggaagcatttgtttcctaggcacctttggaaggtgctacattaatgaattwgttttattattttagataaattgtttttccctatttttagaatattaatagagtcaggttggaagatacaaataaacactgattcagaacgccacatgagagtctgaaagccatgtcatagcagtagttaaacagagtattaaatgcagatgaacaagatgtcggaaagcaatggtaatgttagcaaagctagagagaagataatttcttatattttacagcaaatgttgttgtctatgtaaagaaaattataggcatgactgtgaagaaatgaggtttatttaagatgccaaaagtggctgggcgtgatggcttatgcctgtaatcccatcgctttgggaggccaaggcagaaggatttcttggggctagaagttcaagacaaacctgagcaacacagcgagaccctatctctacagaaaatttaggaaattagctgggcatggtggcatgtgcctgtagtcccagctactcgagaggctgaggtgggaggatcacttgagcccgacaggttgacgctgcagtcagccgtgtttgtaccactgcactccagccctgtctcaaaaaaaaataaaaataaaaagatgccagaagttttgtatcagaaaatttcaacagtgcaaaaaagccttatggtaaaaaataaataaaaagaaataaaataaaacttcaagaggtta

SEQ ID NO: 13944 - DNA, 525 bp, Homo sapiens
tgaataaaagccattcagtgaaaagaactggtatccacttcatcaattaaaaagctaacaaccaattcttggaaattttctggagccctatgaaaattcatatcacttagtaacctatgtgagctgaaggttggtgtccaatgactgctaagaagatataaggaatgttgcagaaatataaatagaccagcactgaaatttaattaggcactgcatatgttaataataaattcaattaatttagccttctacctatactagaaagaaaaaaaaaacctgggcaaaataataattcattttaaatgcttcagttggtaacctcctttcctgaagagtgatttatgcagtaatttactgactgtgtcttcataaggttgttccaaaccarcccttctgaaataataataacttctgaatgtgtgttgtaagagatataacaaatgacttcctattaattttcatttaatgagttgcctattcacatggtaatttttaaaaattctcttcttaagataaacaggttat

SEQ ID NO: 13945 - DNA, 2195 bp, Homo sapiens
tgcctaagagacaggtagaggaaagaagcttcctagggaagaaggcagggagcattcagaggggaaggaaaagaagatggaagaaaatgctggatcatgaagccaacagaaagggatgtttcaagaaagagtgagtggccaacagtgttaaatgctactaaaggaataagtccaataagcactgggaagtggccagttcagttcagtgcggcactgtaaggaacggaatatagtgagttggaaaatgcagaaatgagaaaaggagggcagttagtgtagacagacatttcatgaagtttgactgtaaagggtgtagaatgctagtgtgatagctgcaagaggcattagatcgacaaaagctctttctggttttgttttgttttgtttcgtttttcaagatgagagagacaaataattttaaaagctgaaagggaagagccaaaatagcagaaacagaaaggtagaaaggataggagaggaagaagatgctcaaatgagaaaggtaggagaggaaccagagcatagataaggatgtattattgtccttagagccatttaatcattaactcaacaaatgtttattgactatgtatgcatttctgaaaatacagaatgaactgagattyaggtgggaaaaaagtaaatatgtttgtgaaggaaacggtaaaaaacagagaaactggaggtggtaaaaatggaatttgttattaaactgaagtgaattaactttggggaggcattggatttaatcgaattttccagattaatctcctgaattgtgctttatttataagctttccctgaaatcatgtgtatgtttttatcatattctatggctgtcaagtctgaagtcagcttgttacccctaaaagagtgaattaatccgaagtgttttcttcttggccttacaaagagcggttcacttgtcacaaggcaggacttgttaactcagccagatttgtttcttaagcatctgcagagagatgaccaagataattcattttaaatcaccaaatattaccagacaggaacagtttaaaaggcaaaaaaaaaaaaaataatggggaggtcacactccctgcacctgatgtagtccaatgtttcttcattcaattgaatcagagtcttttttgaatttatcggttcatgccgtggaggataagaccaaaatagagtgcccttgtacaaagaaggaaaccacacacagctttttatgcttaagaggaaagactcttgggcagaggaaaataatgtgtgccagcttgtgtgcttctgctgtttaggtctggacctccaaggaatcagactgacaatttcatgaaaggttctgatttaactgctcctttcaaaaacacttcaaagggtgatgatgagggataccaagggataaaaggtttctttcagggctgtgttaatttattttagaccaaagaacaaatatcccaatagagaaggcaggtgattctatctgtctgattgtagtaacaaaccttgtataaagaccaggtcaggaggaggctggaagaaatttttaatcaattgttcaccaacttgcctacaaagtaagtctcttaagtaactaactggaatatgagtgctgatagttaaacccagagaaaagtcaatgtgcgcaaggtctggagagggaaatcaggcagatgagagacatttagtaactttgctcaccaggctgctaatagcatctctgcagatacagaggcagagacaggcagaggcaaaggagaatgaaagagtattttgtcacagtcaaccatctccaatctagttagaaaatgtacttactggctttgaagttagaatttcagagtgtggatttcaacatgccccaggttgggttatctgtgaggctggcagcaagtaactgcctgcaaatttctatgtgtttaaatggaggcaatttctcaaaagtaaattatggagttgaaacctttaaatgagatactataacacaaagtacgttgcaaactaaaatgttacacaaggtagaatttttttagttatagttgtaggacaaacatgcgatggcatattcaaattttaagagtaatatttaaaaagcagtagtaaaaatgtcaccaaaatatttgaatgatgacaagcatgaactcaaactgaaggaaaaccagacttacagaaaacataggcagcaacccagaagctgaggttgcaatgca

SEQ ID NO: 13946 - DNA, 2195 bp, Homo sapiens
tgcctaagagacaggtagaggaaagaagcttcctagggaagaaggcagggagcattcagaggggaaggaaaagaagatggaagaaaatgctggatcatgaagccaacagaaagggatgtttcaagaaagagtgagtggccaacagtgttaaatgctactaaaggaataagtccaataagcactgggaagtggccagttcagttcagtgcggcactgtaaggaacggaatatagtgagttggaaaatgcagaaatgagaaaaggagggcagttagtgtagacagacatttcatgaagtttgactgtaaagggtgtagaatgctagtgtgatagctgcaagaggcattagatcgacaaaagctctttctggttttgttttgttttgtttcgtttttcaagatgagagagacaaataattttaaaagctgaaagggaagagccaaaatagcagaaacagaaaggtagaaaggataggagaggaagaagatgctcaaatgagaaaggtaggagaggaaccagagcatagataaggatgtattattgtccttagagccatttaatcattaactcaacaaatgtttattgactatgtatgcatttctgaaaatacagaatgaactgagattcaggtgggaaaaaagtaaatatgtttgtgaaggaaacggtaaaaaacagagaaactggaggtggtaaaaatggaatttgttattaaactgaagtgaattaactttggggaggcattggatttaatcgaattttccagattaatctcctgaattgtgctttatttataagctttccctgaaatcatgtgtatgtttttatcatattctatggctgtcaagtctgaagtcagcttgttacccctaaaagagtgaattaatccgaagtgttttcttcttggccttacaaagagcggttcacttgtcacaaggcaggacttgttaactcagccagatttgtttcttaagcatctgcagagagatgaccaagataattcattttaaatcaccaaatattaccagacaggaacagtttaaaaggcaaaaaaaaaaaaaataatggggaggtcacactccctgcacctgatgtagtccaatgtttcttcattcaattgaatcagagtcttttttgaatttatcggttcatgccgtggaggataagaccaaaatagagtgcccttgtacaaagaaggaaaccacacacagctttttatgcttaagaggaaagactcttgggcagaggaaaataatgtgtgccagcttgtgtgcttctgctgtttaggtctggacctccaaggaatcagactgacaatttcatgaaaggttctgatttaactgctcctttcaaaaacacttcaaagggtgatgatgagggataccaagggataaaaggtttctttcagggctgtgttaatttattttagaccaaagaacaaatatcccaatagagaaggcaggtgattctatctgtctgattgtagtaacaaaccttgtataaagaccaggtcaggagraggctggaagaaatttttaatcaattgttcaccaacttgcctacaaagtaagtctcttaagtaactaactggaatatgagtgctgatagttaaacccagagaaaagtcaatgtgcgcaaggtctggagagggaaatcaggcagatgagagacatttagtaactttgctcaccaggctgctaatagcatctctgcagatacagaggcagagacaggcagaggcaaaggagaatgaaagagtattttgtcacagtcaaccatctccaatctagttagaaaatgtacttactggctttgaagttagaatttcagagtgtggatttcaacatgccccaggttgggttatctgtgaggctggcagcaagtaactgcctgcaaatttctatgtgtttaaatggaggcaatttctcaaaagtaaattatggagttgaaacctttaaatgagatactataacacaaagtacgttgcaaactaaaatgttacacaaggtagaatttttttagttatagttgtaggacaaacatgcgatggcatattcaaattttaagagtaatatttaaaaagcagtagtaaaaatgtcaccaaaatatttgaatgatgacaagcatgaactcaaactgaaggaaaaccagacttacagaaaacataggcagcaacccagaagctgaggttgcaatgca

SEQ ID NO: 13947 - DNA, 561 bp, Homo sapiens
ggcaccccaaatcaattacaatagtaatatcagagatcaatgatcacagatcacaatagtagatataataatattttaaaagtttgaaataacgtgagaattacaaaaatgtgatgcagagacacagagtgagcacatgctattggaaaaacagtacccatagacttgctgcatgcaagattgccacagaccttcaatttgtaaaaaaaagtagtatctatgacacgcaataaagaaaacacaataaaaggagttatgcctgtggtgtagtcatctatgaacgtttattctggtatcctgatatcttcaccagctttggcaaagacagcatataaaatgtttgttaccttgcttcatagaatgtattagcatcaagggtaaacaaataaygaataaattttctaaggaaaggaatataaacacacaagtaaaaagcaaaccgaaagcaaacactttgagtggctgtagattgagaaatctcatcagcactgagtggtgttaatttgaagccatcaaggaagcatgaatggttttgtaaaaggagagaaacatgaattgaca

SEQ ID NO: 13948 - DNA, 554 bp, Homo sapiens
ctttccaccagccttcagcaaaatgtccttttaattttctttaacccttatcttgcaaagttgaaggctttcggtttagagtttaaaagaacttccatcactaagtgtttaatccttaaatcttaatatatgtgtttaaaattcatccaagcctctatataaagtcatgggaaggaagaaagcatttcatgttcctttgcatattttcctcaattctttcccaaaatgataaccctagggtctaatagcctgctttctgcttctccatctaatttgcatggcatakactttatagtacaaaatgtccattgatgggtaagaaagaaaaaaaaaaacagtgaccgtttcatatcatcaacaggggaatatgggtttggatttagtctaattctgaaccagtgataaggtggattaacactaaaatgcaacaatgctgacattagcagcttctctactccttgaggcaaagcagttgttgattagcagtgtttagaattcagattgtagaagcagagacctacattacagtcctggcttcacaacttcttaattct

SEQ ID NO: 13949 - DNA, 609 bp, Homo sapiens
gaaatagaataatttaagtgaatatactttattattttatcaatgtaaaagtaggccaaagtaaaaaaatatttgagtgatttattttagagtaaccatagatctcagttgrcccggaacaatgccaaattagaacacttgtcctgtgtacagttattaataagtgccccatttcattctgaaaagcacatgcacatggagaacaaactgtatggtggttgtaattttaggaaacataagagactattttgtagtgtctatctgatcattctattttctaaagtttttagaagagcctaattctgatgtttgttctctctgcagaaatgctatttacttgtgaaattttgaattatggaatgtgaagtcacgttcagtaggatttatttctgagaatcttgtgaggccttggttgaggacagttcccgtccagacaggttttgcttctgccaagcatcctagggatggtaccaccataaaactactttatatgttattttctcaggttaaagccttccaaaaccatgcatataatacaaatgctatttgcataagtgcagatttattattatgagttatcagaaaagaattatattttaaatccaggcc

SEQ ID NO: 13950 - DNA, 549 bp, Homo sapiens
tatcattgtactaaggttacttaacacaccacctcattatctaaaggtaatagaggtttttgtcatgttaatacgcagcattgaaccactaatgcagcccttgaaagttaccttaattaaaaaaaaaaaaaagttttaattatctgggaatcattactgactgacagagatttttagattgccctcaaattttccagtgccttttccaggctggacttcctcttctggcattaaggatttggaaataatggtgaatgagagaataaaaatcaacagaatcatttctgcactaggtatattaatggataaacttgaaaagacttagaatagactgcagagttcatattataataataaagtactggttgttcatataagyacccagccttacatttaatgagtctctgggagaaaaataatcagccacttttgagcagaaggtaggagccaggcactgtgctaggtacgtccattaaaattgtctcacttgagccacacagcaactctgggagagaagtggcagcaagatagaatgaatccaaagtgcac

SEQ ID NO: 13951 - DNA, 549 bp, Homo sapiens
tgccaggctggagtgcagtgacacgatctcagctcactgcaacctctgcctcccacattcaagttattctcctgcctcagcctcctgagtaactgagactacaggtgaacgccaccatacccagctaatttttgtattttstattttttttttttgagacggagtcttgctctgtcgcccaggctggagtgcagtggcgcgatctcggctcactgcaagctctgcctcccgggttcatgccattctcctgcctcagcctctggagcagctgggactacaggtgcccgccaccacgcccggctaattttttgtattttaagtagagacggggtttcaccgtgttagccaggatggtctcgatctcctgacctcatgatccgcccgcctcagcctcccaaagtgctgggattacaggagtgagccaccgcgccaggcaaatgtttaggttttataataacatcctaagtttaggcatctacatctctacctgcctggactaaaagcttggcttctattctattgcacgcagaacgctgagacaacaggggg

SEQ ID NO: 13952 - DNA, 518 bp, Homo sapiens
gagagccacgcccatcagcgagaggccgccgtggcctctactcatttgcaggctctgaaaagacagattcagataacaggccagacaggacaaggatggggaggtggagggcaaattccatggaccaccaaccaccccccatccccactgagactccgtgatttaaggaaagaaagccagggagggactgagatttcacataaaatgcgtagcacatggctaagggccaaggttaggcaagccaggagcacacaacggggttcacaggcccagaggtgcccccacacccagaccccatgcagacctcccaggcactgcctctgtgcctcccgcctgacttatttcctgccccccgcccctactgtgttggtwtctcagccgccccctgaaatacacgacctccgccccccactaccgcacatgcctctctacaaacttgggggactgcaaatagcagcggggtaagagctgggctctagggccaacgtcctggctgagacactagttccaccccactc

SEQ ID NO: 13953 - DNA, 497 bp, Homo sapiens
acgaactaaactcagtatgttctagagaagccagtasccatctgttgagtggggagagggaactaaaaacacctttgcccaaataacacttgccaaaacatagtgaaccagactgtttccatgagtcatctttgataacatgactgactctaattcagccatacccaaacaggctacgtgtccatcagacaataaactggtgctggctaaaacattttatccattcacttttctataatgtatctaaacatgcagtatttttaaaaataagacatgtacttagggagtttgttgtggttctcaaagcacattggcattcattagctcctatccataatcaaaacaaaaggaacatcatcagtcccgttttatgaaacaggaaactggttcacaaagggaacaaaagcacaggatacactccagcttgtgcggccaagaaatggtaaagttgggatagaacgtaagtttcttgtctcagcccactccagtgattctat

SEQ ID NO: 13954 - DNA, 497 bp, Homo sapiens
acgaactaaactcagtatgttctagagaagccagtacscatctgttgagtggggagagggaactaaaaacacctttgcccaaataacacttgccaaaacatagtgaaccagactgtttccatgagtcatctttgataacatgactgactctaattcagccatacccaaacaggctacgtgtccatcagacaataaactggtgctggctaaaacattttatccattcacttttctataatgtatctaaacatgcagtatttttaaaaataagacatgtacttagggagtttgttgtggttctcaaagcacattggcattcattagctcctatccataatcaaaacaaaaggaacatcatcagtcccgttttatgaaacaggaaactggttcacaaagggaacaaaagcacaggatacactccagcttgtgcggccaagaaatggtaaagttgggatagaacgtaagtttcttgtctcagcccactccagtgattctat

SEQ ID NO: 13955 - DNA, 497 bp, Homo sapiens
acgaactaaactcagtatgttctagagaagccagtaccyatctgttgagtggggagagggaactaaaaacacctttgcccaaataacacttgccaaaacatagtgaaccagactgtttccatgagtcatctttgataacatgactgactctaattcagccatacccaaacaggctacgtgtccatcagacaataaactggtgctggctaaaacattttatccattcacttttctataatgtatctaaacatgcagtatttttaaaaataagacatgtacttagggagtttgttgtggttctcaaagcacattggcattcattagctcctatccataatcaaaacaaaaggaacatcatcagtcccgttttatgaaacaggaaactggttcacaaagggaacaaaagcacaggatacactccagcttgtgcggccaagaaatggtaaagttgggatagaacgtaagtttcttgtctcagcccactccagtgattctat

SEQ ID NO: 13956 - DNA, 743 bp, Homo sapiens
caattgtaataaactgttttcatttgggatgtgagaacacattgtgataaggtcagtggaagggaaattaaaatttggtgggagggtttttttgtcttctctgacactctgctactacttgagtgccattctaaacagtttttcacagtgtactgtcattacttacatgtccttttcattgtaacctcctagaggggagggacttgtcagtactcatctatttacctcagtgcctagcgtatgtagtaaagaggtcrtaagtgtttgttgaatggaatcttatcatcttatgaatctatctatagcagttctcttacatgagacttggtaccttttttccacgtgtattccaggagtatatttcaagtggccaaaccgcacaaattcctcattagccctgcccattccctcattttccagggacaatgccgccaggtagacatgggcatgcttgaggtgggctaagacttcccaaatgctcctcaggttagcacccaccctctgccctgtgaggctctggagctgggatttgtggcactaggaatttggaataggaaactattctagttcttccccctgttcagtgatgcaggtatgggggttagcagggagggagataaaaggtacaaagtggcgtttctttctatagggttcagccttggggaatctgctaaaatacagaggggatgtgctcccttttgaatcttcacaaggtactagccatgcaacgtgtgttcagcttg

SEQ ID NO: 13957 - DNA, 1285 bp, Homo sapiens
tcttctcaggaaagacaatcctgaaagcgattttgttcggatttcttaaccgctatttgtctgcttctgctgtcttctttttaaggacctcgggggatgcccaggtgagttcacagctccctccacaccctgtggccctggggacctggtaatggacacacactgcctgcgaggccagtgtcctttcctctgctctctttacctcgcttccaacgtctgtcgatgcccatacctgccagccgtcttctccccagacccctcaggtctggaggagaactatcgcatgtcagaactcattctgagggaaagtccctctttgtcagcactttttttttttttttttctgagacggagtctctctctgtcgcccaggctggagggcagtggcgccatctcggctcactgaaagctccgcctcccgggttcacgccattctcctgcctcagcctcccgagtagctgggactacaggcgcccaccaccacgcccggctacttttttgtatgtttagaagagatggggtttcaccgtgtcagccaggatggtctcgatctcctgacctcgtgatccacccgcctcagcctcccaaagtgctgggattacaggcgtgagccaccgcgcccgatggctttgccagcacttttcacacagaccccatgctgatcggtgttgcttatcacttggtgagcactaaccaatgtgccacagcccaggcagctgccttattctgtcccccaggaactctcagcctctgcacagctccagcccaagaagcattcccaccgacccccagttctgccccttttgctggaaaatkagtttgaaagagtttctgcttcagaggcagccccgtggcccatttggcaccccaggcaccctcctgaagctggggagtcgcctgggtgtgcctgccctgcctggattccttgcctgtgatgggtcatggtggtctttcagccttggtctgagcatttctgccaccagaaatttgtgccccccacaaacaatctgcccttgggaatgtccaagctacccctttgcaaaatgctatagcttttcacaaagctatactggctatggcttttggactaataccttgactggtaaaactaaaaatgcgccctgatgtcgctattataaaccacagtcacctcatggaaaatcacatgcctttgacctgcactcaggcaggctccctgacctcctggtgttgtcacacctccatctaccaagtcctcattgttagattattgttaatatcattgtggggtttcttcttcccatct

SEQ ID NO: 13958 - DNA, 527 bp, Homo sapiens
tctccattttcaatcagctgtaactgcaaagtatcctaagkatttactccacatgcctcaaaaagacacattgtcaaaatgtctaagtccaggttggaagtcaggttcttgtgagctgagggtactctagaagtcaaggagcaggtctgggaaggagaatctgggagctcaaggggccctggccagtcctaacagccagggttaggatacgacaaccacactcaggcctgtgaggcagcagaatgctacccaccccattatcctcctgggcacagtggctcttgtctgccacatcccccccacccaccaaaaccccttccctacactgcagggcatggggcctgactgcatcccaggatctgctgtgtttagtgctctaagtgcagctcaggtcagcctacattctgcaggagtggtggctctgtgggcagaggcccctgtcccggggctggcacagtgccacagtgccagaggagaggcagtggtggctggagttggcaggagtgcagttgctccctgccctggac

SEQ ID NO: 13959 - DNA, 527 bp, Homo sapiens
tctccattttcaatcagctgtaactgcaaagtatcctaagtatttactccacatgcctcaaaaagacacattrtcaaaatgtctaagtccaggttggaagtcaggttcttgtgagctgagggtactctagaagtcaaggagcaggtctgggaaggagaatctgggagctcaaggggccctggccagtcctaacagccagggttaggatacgacaaccacactcaggcctgtgaggcagcagaatgctacccaccccattatcctcctgggcacagtggctcttgtctgccacatcccccccacccaccaaaaccccttccctacactgcagggcatggggcctgactgcatcccaggatctgctgtgtttagtgctctaagtgcagctcaggtcagcctacattctgcaggagtggtggctctgtgggcagaggcccctgtcccggggctggcacagtgccacagtgccagaggagaggcagtggtggctggagttggcaggagtgcagttgctccctgccctggac

SEQ ID NO: 13960 - DNA, 530 bp, Homo sapiens
ggggtcatttgtcacactgagagagaaggggctggagcagaaagctgctcaacctgcatgcagatggggttttctgtgaccgtccccacctgccagggacagtgcgagcccacgggcatcactggcaggatggacctcgtggcttccactgccagcacacaggtgagctgtggcaactcccagtgacccctgttcctgtgagacctgcaaactgtaaatgtgggcaggatagattctgctcctgcccctccgcagccrcaaaggcccctccttgccacataagcgcttaatcagcataatgagcgactactgagctgatcgttatcatctccctcctggttagaagtggaaccatgctggggccaaaccaggagccagccaggcagacccaggcaggagaaaacacacagagatgagtaaccaccgcaagctggcactcagtgaggcaggtgtctcttctttgtcccggggcggggcgaaggaagaggtggggtgctttgctcatcctgcagagccaggcccctcagcct

SEQ ID NO: 13961 - DNA, 592 bp, Homo sapiens
ttcaatgtattggcataaagaagttaatagtttcttatctctttaatagtacagcatctgtakttacgtcttcttttgtatttctaatattatttgtgccttctctttttttaatttttaaaattaatttcgccaggtttgtgtatgttatgtttattttttcctttcatacgtatatcaatgtattcatcaatcaaatacttactaaatatatactgttagggtacaaagccagacaaggccaggcgtggtggctcatgcctgtaatctcagcacttttggaggccaaggcaggtagatcacccaaattcatgagttcaagaccagcctgatcaacacagtgaaaccccatctctactaagaatacaaaattatccaggtgtggcggtgcatgcctgtaatcccaactacttgtgaggctgacgcaggagaatcgcttgaaccctggaggtggagggtacagtgagctgagatcgcgccattgcactccaacctgggcaacaagagtaaaactccgtcttggaaaaacaaaacaaaacaaaaccagacaagacatagtttctaccctcaagagattccagtctgatttgag

SEQ ID NO: 13962 - DNA, 592 bp, Homo sapiens
ttcaatgtattggcataaagaagttaatagtttcttatctctttaatagtacagcatctgtagttacgtcttcttttgtatttctaatattatttgtgccttctctttttttaatttttaaaattaatttcgccaggtttgtgtatgttatgtttattttttcctttcatacgtatatcaatgtattcatcaatcaaayacttactaaatatatactgttagggtacaaagccagacaaggccaggcgtggtggctcatgcctgtaatctcagcacttttggaggccaaggcaggtagatcacccaaattcatgagttcaagaccagcctgatcaacacagtgaaaccccatctctactaagaatacaaaattatccaggtgtggcggtgcatgcctgtaatcccaactacttgtgaggctgacgcaggagaatcgcttgaaccctggaggtggagggtacagtgagctgagatcgcgccattgcactccaacctgggcaacaagagtaaaactccgtcttggaaaaacaaaacaaaacaaaaccagacaagacatagtttctaccctcaagagattccagtctgatttgag

SEQ ID NO: 13963 - DNA, 592 bp, Homo sapiens
ttcaatgtattggcataaagaagttaatagtttcttatctctttaatagtacagcatctgtagttacgtcttcttttgtatttctaatattatttgtgccttctctttttttaatttttaaaattaatttcgccaggtttgtgtatgttatgtttattttttcctttcatacgtatatcaatgtattcatcaatcaaatacttactaaatatatactgttagggtacaaagccagacaaggccaggcgtggtggctcatgcctgtaatctcagcacttttggaggccaaggcaggtagatcacccaaattcatgagttcaagaccagcctgatcaacacartgaaaccccatctctactaagaatacaaaattatccaggtgtggcggtgcatgcctgtaatcccaactacttgtgaggctgacgcaggagaatcgcttgaaccctggaggtggagggtacagtgagctgagatcgcgccattgcactccaacctgggcaacaagagtaaaactccgtcttggaaaaacaaaacaaaacaaaaccagacaagacatagtttctaccctcaagagattccagtctgatttgag

SEQ ID NO: 13964 - DNA, 577 bp, Homo sapiens
tggctaaaatactgacaacaggggagttgtataattactttgaattcataaaaaatccaggtattgctagaatgttagtggaaagaaaagtcagacacatagggtttgttgttcattgattgatacttactagatttctttaccttgggcaagttattcaacattgttactccctggtttcttcagttcataatggtactgactttacaggaaatttatataaagtgcctggtataatgtctggcacagtagttagttaayacattctaaggatttgagtaacagatagtagaactttcaactcaatatgagagtctttataaactacactctattttaatattttttaagcacagaagacagcttgttttattactggtaactcaaattgtgaagatgtacatcctttttcattgatcccaattcggtctacctgaaaattctaccttcctacatcagatagagcctttgattctctctaaataatgaggagaagtctgataagcttatataacttgttttccctcacctcttgtaagctaaacatctttcagtttatatatatatatatatatat

SEQ ID NO: 13965 - DNA, 577 bp, Homo sapiens
tggctaaaatactgacaacaggggagttgtataattactttgaattcataaaaaatccaggtattgctagaatgttagtggaaagaaaagtcagacacatagggtttgttgttcattgattgatacttactagatttctttaccttgggcaagttattcaacattgttactccctggtttcttcagttcataatggtactgactttacaggaaatttatataaagtgcctggtataatgtctggcacagtagttagttaacacattctaaggatttgagtaacagatagtagaactttcaactcaatatgagaktctttataaactacactctattttaatattttttaagcacagaagacagcttgttttattactggtaactcaaattgtgaagatgtacatcctttttcattgatcccaattcggtctacctgaaaattctaccttcctacatcagatagagcctttgattctctctaaataatgaggagaagtctgataagcttatataacttgttttccctcacctcttgtaagctaaacatctttcagtttatatatatatatatatatat

SEQ ID NO: 13966 - DNA, 1105 bp, Homo sapiens
ccgccctctgtggcctgcaggctgactggaatgaaaggcatgtcagcatccccgggacagtgtggagccttctctggggcttggtcctgggtggtctgaggattgctttgtctccagacactgggcctcctgtgacttgctcagcagtattaagatacaaacttctgagctgctcattctagagatgtggattttataaaacggcaacaataacaacaatgaaaacccagatgccatggaggatcccagaactggtcaggctgggacgcttggttcctgccagtgtccaccagctctgcccctaccccacacacccrcccagtgatttttttttttttctcccagtccacagcttcttcccggcttttcctgcccacaaaactgtttgaatgaatggacaactgaacactttccttttaaaggtcattcctgcctccgaagtctttgtgttaataggtggtctgctttcacagaaggcctcaggaatgtgaccatgatgtgatgctggttgctattgtagtgaccccagaactatggagaaggcaacccccacctgggtgtggcaggcagcgtgtggtggctccagggccagatttgcctgggtccaggtcctgggtctgctactcactggctgtggactctaggatcattctgcttacctctgtgtgtttctcacccgtaacatgggagccatgatggtctgcacctgtcatgttgttacagcacagataagtcaatccagtacagccaagcacacaggatgagctccctaaattgtttctggccccaacacaccctcccccagttctagtccttctgttttctaaagcataaaattctcttagatcttcatccccacaacctaaggctttgagttgtactaaactgcaaataccaatagggttaacgttctaaacagcaattagccatttacactttagtatgagttaaggccctaaaaaatgatgagttgtcatttactgagagtgtgccatgacccaggcactttgctaagctctttcacaaacaatcttcttttaaaagaaatattatattttatgttccggggtacaggtgcaggacgtgaaggttgttacataggtaa

SEQ ID NO: 13967 - DNA, 562 bp, Homo sapiens
gggtggatcacctgaggtgaggagttcgagaccagcctggccaacatggtgaaaccctgtctctactaaaaatacaaaaaattaaccgggcgtggtggcgggcgcctgtaatcgcagctacccgggagacagaggttgcagtgagccgcggtcgcgccattgcactccagcctgggcaataagagcgaaactctgtctcaaaaacaaatatatatgtatatatatatatatatatatatatatatatatatgtgtgtgtgtgtgtgtgtgtgtgtrtatatatatatatacatatatatttgaacgtgcctagattgtggtaggaaaacaaatactttaaattgcatacagctttcactgactaaggtaagaggatcaggataacattatttgcctaaaccattcatttactcattcaacaaataagtattgagatctgctatgtgctaggtgtcccaggatgtcaactattagttaatatggggcaaaaatagtagttttgagaataaaagtgtaaaaaatgaaacaatttgcttgagatgatgcaaacagtttaatcata

SEQ ID NO: 13968 - DNA, 541 bp, Homo sapiens
gacagacacaaaaggttgtattttgtatgattccatttatatgaaatatgcagaataggcaattcacaaacacagctaattagtggctgccagggsgtggggaagaggagaagaagaagtggctgtataacagttatggggctggggggctccctttaggagtgatgaaaatgctttggatctagatagaggtggtggctgtgaatgtactaaatgccactgaattattattcacttgcatattgttatttctgttatgtaaatttcacctcaggttttaaaaagttctcaaagctgtcctgttctcctctaaggaggctgtggtcttttctaggtgttgtaattttccttcagcaaatggaactgaattgatccagtaaaaaagtaaagggttcctcttttttgtgaaaaggtgaggggaggaatacaggtgacctgtggatccctgtatggagacaggggtgtgggcagcagtgagggaaatgggcacaggccgactaaggttggggtgcagtgtggagaaaagggttgctccttaaaa

SEQ ID NO: 13969 - DNA, 541 bp, Homo sapiens
gacagacacaaaaggttgtattttgtatgattccatttatatgaaatatgcagaataggcaattcacaaacacagctaattagtggctgccagggcstggggaagaggagaagaagaagtggctgtataacagttatggggctggggggctccctttaggagtgatgaaaatgctttggatctagatagaggtggtggctgtgaatgtactaaatgccactgaattattattcacttgcatattgttatttctgttatgtaaatttcacctcaggttttaaaaagttctcaaagctgtcctgttctcctctaaggaggctgtggtcttttctaggtgttgtaattttccttcagcaaatggaactgaattgatccagtaaaaaagtaaagggttcctcttttttgtgaaaaggtgaggggaggaatacaggtgacctgtggatccctgtatggagacaggggtgtgggcagcagtgagggaaatgggcacaggccgactaaggttggggtgcagtgtggagaaaagggttgctccttaaaa

SEQ ID NO: 13970 - DNA, 564 bp, Homo sapiens
aatgatataccagcagacatatggccagcctagaatgaaagggacagaaacaataagaggaagggaggctgaattctaggattctacaggcagaaaatgggtcaacagagctacaaacgtgctaacctttaagaaaaagaagaacaactgagagtgtagggctcaggcccgaagaagccagccatagccccagagggcagaatatcaagccacacagcattattctcaggccttaaaactcaacggaattgtcyctgctaagtttcaaccttgcttaggactggtgatcctttgttccttccaatttctcctttttgcaatgagatcgtatatcttatgcttgtcccactactgtattttaaaagttacaaacctgttttctaggttcacaggtccacagatggagacgaattctgccccagaatagagcatactcaagagtgtcatccatccttaatgcagatgcggatgatcagattagggacttttgattatatttataagggattttggacatagtgttgatgctgtaatgagtttagacttttggggaccttagaatgg

SEQ ID NO: 13971 - DNA, 540 bp, Homo sapiens
ggaatagaaaatataacaaactttaaaggtaacatttctgcttctctctcgggagaaaactgtctttgtggtaccatatgaagccctggctaacggcaggtgtcattagggacaggatggaatgaggaggacgttaacaatttactataaatgatttttcaattgaagaaaaacaggaaatatgccagaaggctgtggatcagaggtcaacacctgctcctccctgtgcgtgtccacagactctgacatctcatctgctgggaaatcagaagtaccaagctgccagccaagccagggagcactagagcctttctgccagtgtctgccaggtcttagcctccctaatgccactcagtggtaycatgctccttgaaacgactcacatacctccttgctttgtggcaaaatgaaggccaagtgcaactttatccgggaagcagatgccttgatgtttctggtacttgtcataagtgacatatgtattacttcatttgcaaatgagcactcacaggagtctttgggaatggaggagaggagtgt

SEQ ID NO: 13972 - DNA, 542 bp, Homo sapiens
tgctttttttatggggcaggcagtcaggaagagaaaaatgtttctttttcctttggawcttagagtatactacgcctaaaaattatccctcatttgtgtgaagagattgtattttcgtttgagcagaaactctgagatgagaagctaaaatcagaaaacctgggaaaagcatgtatacagcttctttgaatcaaattagaaaaaggacccaaaagagactggacaaaacctaatgactttcaagcaggaacacactgttaatgttctttctgtgctacttcacgagacaacccagactttgagaaatgtgctgattttgtaccattatgttctgaggtcattaatttattggccagagtatgaggtcacacccacacccagtaagtagacttaggactgtccttgaagaagacagtggatatcccactgtcaattacctgtgaagagtcagtttcacaaacccttagccttttgtgagagtaaaaaccttttacctatttcttgcctcatagctatttataataaacctacaaaaacaaaca

SEQ ID NO: 13973 - DNA, 526 bp, Homo sapiens
ttgagaagcagctaggagtggcaaaaggaaggtttgtttttccttgcaaatactccaccctggaaacatttacatttacatgaacatttacagagacactcctagaagttcatctacacagaagaatgttattgtttttctgggttataatagtcttattttcttatatttaattgtttttattctctgatttttttcaatgaatatatattaytgaagttattttttaaagattacaaattgttttaaagaattacatcattaaaaaaggaattgcaaatatttggtcaacaagtcactctgctttctgctttcacaaaatcttccgtattgttgttcatgtccatgatgcctgggagggcatgtaggtgtaatccatcctgagaaataaagtcaaattctccagtgtgaatataccatgttactgcgggaaagcagggagatagtgtggaatccagtaggcttattgggaaggctctccttcactgttctcatagtgtttttatagtcacgtggcactgtctgc

SEQ ID NO: 13974 - DNA, 1227 bp, Homo sapiens
atttttagaatttcatacttttcctaatgttctcacttttcttcaagcaaagcaaaggtacatttaagccattattttatagaaaaaaaattgttaaaaaatacatttttcccagcttccacatcaatttcctatagccttgaataaataaatgtttggctaatgttttctcatgtttttgaaaaagacaattatcttgtgtttctaggcactaaaagcctccactaagtaaattgcatctttaaaaatktgccccttttccatgaaaatgtaggaggaaaaaaacctactaaatctctttcaaacaattctgtagaattttctttttcttcttgctttctccattttgtgaactcatgcttgactcccaatacctccatctgtcttgcaaaaatgaaaatctggtacatacattcttctcctaggtatttgtcaaaactcagagagaaggctatactctttcacacgctgtctttcctgcgctccgtattccctcataggcaggatgggagtgctcttggtatttctccacttttctcctccccatctcacaagcagatctctatattcccccttcctagtggcagaagagggaaagaaggctagtttctacaaatacaacatttagtcaaaaagaaaaacagtgtcagtaaagcagactccccttgctgataggggaagtaggcaactaagaaatgctgttggaaacagttgctcaagaacaaaaaacaaattcaagcactcaaataaccaggagacaagttgatgggttgtgagccatgctgaattagaaactaaaacattaggagacagtactaaacaacacgctgttgggcttaacctcaatggtcaacatcagtaaggtcaataccagtttattatcagctctgacaccagaagtccttgtttaaggcaaaagactgaggtttcctgccgggcctgggaattatgtacacatgaaaagcaggtcaggtcacagcagcctgacagctacccagtattgtaggataatatttttagggattaactgaggtttctctccctgtcccctgttttaaaaaacaaaaataatctttaaacaaattagttatgaaaatatataaaaattgtactaaatcttacttcaagggaaaaggccttagcagaccaattcaaagattcagtagggtattttagaggaatagacaatgactctatgggtgtttctcaacctcagcactattgaca

SEQ ID NO: 13975 - DNA, 565 bp, Homo sapiens
gtcagtgtaagttctttctctttctcgatgaatgtttaggttattttacatttttcactgttattatttaatttacttgatatttcaaaattgctatcaaagttggcataccaatttacattcatactagcagtgaataagaggtgatgtttattcamttctattgctaacgtttaacatgtgttttgcaaatttgagggtacaattttaattaattagactttattttgcttttttaacagtaaggttgggcatcttttcttggccatttgaatttcctacacatgaattcaaaacctttgcctacttttcacattggacataattttaagttatatttactaatttatatgaggtatttgtattcgctggctgctaatcttttatagtttatatgtgttaaaataattttattcaactgtggcttttcttttttcttttcctatgaaaccttttcttgtgaacatgtcactcatgttaattggattcaaattaccagtcttttccttgatttatatctcttgctcctgtgttatataccatgacctaaacagtgctttttttt

SEQ ID NO: 13976 - DNA, 565 bp, Homo sapiens
gtcagtgtaagttctttctctttctcgatgaatgtttaggttattttacatttttcactgttattatttaatttacttgatatttcaaaattgctatcaaagttggcataccaatttacattcatactagcagtgaataagaggtgatgtttattcacttctattgctaacrtttaacatgtgttttgcaaatttgagggtacaattttaattaattagactttattttgcttttttaacagtaaggttgggcatcttttcttggccatttgaatttcctacacatgaattcaaaacctttgcctacttttcacattggacataattttaagttatatttactaatttatatgaggtatttgtattcgctggctgctaatcttttatagtttatatgtgttaaaataattttattcaactgtggcttttcttttttcttttcctatgaaaccttttcttgtgaacatgtcactcatgttaattggattcaaattaccagtcttttccttgatttatatctcttgctcctgtgttatataccatgacctaaacagtgctttttttt

SEQ ID NO: 13977 - DNA, 520 bp, Homo sapiens
ataccactataagacattgtccaaaatctgtgttctaaatatttttaatatattaacattgaactatgtttaggaaactctggattaagtaaagtgcaaaatggtttcttttttgtaaaacttttgcattgtgagtttccaagagtgtagtatatgttgtagcattactcacattggtataactagggaaatattaatttgctgtatgtattattctgttttcacgctgctaataaagacatacccaagactgggtaatttttaaaagaaagaggtttaattggctcacagttccacagggctggggaggcctcacaatcatgatggaagagcagggaacatcttacatggccrcaagcaagagagaacttgtgcaggggaatgacgccttataaaaccatcagatccggtgagacttattcactatcaggagaacagcatgggaaagacccacccagacccatgattcagttacctcccatcggatccctcccatgacaggtggggattattacaattc

SEQ ID NO: 13978 - DNA, 471 bp, Homo sapiens
gttttactcatgtaaagacatgtattggctctctgaatcttagtcagttccgaagttctgaacctccagaggtctgtcttcattctttccctgatctgtcacagagtgagaaaaaaaatattaaatgaatcaactgagtgtagtaatggaattattacatttttcttttgaaaaataatctgaggaaggctgggcatggtggctcacacctgtaatcccagcactttgggaggccgaggcgggcagatcatgaggtcaggagatctagaccatcctggctaacacggtgaaaccccgtctctactaaaaatacaaagaattagccgggcaaggtggygggcgcctgtagtttcaggaggctgaggcaggagaatggcatgaacccgggagtcggactttgcagtgagccgagatcgggccactgcactccagtctgggtgatagagcgagactccgtctcaaaaaaaaaaa

SEQ ID NO: 13979 - DNA, 471 bp, Homo sapiens
gttttactcatgtaaagacatgtattggctctctgaatcttagtcagttccgaagttctgaacctccagaggtctgtcttcattctttccctgatctgtcacagagtgagaaaaaaaatattaaatgaatcaactgagtgtagtaatggaattattacatttttcttttgaaaaataatctgaggaaggctgggcatggtggctcacacctgtaatcccagcactttgggaggccgaggcgggcagatcatgaggtcaggagatctagaccatcctggctaacacggtgaaaccccgtctctactaaaaatacaaagaattagccgggcaaggtggcgggcgcctgtagtttcaggaggctgaggcaggagaatggcatgaacccgggagtcggactttgcagtgagccgagatmgggccactgcactccagtctgggtgatagagcgagactccgtctcaaaaaaaaaaa

SEQ ID NO: 13980 - DNA, 471 bp, Homo sapiens
gttttactcatgtaaagacatgtattggctctctgaatcttagtcagttccgaagttctgaacctccagaggtctgtcttcattctttccctgatctgtcacagagtgagaaaaaaaatattaaatgaatcaactgagtgtagtaatggaattattacatttttcttttgaaaaataatctgaggaaggctgggcatggtggctcacacctgtaatcccagcactttgggaggccgaggcgggcagatcatgaggtcaggagatctagaccatcctggctaacacggtgaaaccccgtctctactaaaaatacaaagaattagccgggcaaggtggcgggcgcctgtagtttcaggaggctgaggcaggagaatggcatgaacccgggagtcggactttgcagtgagccgagatcgggccactgcactccagtctgggtgatagagcgagacyccgtctcaaaaaaaaaaa

SEQ ID NO: 13981 - DNA, 614 bp, Homo sapiens
tgagaatgcatacacaaaggtctgcctttatctcaccagttgtgtgaattaygtgtctgagcctgagaactcagtcctactgcgttgtgccctgggtgtgttctgaaagtttagccgctttcctaaagctctgagattggcactgatgcgcaatgacatggagctggtagaagacatcttcacatcctgcgaggatgtggtagtacagaaacagatggcattcatgctaggctggcatggggtgttcctggagctgagtgaagatgtcaaggagtatgagcacctgacagagatcatgtccaatgtacagctcaacagcaacttcttggccttagctcgggagctggacatcatggagcccaaggtgcctgatgacatctacaaaacccacctagagaacaacaggtttgggggcagtggctctcaggtggactctgcccgcatgaacctggcctcctcttttgtgagtggctttgtgaatgcagcttttgtttaagacaagctgctaacgatgatggcaacaaatggctttacaagaacaaggaccacggaatgttgagtgcagctgcatctgttgggatgctgctgctgtgggatgtggatggtggcctcat

SEQ ID NO: 13982 - DNA, 906 bp, Homo sapiens
tattagtaccttccaagtacaaaatccagataaactaaacaaaattttaaaatataaaactataagtaataaaggaaaatttataatcgacttgaattataacagtttgattaatgacagtattttgacattttatawtggatatctagatatttggaaataaagtcacatatataactcaatttctagattatagaaaataatgagttaaatctcctgtgaatataggagttcatgctttcatgattatttcaatctagggttcattcttagaagtgagattgtcaagtcaaagcaaatgcacgatttaggttctgatgcacattgacacactgccttccaaagaggtaaaagttaatatcaccatcagtagggtgtgagcatgagaatgtttattcctctaagtattaagaaacagttttactctgcctatataagaggaaaattaattgttttaatttgtatgtaattggttattagtaagcttgaagatcttttcatatgcttttatttatattcctcttatgtaagttgtgtatctttataccttgaccattttgctattagtatgatctctttttcatgtttgtttttaaagtgtattataaacttttattatattaatgaacttttgcatttattattttaaaataattttcttacttttctgtttgtctgtttaagcattaaatctttcttgttcgtttttattcagatgttttcaactttacatggtcaaactttaaaatctctttatagtctatgatttgaggtacatgagtagaaatataatttatactctaagggtatgaaaatatcaaccatactttatttttctatttatactattttttctatttatactattatcttgtttacagttgagatttaatagaggcagaatgc

SEQ ID NO: 13983 - DNA, 1448 bp, Homo sapiens
aatcgcttgaactcagaaggcggaggttgcagtgagccgagatttcgccattgcactccagcctgggcaacaagagtgaaactccatctcaaaaaaaaaaaaaaaaaaaaaaacaagaatgattccagaatcataaatctagttgcatggtttttatacaccttaaaataagaagtattttttctactttgagacatttaaacattaaatgttcttatgattttaaagtcaaagactttgctctctgctgggttacattaggttcttcattttaagatggtagctaatataattagatattttaaaagaacaaaagtttttgagaataactacttgaaattaacytgtacatctgggcagtctgaaagagaaacatttgtggttctctgtcaattactgctatgctatagttatatcggaggtacccaaagctacatggcatatgtaaaaagataataacaagtctggtatagtattgttagtttccttatcgtctagtctcaaactttaccttaattctagtaatctctcctataaattcatgtcaatggtcataaaggagagtatatatttagtagtctttaactatttctggggagtcttatcaattatagtaagcttgtgcacaaatttagcatgcagttttagaggtccccaaacacatcaagaggccccagctataacccttttaaaaagttacagatagatgagcagtacattaccaagactacatggagaaacagttcaaagttcatatgctactgacaagagtaagactgtaaattcctttaaaaatgccagccggggcaacatggtgaaaccccatctctacaaaaaatacaaaatattagctaggtgtggtggcttgtgcctgtaatcccagctacttgggaggctgagatgggaggattgcttgagcctgggaggcagagattgtagtgagccactgggcgacagagtgaccctatcaaaaaaaaaaaaaaaaaaaactggttggtttttaatttacccagttgaaaagattaaagtaaaattctcatttgtctcctccaaacatttcacctaagagtttcaactgtatcacttccttgaagttggcttatactgcaaacttccagagggtaaacaaaagagctgagtttctgaaaaatgatcagagaaatcaaggaatcctgctcaacattcactgggccacgttcacttttgccaagtaaagtgcataagatttatgacagctactttccttattgcctggagacttttacaatttttggttttgtgtttaagatggtggaagttactggaaatctgactggaagtaaggatgttagtatgcaatatctccaaggcaaagtattatgaattccaaatttataaatgaaaggtcatggaacgatgcaacatatatagctggctctcaaaaatatttattacattaaagttgaagc

SEQ ID NO: 13984 - DNA, 1448 bp, Homo sapiens
aatcgcttgaactcagaaggcggaggttgcagtgagccgagatttcgccattgcactccagcctgggcaacaagagtgaaactccatctcaaaaaaaaaaaaaaaaaaaaaaacaagaatgattccagaatcataaatctagttgcatggtttttatacaccttaaaataagaagtattttttctactttgagacatttaaacattaaatgttcttatgattttaaagtcaaagactttgctctctgctgggttacattaggttcttcattttaagatggtagctaatataattagatattttaaaagaacaaaagtttttgagaataactacttgaaattaacttgtacatctgggcagtctgaaagagaaacatttgtggttctctgtcaattactgctatgctatagttatatcggaggtacccaaagctacatggcatatgtaaaaagataataacaagtctggtatagtattgttagtttccttatcgtctagtctcaaactttaccttaattctagtaatctctcctataaattcatgtcaatggtcataaaggagagtatatatttagtagtctttaactatttctggggagtcttatcaattatagtaagcttgtgcacaaatttagcatgcagttttagaggtccccaaacacatcaagaggccccagctataacccttttaaaaagttacagatagatgagcagtacattaccaagactacatggagaaacagttcaaagttcatatgctactgacaagagtaagactgtaaattcctttaaaaatgccagccggggcaacatggtgaaaccccatctctacaaaaaatacaaaatattagctaggtgtggtggcttgtgcctgtaatcccagctacttgggaggctgagatgggaggattgcttgagcctgggaggcagagattgtagtgagccactgggcgacagagtgaccctatcaaaaaaaaaaaaaaaaaaaactggttggtttttaatttacccagttgaaaagattaaagtaaaattctcatttgtctcctccaaacatttcacctaagagtttcaactgtatcacttccttgaagttggcttatactgcaaacttccagagggtaaacaaaagagctgagtttctgaaaaatgatcagagaaatcaaggaatcctgctcaacattcactgggccacgttcacttttgccaagtaaagtgcataagatttatgacagcyactttccttattgcctggagacttttacaatttttggttttgtgtttaagatggtggaagttactggaaatctgactggaagtaaggatgttagtatgcaatatctccaaggcaaagtattatgaattccaaatttataaatgaaaggtcatggaacgatgcaacatatatagctggctctcaaaaatatttattacattaaagttgaagc

SEQ ID NO: 13985 - DNA, 546 bp, Homo sapiens
tatcttacagaaaattggccacatgggtgatggctgggaagcaataggggtgagtgaggcaatcyagaaattagcagtaacaagaagctgctataacccataaggctggagggataacagaagaaggaactggtgagagtctggaccgtctggggggattagagccactaagaggatgcagaagagaggcagcctctggcaggacacctcaggaagtaagaatggtgaatggggggaacgtggcttcttccctcccctctcctccagccctcccgttttccgcctgtgcctgccattggctggacatacacagaagccagagggaaaggcagtctgggaaatgtggtttcttgcaatgtggcacatagcagagtgaggaagggcagaaaagagaacaagaactgataagcagacactgacacaccgctgcagtacatctgcacaattctgttcataccaagtgagttatatacttaccaaaacagctgtgttttgtccattttctctgctatgatgtagagtaaactagtttggggacatagacat

SEQ ID NO: 13986 - DNA, 547 bp, Homo sapiens
tgttgggttattgtgtggaggaggattctgacatagcaaatatcattaggtgataactttaaaagtcagggataaagactcagaagtcttaaagaaattcatattgaaaacctgaaagaatgagcattaaaatataatttttcaggagggtgagacaagagaattgcttgaacctgggaggtggagattgcagtgagccgagatcgcaccactgcactccagcctggaaacagagcaagactccatctcaaaaaaataataataataaaatagaatttttatatttctctttggtagcagggaaatgtcagtttgaataaagaggaagaaagattgaactagttggtgggatatccgggaatcactgctctggagctaaaatttctagaacattttgggtagctgaagtcctgacaagctctcggagattgcactatgtctcattttttaataacaacatcataatytcatgaaaaaaatagcattaggacctctgaagacctttggaatccgaaattctgaaatttaaactacaacaatttttttg

SEQ ID NO: 13987 - DNA, 553 bp, Homo sapiens
attgattgatcagctactttctaatgaggcagttcgctgagagtgtgtttgcagggagtgagtgtggaaaggcacaagtgtgtagtaggtagcctgagctgggggaggctagtacagcctggtgcagactgagttcattgggactctacaratgtgaagatgtcctaaggaaggatggcagagaactaagagcagttagcgttgcaaaagataaatgtccactttcacaactctctctggaatcactcctgagtctttggatgccacttacaaatgtatttttttaatgctttgcaatagtgtgaaactggctaggtttcaattgtatttgtagtatcaacctaaaaagcccagctaagccagagttacctcctttgcctaagttcacagcgcacttttggtacaaacatacaaagattcatgggaatgttcattgaccttcagagctagaaaacagaggagttttaaaagaagctgtaatccttgttaatataactgagaagtttatttgcaacatttttcttacaattgctgttcctggcactgaattaaa

SEQ ID NO: 13988 - DNA, 562 bp, Homo sapiens
tttgatctgaataaaatggagaaaaacatgtccctttgactttgtagccatcgactgggtttcacttggatttgggacctgagttcatactcttcacattctctgcaaacacacacacatacaacacacacacacacagcacacacacacacacgtaaattatattactctattttatttttattttgttagtttttattttaagcttagtggtacatgtgcaggtttgttaaacaggtaaattgtatgttttagggtttggtgtacagaacatttcatcatccaggtaattatcataatatctgataggtagtttttagatcctcatctttccacgtgcctcccccattgagtaggccctggcatctgttgttcctttctttgtgtcagtgtgtactcaatatttagctctcacttataagtgagaacatacggtatttggttttctgctactgtgtcagtttgcttaggataatgtcctccaggtttatccaygttgctgtgatggacatgatctttctttttatgactgcctagtattccatgatgtgtacgtacctca

SEQ ID NO: 13989 - DNA, 567 bp, Homo sapiens
cagttaatggaaaaaaaatccaagggaggattgagattgaaactttagaaataaaagaaggggctgggcacagtggctcacacctgttatcccagcactttgggaggccaaggcgggcggatcacgaggtcaggagttcgagaccagcctcactaacatggtgaactccgtctctactaaaaatacaaaaaaatagccgggcgtggcggtgtgcacctgtggtcccagctgctcaggagggtgaagcagaagaatcgcttgaacccaggaggcagargttgcagtgagccgagattgtgccactgcactccaacctgggcgacagagcaagactctgtccaaaaataaaaagaaataaaagaaggatgaggtctttggcatgtagcagacagtgaaagaaacaattaagaaaaaaacctaaaaatcatgaaatatgttcaatgctacatagaaaattacaattattactcactgacaaaaaaagtaaataaaagataaatctaaatattgccaaaacaatattttaagtacttttttatgtagtgtaactcttagtaatatttaaag

SEQ ID NO: 13990 - DNA, 369 bp, Homo sapiens
gatttttacagattatatgaatgtatcaaattatcacatttacccccaaaatttgtatatctattatgtatcaatacaaatacattttaaaactatgaaagccgatagtggtagaatagaaggtacatgcggaagttagagataaagcaatgcaaaaattaagagacatgaaccacagaatgaaaagtccagtatttgtctgatagtaattctaaaagcagagaataattataattcatggacagtaaatagataaagatagagaactatttgatgaaagtyatgaattgttaaatcgaagaagtataacaagtcctgagccagataaacaaaaatatagcctctcctaaacaaattacattgaatctg

SEQ ID NO: 13991 - DNA, 514 bp, Homo sapiens
tgatatggtttggctgtgtccccacccaaatctgaccttgaattgtaataatccttacctgtstagggtggggccaggtggagataattgaatcatgggggcagtttcccccataccgttctcgtggtagtgaataagtctcacgagatctgatggttttataaatgggagctgccctgcacaggctctcttgattgccaccatataagacgtaactttgctcctccttgccttctgccatgattgtgaggcctccccagccatgtggaactgtgtcaattaaacctctttcctttataaattgcctagtctctggtatgtctttattagcagagtgaaaagagatcaatacacctttataatgagagatttgagagcagagatctttgcctactcactgatgtagctcatagtctaaaacatagattcgtaataggtacccaatatatttgttgactgagtcaatgaattctcccatttaaactttctctgtcttggctttctaggatgctgt

SEQ ID NO: 13992 - DNA, 510 bp, Homo sapiens
aatcttagataagaggatgctgtgcctccctgggggtcttcagtcacccatrgtcctggcaagagaggagggccaggagagagcttcacccacctgctgtcctgcccatgtgacatccgcaggtgctgccatggccacgactgttgttacactcgagctgaggaggccggctgcagccccaagacagagcgctactcctggcagtgcgtcaatcagagcgtcctgtgcggtgagtccccagcagcaccatgccacccaccccgagtatcccctgggcaccctggcatagccagatgacttccgtgcccctgttgcaataaccactgcttccaagtctctatagaccaccccttgggtatatctaatgtaagtgatatttattttatttattttttgagtcagtctcgctctgtcacccaggctagagtgtgctgatgtgatctcggctcactacaacctctgcctcctgggttcaagcgattctcatgcctcagcctcccaagtggctgg

SEQ ID NO: 13993 - DNA, 510 bp, Homo sapiens
aatcttagataagaggatgctgtgcctccctgggggtcttcagtcacccatagtcctggcaagagaggagggccaggagagagcttcacccacctgctgtcctgcccatgtgacatccgcaggtgctgccatggccacgactgttgttacactcgagctgaggaggccggctgcagccccaagacagagcgctactcctggcagtgcgtcaatcagagcgtcctgtgcggtgagtccccagcagcaccatgccacccaccccgagtatcccctgggcaccctgrcatagccagatgacttccgtgcccctgttgcaataaccactgcttccaagtctctatagaccaccccttgggtatatctaatgtaagtgatatttattttatttattttttgagtcagtctcgctctgtcacccaggctagagtgtgctgatgtgatctcggctcactacaacctctgcctcctgggttcaagcgattctcatgcctcagcctcccaagtggctgg

SEQ ID NO: 13994 - DNA, 510 bp, Homo sapiens
aatcttagataagaggatgctgtgcctccctgggggtcttcagtcacccatagtcctggcaagagaggagggccaggagagagcttcacccacctgctgtcctgcccatgtgacatccgcaggtgctgccatggccacgactgttgttacactcgagctgaggaggccggctgcagccccaagacagagcgctactcctggcagtgcgtcaatcagagcgtcctgtgcggtgagtccccagcagcaccatgccacccaccccgagtatcccctgggcaccctggcatagccagatgacttccgtgcccctgttgcaataaccactgcttccaagtctctatagaccaccccttgggtatatctaatgtaagtgatatttattttatttattttttgagtcagtctcgctctgtcacccaggctagagtgtgctgatgtgatctyggctcactacaacctctgcctcctgggttcaagcgattctcatgcctcagcctcccaagtggctgg

SEQ ID NO: 13995 - DNA, 560 bp, Homo sapiens
tactctgacagttgaataaaaaatccaaagcctggctctctttggtccatccctgaatcagtcattatggcctggggaatggagtaygctaattgacttaagggaatcagggcccagcactggagtgaaggtggggctaatgccacctaatccactggagagtaccaaaagtgtgcttccccaaaggaaattcacaatactgtgggaaaggatgaattgatgctgagtcactatgaatgacaaatgcaaaagataaacataccaggccccactccttgcaggaagcaaaagatcctagagggagaggctgacatggaacaggatgtctgaccaataaaacttcttccaatgaggattcacagacatagtcataccttccaggttaagtaaggctcaattccaggcagctgtctgtctcagctcctcatgcacatccgtcgcttctgtctacccagcatttgtttctcccttattcagttctcattgctgtgtaacaaattgacagaagtgcatcaactaaagcaacacaaatgtattatctcacagctctataggtcaaa

SEQ ID NO: 13996 - DNA, 560 bp, Homo sapiens
tactctgacagttgaataaaaaatccaaagcctggctctctttggtccatccctgaatcagtcattatggcctggggaatggagtatgctaattgacttaagggaatcagggcccagcactggagtgaaggtggggctaatgccacctaatccactggagagtaccaaaagtgtgcttccccaaaggaaattcacaatactgtgggaaaggatgaattgatgctgagtcactatraatgacaaatgcaaaagataaacataccaggccccactccttgcaggaagcaaaagatcctagagggagaggctgacatggaacaggatgtctgaccaataaaacttcttccaatgaggattcacagacatagtcataccttccaggttaagtaaggctcaattccaggcagctgtctgtctcagctcctcatgcacatccgtcgcttctgtctacccagcatttgtttctcccttattcagttctcattgctgtgtaacaaattgacagaagtgcatcaactaaagcaacacaaatgtattatctcacagctctataggtcaaa

SEQ ID NO: 13997 - DNA, 560 bp, Homo sapiens
tactctgacagttgaataaaaaatccaaagcctggctctctttggtccatccctgaatcagtcattatggcctggggaatggagtatgctaattgacttaagggaatcagggcccagcactggagtgaaggtggggctaatgccacctaatccactggagagtaccaaaagtgtgcttccccaaaggaaattcacaatactgtgggaaaggatgaattgatgctgagtcactatgaatgacaaatgcaaaagataaacataccaggccccactccttgcaggaagcaaaagatcctagagggagaggctgacatggaacaggatgtctgaccaataaaacttcttccaatgaggattcacagacatagtcataccttccaggttaagtaaggctcaattccaggcagctgtctgtctcagctcctcatgcacatccgtygcttctgtctacccagcatttgtttctcccttattcagttctcattgctgtgtaacaaattgacagaagtgcatcaactaaagcaacacaaatgtattatctcacagctctataggtcaaa

SEQ ID NO: 13998 - DNA, 504 bp, Homo sapiens
tacatacagttcaggtatctaaagttcagagagattaagtaacttgcccaagtcttatgatggatcctgggtctctttattcctaaattcaagctcttctcatgtactcctttccaagctatctgctaccaatattgcccttagacctgggcaagagcagcccttttcctaggcctcaagcctaagagggcccctccccatgaggtagtctggggaacaaagggctgtgcctatccaaggcccaactctccctgaccaggcccccttaaacattagacaatgttgtgaacactgaggtccctggagctccctgaccagagcctcagttgtggttgccagatttagcaagtaaaaatacaggatgaaatagaaggtgcatagttaaatttgaatttcagataaatagcaaataaaattttattataatgtcccatgcaatgcttaacacayagttaatacttaaaaatttttttgtgatttatctgaaattcaaatgtaactggg

SEQ ID NO: 13999 - DNA, 1307 bp, Homo sapiens
tgtccgctaaaaaacctccacaggaatacgtgacttaggatgtgacaatttcctgtactttctgcatctagcactaactcattgaaaggtttatgtacattatttcagacatttgcaaaatgtttaaaatgagatgtgagcaaataatgatgctgacactctatcaaaaccacagattttttttaaaataagagaagtaaacatactgcattggatgaaagcaaactacatttctgttytaaagaaaatgtagaaaaatttgcttctataaagaagcagtactgttattgtataataccttctgcttttacaggatgcttccccatcataatttccctttttgcttgaaaaaggaaactatgaatgcataaagatggtgaggagagtaatttctcttttgaacctaagggaaaagcacatgcatctaccaaacttccatttagctttgaaggcagaatgatttttcacttggaatccaacagaatttcaaagatgttcggcactggtgcgcctcttggagtggtgcaaaggcaagcataaatctgacagatctgagggctgcacgcatgcatttcacagggcgcagtgtgtaggggctgggcgggtcctctgcctggcctgggggtgagggccatctggtctcttttatccctcagtgctggcttaaaggctgtctttctgataatgttccctccttcctgctctttacaatgctgaaatgagcatcttatttttcacttgttctcgctttccttaattgtctccttgggatcttgtaaactcattttagtgtctggcccatagctgtttaaaggcacacgttttaaccggatagtttatattttcttttcttttttatctgagtttatttttcttcaaaactaccttggatggtctgccagagtcagagatgctccttggaggcttggagactctcaaaggaattagtccaaagtggcccagactccatggattaactttaagccatcctgcatgggctgccctgctgaagccagcgcagtttcacaggctgggacagcagccggacttcctgtttgagtttagaaatctccgcctgatccccctcctccccactcccttcctctcgaggtccctccttctatccaccaataaaacaaagaaacctgagaaattatctcagaaagaagagacttctcaggccttgattgtcacactggcctggagccaagccagagcctgcctcaaaaatggacccaggaggcaagctactggaaggcagtcaaacacccccaaaaagtgaggtcatatggcatcacccccattga

SEQ ID NO: 14000 - DNA, 379 bp, Homo sapiens
ttagaggtcatggaaawaccttgtatcttgattgagtggctgttacatttgtcaaactcatcagattggacacttaaaatctgtgtattttattatatataaattgtatctcaataaagtttgttttaaaacgggttcacaaaagttctagaggaaaatctaagaaattcttagagtaaaaaataaagggaatatatacatatgtgtgcttctaattataaataaattttatagatgaatttttaataaatgattacagtatctgcctttaaggaggataccaggctaagcaggagaatttcttttcattttgctccctttcatactatttatacgttttactctgtgcacttattactttttcaatgacaaaaaagta

SEQ ID NO: 14001 - DNA, 379 bp, Homo sapiens
agggtttgcagttctatgagaatctaatcctgccactgatctgacaggaggtggatcccaggtggtaatgcttgctggccgctcacctccgctatgcgcycagctcctagcaggccaaggaccagtacccagtccaccgcccaggggttggggacccctggtctacctggcatattaaaattacatattccttggctccaacccatacatattgtgtcagatgtggcacagtcttccaaggacagtctaaggaaccaacattgtaacaagttcctcttttgatttttgtgatgaggcaagcatcattttaaaatatctagtgctggttcaggcaagtttctgaaagccacagaaggagcagtgaatgagcaagcaggaa

SEQ ID NO: 14002 - DNA, 534 bp, Homo sapiens
aagaaagacacgcatgtatctacatattactagtataaaagttctatgagcatttgggctttagtccaatctaaatcatcatgactcttacttccattcaaaaarcttctctctcagagtacacagtaaagtgataaaattacctggtactaactgctgacactttctctttctttagctatttcctgatgctaattttagaactgatttgaggatacataaaaatatacataaggttaaaattatgacttacaataaatgatcagatattaaggaatttctttttaatttggaattgagggcctaagtaattgcactgccaatctggtttactgtgccaagagtccagcgttccttacacaagggagggggatgaaaatccaagagaaaagacatgagacactgaatgcaaaggtcctctttacctccgcctcactgataaccaggtatacacattatcatcgtcactaccaccattaccacctctgccacatgcattatttcatttacatcagcctgggaagcagtgttaac

SEQ ID NO: 14003 - DNA, 534 bp, Homo sapiens
aagaaagacacgcatgtatctacatattactagtataaaagttctatgagcatttgggctttagtccaatctaaatcatcatgactcttacttccattcaaaaagcttctctctcagagtacacagtaaagtgataaaattacctggtactaactgctgacactttctctttctttagctatttcctgatgctaattttagaactgatttgaggatacataaaaatatacataaggttaaaattatgacttacaataaatgatcagatattaaggaatttctttttaatttggaattgagggcctaagtaattgcactgccaatctggtttactgtgccaagagtccagcgttccttacacaagggagggggatgaaaatccaagagaaaaracatgagacactgaatgcaaaggtcctctttacctccgcctcactgataaccaggtatacacattatcatcgtcactaccaccattaccacctctgccacatgcattatttcatttacatcagcctgggaagcagtgttaac

SEQ ID NO: 14004 - DNA, 596 bp, Homo sapiens
ctttcccctctgaggcacagattgcaaaataacttctagtcctggggtaggctgaccccttattccagctgcaggtagactctgactcctgtcccgtctcaccactcggcccaggcagaccccccagtgcagtcctgaggcaagtacagcagtggtccaaagtgacaccagagacctgtgccatggccaccycgcatctgtctacaaaggatgccacctttccatgattcctggaaaccttcctttccatatcctttagatgcacatttctcttttaagctcatgatgtgctgagcttgtcccaagtgggttctagacccaactcaatggctctgtgaccttgggcaggtcccctcatgcttcccggtcccagtcacctcccctgtgagaaggggatgaccttcaggctctttgtctttgggacattgttgtggacttcaagggttagccaaagtgaaagctctctgtaaattgcaatgtgcttcaggcatgaagcgtccacacataatgacttgaattaagtgttctttttatttctttttacaaatataaacccaggcgagcataagccaggcagggggtgcaaagccggagta

SEQ ID NO: 14005 - DNA, 599 bp, Homo sapiens
tgccactgcactccagcctggtgacagagtgagactgtctcaaaaataaataagtgaataaataaaaattttaaaaaagttaaaatgatctaagtaaatgctttagtattttgataaatagctgttcttgtggtagtgaataagtctcatgagatctgayggttttattttttatttttttctttatttctgctaaaaataaaaacgggatatatgtgcagaacatgccggtttgctacacaggtatacatgtgccatggtggtctgctgcccccactgacctgtcctctaagttccctcccctcaccccctacccccaacaggccctggtgtgtgatgttcccctccctgtgtccatgtgttcttcatgttcagctcccacttatgagtgagaacatgtggtgtttggttttctgttcctgtgttagtttgctgaggatgatggcttccagcttcatccatgacgctgcaaaagacatgatctcattcctttttatggctgcacagtactccatgctgtatatgtaccacattttcttcatccagtctatcattgattggcatttgggttggttccatgtctttgctgcaataaatat

SEQ ID NO: 14006 - DNA, 599 bp, Homo sapiens
tgccactgcactccagcctggtgacagagtgagactgtctcaaaaataaataagtgaataaataaaaattttaaaaaagttaaaatgatctaagtaaatgctttagtattttgataaatagctgttcttgtggtagtgaataagtctcatgagatctgacggttttattttttatttttttctttatttctgctaaaaataaaaacgggatatatgtgcagaacatgccggtttgctacacaggtatacatgtgccatggtggtctgctgcccccactgacctgtcctctaagttccctcccctcaccccctacccccaacaggccctggtgtgtgatgttcccctccctgtktccatgtgttcttcatgttcagctcccacttatgagtgagaacatgtggtgtttggttttctgttcctgtgttagtttgctgaggatgatggcttccagcttcatccatgacgctgcaaaagacatgatctcattcctttttatggctgcacagtactccatgctgtatatgtaccacattttcttcatccagtctatcattgattggcatttgggttggttccatgtctttgctgcaataaatat

SEQ ID NO: 14007 - DNA, 599 bp, Homo sapiens
tgccactgcactccagcctggtgacagagtgagactgtctcaaaaataaataagtgaataaataaaaattttaaaaaagttaaaatgatctaagtaaatgctttagtattttgataaatagctgttcttgtggtagtgaataagtctcatgagatctgacggttttattttttatttttttctttatttctgctaaaaataaaaacgggatatatgtgcagaacatgccggtttgctacacaggtatacatgtgccatggtggtctgctgcccccactgacctgtcctctaagttccctcccctcaccccctacccccaacaggccctggtgtgtgatgttcccctccctgtgtcmatgtgttcttcatgttcagctcccacttatgagtgagaacatgtggtgtttggttttctgttcctgtgttagtttgctgaggatgatggcttccagcttcatccatgacgctgcaaaagacatgatctcattcctttttatggctgcacagtactccatgctgtatatgtaccacattttcttcatccagtctatcattgattggcatttgggttggttccatgtctttgctgcaataaatat

SEQ ID NO: 14008 - DNA, 1716 bp, Homo sapiens
tcggtcattgaatcctgtcagctagtatattgggtaattttatttaattaatttatttattttacaaaatttccatttttattttagattcagggagtgcatgtgctggtttgttgcaagggtatgctgcatgatgctgaggtttgggcttctattgatcccatcacccagagagtgaacatactgtattgggtaagtttagatgaggctgctttccagctaagagctcaagccaggtcactaagaaccttgcaaatcacttaaaataatttggacctaattgtcacagcaatgaaaagacattgaagcrctttaagtggggagatattttcatatttacactttagaacagtgactctagcttcagtgtgagggaataaattagaaagtaacaagatgggagacatagagactgatgggtgaggtttgcaggaattcagtaagagaggatgataaggaaggtcaggatttatgctaatggagagagatatttatgagacagaatccataggatgactcctatgttcctgtttttgaaaacggagtggagagaaaatggtgctatttactaaactagataaaattggggtggttcaaattcagaagaaagaaaaagacttcattatggacttgtggaatttgacaggtttgtgagatgtgctagtgcaggtggtttagacactcactggatagatctaaagatgtgggagtcgccagcacatagctgagtgcagtgtgatgcatggacgtagatggaagtgcacagggagaatatgtagggtggggacaagcatcttgggcagaagccattgaaatacaaacagccaagaggccggtagacttctctttagaagcctgaaatggagactgagatagattaaccatagaagcctgaaatctaggaaagaatgacgccacaaagcccaaggtagagattgttgtgaagggaacatggtcaccagtattaaaatgccacaaaaaaagcactgaaaaaaagtaattgttgaccttgctgaggagcatttcaatggagtagctgtgggagaaagctcattacagtaagttgaggagaggatgggggtgaggggatagacagtgaacataggtagttcaggaaaaaaaaaagtggctctcatgaaaaggagaaagattgacagaaggtatgtgacattagaaaaggtttatgtttttaagataaagaagatttgactgtgatgaaatgccaataagaaaaataggctgagggcggtgcctcatgtctgtaatcccagcattttgggaagcagaggcgggtggatgacccaaggtcaggatttcgagaccagcctgaccaacatggcaaaaccccgtctctactaaaaatacaaaaattagccaggtgtggtggcaggcgcctgtagtcccagctactctggagggtgagacaggaaaactgctcgagcccacgaggcagaggtttcaatgagctgtgatcacgccatggcactccagcctgggcgacagagagagattccgtctcaaaaaagaaaaaaaaagaaaaataaccagagtgggagaggttgataatacaagagagaatagatctaataaatagagatttatccaagaaaactggaggaaatgagatccagagctcgggggcaacatccacactgggctcttcgaggtaaaggagatttaaaaaaatattattctacaaaaaggaaaaaagagata

SEQ ID NO: 14009 - DNA, 950 bp, Homo sapiens
ctgcacatattaaatttaaggggcagatctctcctatattgtaccagaaatagaaatgattatggaaaagaaaatgcatttttccatatgaaacatttagggtacaataaaaatgaatttgggctatgagaaacttcactttttaaaaaataatttctccctcataagaagattgatgcatatcagtaaatattctctcactgtgtatcaggaaagcacggttggccccagggattactaaaagcatcagttaatgcttgtgtttctttaagatacagctttgtgagtcagaggtgctgtgccaggtgttacagaggttcccatggcaactttatctttattttccctcctgaatagcactgttaaatggtgactttgaagcaacatccatttgagatcctcagtgtaaaggttctgtttcattttaagctgygtttacatacctccaaacagagaggagaactgaataatttctcaaggaatggggaaaatgtagaccttccagctcatttagatgatccaccttttcctattagtattacctgagtgatcccatacttacttgaactctaaacttggcttttccttggtagaaatgctgaaggcatttcatatcttcacccttatgaaggagaaatttctagaaatgatttgtagaaaaaccaggttagtgtcattgggcaaatacaaggtagaaagcattgcaatatttgggcagtcaagagagcatatctagaaaactggaatgagagtagattttctaagggaatgtggtcatattttatatttcacaagccatagaaagaggctggagtgggctaaacatggtactgatctcagagttttggatggtgccaaatcatccattctttgtggcaatcctatcagagaaaaatttggcaatgaactttgcttggacaaagacccttcacaaaaatctttttgtagga

SEQ ID NO: 14010 - DNA, 668 bp, Homo sapiens
tctgacattgccaagagaatatacctagtttgctggtcccaagaggggtatgagaaaaatgtggagctcagccaccacaggcaagttcaacttaagtttacagatcctccagccaaacactgcaggtgagtgatgagaacatgagcacagtcaagatccacagagacacctagcccacccacagatgtatgaaatataaatgccctgtatgctactgaatttctatgatttttactgttattgtagaaatagtagattgacacagcttcctaataggtctcccaacttctcccttagcctcctaaaatcttgtctaagcatacgagccagaatttttgttgtttttgcttttaaattattttttctaattttgtgttactttaatttcccatagcatatggcaatctttacagcaaaaatacaaatttaaggatgcatttattttaatattgtayccatatgtcacccatatttttgaacagctctgacaacaagcacaaacctaagcaataggtataacagaagccagataactggttttgttccccaactcctatcatttaagagggagcaatcaaggaacatcttaatcagatgagcatcaaaggatatgtgcatgtttctttacatatattaattagtgttttgtgtttcgcaaaactgaaaac

SEQ ID NO: 14011 - DNA, 586 bp, Homo sapiens
ggtatgccctgcaagactttttgtatatttctgtcattctcaaatagtctctcagctacacagaagcaaagacaatccctgttgcagggtaactcattcaatttgcatttctttccagcctcttcttgcaaaccccaaaggcaatcatctatatctagggctgtctgacagacacaggtaatgctgtgggacactctagcaccttggggaaagagattctgagaagaaaagttagataatgagctctccatctagctctagtcctagaactgcagttcagcctctgsaagagtgtgtcagaaatatggacatggtgtgagaggcaggacagatgtcttgctgttcagagaactcagagcaatctcagcacttggaaaaagaataattagagactgatttttttataattattgattttttctggctgtcagtttagcaacatttaagactacagctttgcctaataaaggtttactctaaagaacagtcacctccattcagtactgaacccttctttacagctttatgtaactgctaatccataagtatgattttttctttttgttttcatcttataaagaattta

SEQ ID NO: 14012 - DNA, 524 bp, Homo sapiens
attttgcccattttctaatcaatgtgttttttgctggtttattacaataacttattattattattattttttgagacagggtcttgctgcattacccaggctggagtgcagtggtgccatctcggctcactgcartctccgccttctgagttcaagccatcctcctgcctcagcctcctgtgtagctgagactagagggcatgccaccatgctcagctaatatttgtattttttgtagagacagggttttgccatgttgtccaggctgatcttgaactcttgagctcaagctgtgtgcccacctcagcctcccaaaatgctgggattataggcgtgagccaccatgtccaacaatttattattattaattgtggctataaaaacaattaaaaatctaccatcttaagcatttttgtgtacagtttagtagtgttaactatactcaccttgttgtgcaaccaaactccagcaattgttcccattctctcaaatttattttttctttcttcaaggtggttaatttt

SEQ ID NO: 14013 - DNA, 524 bp, Homo sapiens
attttgcccattttctaatcaatgtgttttttgctggtttattacaataacttattattattattattttttgagacagggtcttgctgcattacccaggctggagtgcagtggtgccatctcggctcactgcaatctccgccttctgagttcaagccatcctcctgcctcagcctcctgtgtagctgagactagagggcatgccaccatgctcagctaatatttgtattttttgtagagacagggttttgccatgttgtccaggctgatcttgaactcttgagctcaagctgtgtgcccacctcagcctcccaaaatgctgggattataggcrtgagccaccatgtccaacaatttattattattaattgtggctataaaaacaattaaaaatctaccatcttaagcatttttgtgtacagtttagtagtgttaactatactcaccttgttgtgcaaccaaactccagcaattgttcccattctctcaaatttattttttctttcttcaaggtggttaatttt

SEQ ID NO: 14014 - DNA, 516 bp, Homo sapiens
gatcgatggatggatagatagatagatagatagacaagaaggatgaatagataggataaaggatggatggacggatggatggatggatggatggatggatggatggatggatgaacggatggacagatgtatagatagatagatagatagatagatagatagatagatagatagatagatagayagacagatagataagcagacagttagatgacaaattgatgtctcaagagacccctttagggaaagcgaggatattaggtggggtggtgggaatgtcaaggttaaagccctgtcttatctgtagtgtcgcattgagtccaagaagaatctgttctcatcattgcttttggaagtcaacactcattttccatgtataaatgcaaaatagaatggtactcagtctttaaaatgaaaagaatcctgtcgttggtgacaatatggatgattctggaggacattatgctaagtgaaataagccaggcacaagaagacaaatagcaaatgatctcaatt

SEQ ID NO: 14015 - DNA, 516 bp, Homo sapiens
gatcgatggatggatagatagatagatagatagacaagaaggatgaatagataggataaaggatggatggacggatggatggatggatggatggatggatggatggatggatgaacggatggacagatgtatagatagatagatagatagatagatagatagatagatagatagatagatagatagacagatagataagcagacagttagatgacaaattgatgtctcaagagacccctttagggaaagcgaggatattaggtggggtggtgggaatgtcaaggttaaagccctgtcttatctgtagtgtckcattgagtccaagaagaatctgttctcatcattgcttttggaagtcaacactcattttccatgtataaatgcaaaatagaatggtactcagtctttaaaatgaaaagaatcctgtcgttggtgacaatatggatgattctggaggacattatgctaagtgaaataagccaggcacaagaagacaaatagcaaatgatctcaatt

SEQ ID NO: 14016 - DNA, 516 bp, Homo sapiens
gatcgatggatggatagatagatagatagatagacaagaaggatgaatagataggataaaggatggatggacggatggatggatggatggatggatggatggatggatggatgaacggatggacagatgtatagatagatagatagatagatagatagatagatagatagatagatagatagatagacagatagataagcagacagttagatgacaaattgatgtctcaagagacccctttagggaaagcgaggatattaggtggggtggtgggaatgtcaaggttaaagccctgtcttatctgtagtgtcgcattgagtccaagaagaatctgttctcatcattgyttttggaagtcaacactcattttccatgtataaatgcaaaatagaatggtactcagtctttaaaatgaaaagaatcctgtcgttggtgacaatatggatgattctggaggacattatgctaagtgaaataagccaggcacaagaagacaaatagcaaatgatctcaatt

SEQ ID NO: 14017 - DNA, 510 bp, Homo sapiens
cagccctggattcaaggcttttggtgtaaataagaaccacagatgagatcaagctatttagaaatgcatcctgaactagagcaaaagatgagtgtttcttccagcccttcaccctactaattgcttccggtgactgtcattgcctagtaggcaggaaagtagttggttaagagagaagaagaaagaagaaagaagttggtgaagagaccagaaagaaaacaggcaaaggtcaacatagtgagaatataagsaaataaattacaatttactcatgactttctgaagatctgttatagaacaactaggagtatgtgttcacatactctcagagggttgttctttgtagcatcctaaaattaatgtcccataattacctggccaatggtttctttattttctttaagtgttcttgccataaataaataacataattaacttagaaaaaaaaacttgattgcatttattaaaaatcaactctgtatttaatttaaagcaaaattaaatgtcact

SEQ ID NO: 14018 - DNA, 559 bp, Homo sapiens
ttttgagccaagaagttcaaacacctataaactgaatatatacattgtttatggaaatgatgtattataaatagaagaattacattaatgagaactgcctaatgccaaaagcagccaaccatgaattctcaaattctatttcagttgaagtccacagggggattcttacctcacacccagatctctaggaatgctaaaaagcagcagaacatcaactcacagacaccttagagttatctgaaaaaagttagctggatgatccctgctctattctacaaaggccaaaagagtccacaaacatgtgractaagtaagcaaggccactgcctcacgatattttttcaaaagtaaccatcatgcttctgaagtagagtgaatcacattctacccacagatgtattgagctctgactcaaattctaggcagagactatactatcaaagaccccttaatccattttatagtccacagttttccctcttttcatccctttctcacagactacagcctgagattcctttttgtttagatcatataaatggtaggaattactatataa

SEQ ID NO: 14019 - DNA, 572 bp, Homo sapiens
attttcctggaaagatccataagtaaactgtaatcagtgcttacctttgagaatacagcaggaagtagaggcatgaagggaaagggactttttcttctcattttgtacttgtctataagttttttttgttttgttttgtttgtttgttttgagacggagttgcgctctgttgccccggctggagtgyagtggcctgatctgggctcacgacaagctccgcctcccaggttcatgccattctcttgcttcagcctccctagtagctggaactacaggataaggtttcatttttaactgtatgcctacattacttttatgtgtttgcagaaagtaaaatcaacagagatgtggtgatagaatctaatagcaattttgtcattttcatgaacaaatattttatgcaatggaaaatattaaaactctgggaataaagcgtgttaatgcctgttcctggttgcatatctgccagtggggagaatgcatccttgcagggtgaggagtcagccttagaaagcaaggcctttaggaaccagttaccactaagcataccctataacaactctttgaggtgc

SEQ ID NO: 14020 - DNA, 528 bp, Homo sapiens
gttgcagcaaatgagaccaatatttaatgataacatgtccattatgagtattattttaattattatagcaatcttatgaaattggtgttattatcttttccattttataactttccgtataaattttataaggaaaatgaagcttggagtggttaataaatttgcccaacatcatttcacaaagctcttgttaaaaatagagataagtctctattccagaacagtctaactccaaaatccctattttcaaatccatgccacatacatattttcctgtgacatacagaagcctgtttctgtgwcattcattcatttttaacacaaatatgaattcagatgcagtggctcacacctgtaatcccagctacttgggaggctgaagcaggataaacccttgagcccaggagttggaggctgcagtgagctataattgtaccactgcactccagcctgggcaacagagggagaccctgtctcttaaaaaacaaacaaacatttatatatatagattgattgttgacctcataa

SEQ ID NO: 14021 - DNA, 1527 bp, Homo sapiens
gctggtgagtttcgctagtcctatttaaatccttgaggattaggacaatgttttactcacttgtgactgtgaaggcattcccatgatgttttgaactattaacatccattaaaatagatctgttggtataatatgcagcatgatcaatgacggcccttaattgaagtgcacactaaaaagaatgtttaaataaagtataacgggtgcagtggctcacacctgtaatcccagtackttgggaggctgaagtggaaggattgcttgagcccaggagtttgcgaccagtaatgtagtgagactttgcctctattaaaaataaaaaaattagccaggtgtggtggtgcatgcctatggtcccaactgaggcaggaggatcacttgagccctagaggtcaaagctgcagtgagccatgatcacaccactgcatttcagcctgggtggtgtctctaaataaatgaatgaatctgctaacgaagaacttgagtctgagaaaatgccaattaaaaactgcctgatgaccattccaactttacaagacatagacattagggaatgttctgtgtcttaccaagaatcattttaaaatgaatcttcaagaataccacataaaatgagcttttaaaaatgcatcttaaaagctttaatttacacatattttgtgaaatcatactacatattataatatacaaggcactcctccatttaatatgcaattaaagacactcatgtaataattctctacattcagtgagccctagatatgtgccaggtattatgttataggctttatagaaactgtctcatttagtcataaatggtggtatcatcatccatttttatagatgagaaaactgagacttaaataagttaaacgttgctccagtgggtacagtgtttcaaaattgcacgatgaaaaattcctggagatctgtttcacaataatgtgaatatttttaaaattactctactgtacactttaaaatggctaagatggtaaattccatgttatatgttttttattacaatacattttaaaaaattgctaaaggtcacacaaatagtaagtcaggcttacagtggcaagcctgggcttttcaatactggatttactgcctttttcttaagtctgcacacaaccccttagactacagtgagaatttaaaagtcgaggacttatatgtttgaatgttataattagtgaattatcacaacattgttatccaaaaaagttcagaatagtcaatttaaaatgaaatctcgtaatgacttctttggatttaactagtattaatacgttttccatattaagtttttattttcctctttgtatatacatctttatacatcaatagaacaacccatttatatattgctatgaagaattcaggtaaaatcttgtttgtggtattgcataattttttaaagtatctacttttgccaaatgtctgaagcagtaaagcgcattatgaaaatgtttctacgcatgttgataaaggtaaaattctatcccaggaagattttttaat

SEQ ID NO: 14022 - DNA, 1527 bp, Homo sapiens
gctggtgagtttcgctagtcctatttaaatccttgaggattaggacaatgttttactcacttgtgactgtgaaggcattcccatgatgttttgaactattaacatccattaaaatagatctgttggtataatatgcagcatgatcaatgacggcccttaattgaagtgcacactaaaaagaatgtttaaataaagtataacgggtgcagtggctcacacctgtaatcccagtactttgggaggctgaagtggaaggattgcttgagcccaggagtttgcgaccagtaatgtagtgagactttgcctctattaaaaataaaaaaattagccaggtgtggtggtgcatgcctatgstcccaactgaggcaggaggatcacttgagccctagaggtcaaagctgcagtgagccatgatcacaccactgcatttcagcctgggtggtgtctctaaataaatgaatgaatctgctaacgaagaacttgagtctgagaaaatgccaattaaaaactgcctgatgaccattccaactttacaagacatagacattagggaatgttctgtgtcttaccaagaatcattttaaaatgaatcttcaagaataccacataaaatgagcttttaaaaatgcatcttaaaagctttaatttacacatattttgtgaaatcatactacatattataatatacaaggcactcctccatttaatatgcaattaaagacactcatgtaataattctctacattcagtgagccctagatatgtgccaggtattatgttataggctttatagaaactgtctcatttagtcataaatggtggtatcatcatccatttttatagatgagaaaactgagacttaaataagttaaacgttgctccagtgggtacagtgtttcaaaattgcacgatgaaaaattcctggagatctgtttcacaataatgtgaatatttttaaaattactctactgtacactttaaaatggctaagatggtaaattccatgttatatgttttttattacaatacattttaaaaaattgctaaaggtcacacaaatagtaagtcaggcttacagtggcaagcctgggcttttcaatactggatttactgcctttttcttaagtctgcacacaaccccttagactacagtgagaatttaaaagtcgaggacttatatgtttgaatgttataattagtgaattatcacaacattgttatccaaaaaagttcagaatagtcaatttaaaatgaaatctcgtaatgacttctttggatttaactagtattaatacgttttccatattaagtttttattttcctctttgtatatacatctttatacatcaatagaacaacccatttatatattgctatgaagaattcaggtaaaatcttgtttgtggtattgcataattttttaaagtatctacttttgccaaatgtctgaagcagtaaagcgcattatgaaaatgtttctacgcatgttgataaaggtaaaattctatcccaggaagattttttaat

SEQ ID NO: 14023 - DNA, 1527 bp, Homo sapiens
gctggtgagtttcgctagtcctatttaaatccttgaggattaggacaatgttttactcacttgtgactgtgaaggcattcccatgatgttttgaactattaacatccattaaaatagatctgttggtataatatgcagcatgatcaatgacggcccttaattgaagtgcacactaaaaagaatgtttaaataaagtataacgggtgcagtggctcacacctgtaatcccagtactttgggaggctgaagtggaaggattgcttgagcccaggagtttgcgaccagtaatgtagtgagactttgcctctattaaaaataaaaaaattagccaggtgtggtggtgcatgcctatggtcccaactgaggcaggaggatcacttgagccctagaggtcaaagctgcagtgagccatgatcacaccactgcatttcagcctgggtggtgtctctaaataaatgaatgaatctgctaacgaagaacttgagtctgagaaaatgccaattaaaaactgcctgatgaccattccaactttacaagacatagacattagggaatgttctgtgtcttaccaagaatcattttaaaatgaatcttcaagaataccacataaaatgagcttttaaaaatgcatcttaaaagctttaatttacacatattttgtgaaatcatactacatattataatatacaaggcactcctccatttaatatgcaattaaagacactcatgtaataattctctacattcagtgagccctagatatgtgccaggtattatgttataggctttatagaaactgtctcatttagtcataaatggtgstatcatcatccatttttatagatgagaaaactgagacttaaataagttaaacgttgctccagtgggtacagtgtttcaaaattgcacgatgaaaaattcctggagatctgtttcacaataatgtgaatatttttaaaattactctactgtacactttaaaatggctaagatggtaaattccatgttatatgttttttattacaatacattttaaaaaattgctaaaggtcacacaaatagtaagtcaggcttacagtggcaagcctgggcttttcaatactggatttactgcctttttcttaagtctgcacacaaccccttagactacagtgagaatttaaaagtcgaggacttatatgtttgaatgttataattagtgaattatcacaacattgttatccaaaaaagttcagaatagtcaatttaaaatgaaatctcgtaatgacttctttggatttaactagtattaatacgttttccatattaagtttttattttcctctttgtatatacatctttatacatcaatagaacaacccatttatatattgctatgaagaattcaggtaaaatcttgtttgtggtattgcataattttttaaagtatctacttttgccaaatgtctgaagcagtaaagcgcattatgaaaatgtttctacgcatgttgataaaggtaaaattctatcccaggaagattttttaat

SEQ ID NO: 14024 - DNA, 1527 bp, Homo sapiens
gctggtgagtttcgctagtcctatttaaatccttgaggattaggacaatgttttactcacttgtgactgtgaaggcattcccatgatgttttgaactattaacatccattaaaatagatctgttggtataatatgcagcatgatcaatgacggcccttaattgaagtgcacactaaaaagaatgtttaaataaagtataacgggtgcagtggctcacacctgtaatcccagtactttgggaggctgaagtggaaggattgcttgagcccaggagtttgcgaccagtaatgtagtgagactttgcctctattaaaaataaaaaaattagccaggtgtggtggtgcatgcctatggtcccaactgaggcaggaggatcacttgagccctagaggtcaaagctgcagtgagccatgatcacaccactgcatttcagcctgggtggtgtctctaaataaatgaatgaatctgctaacgaagaacttgagtctgagaaaatgccaattaaaaactgcctgatgaccattccaactttacaagacatagacattagggaatgttctgtgtcttaccaagaatcattttaaaatgaatcttcaagaataccacataaaatgagcttttaaaaatgcatcttaaaagctttaatttacacatattttgtgaaatcatactacatattataatatacaaggcactcctccatttaatatgcaattaaagacactcatgtaataattctctacattcagtgagccctagatatgtgccaggtattatgttataggctttatagaaactgtctcatttagtcataaatggtggtatcatcatccatttttatagatgagaaaactgagacttaaataagttaaacgttgctccagtgggtacagtgtttcaaaattgcacgatgaaaaattcctggagatctgtttcacaataatgtgaatatttttaaaattactctactgtacactttaaaatggctaagatggtaaattccatgttatatgttttttattacaatacattttaaaaaattgctaaaggtcacacaaatagtaagtcaggcttacagtggcaagcctgggcttttcaatactggatttactgcctttttcttaagtctgcacacaacccyttagactacagtgagaatttaaaagtcgaggacttatatgtttgaatgttataattagtgaattatcacaacattgttatccaaaaaagttcagaatagtcaatttaaaatgaaatctcgtaatgacttctttggatttaactagtattaatacgttttccatattaagtttttattttcctctttgtatatacatctttatacatcaatagaacaacccatttatatattgctatgaagaattcaggtaaaatcttgtttgtggtattgcataattttttaaagtatctacttttgccaaatgtctgaagcagtaaagcgcattatgaaaatgtttctacgcatgttgataaaggtaaaattctatcccaggaagattttttaat

SEQ ID NO: 14025 - DNA, 1121 bp, Homo sapiens
ccaggatggtctccatctcctgacctcgtgatccaccgcctcggcctcccaaaatgctgggattataggcgtgagccaacgtgcccggcctctatttcatacattagttggcacccactgtgttataggcacygtgctatcaggaaacagagataataaaccaggtctggacctgaggattgtgcaagaaagacagacagatgtaagaaaacatatttctacatagagatgcacaagaacacatctgtgtatgcaactgaagggaaagacaattgcttcagagcctggcagaggtcaaagaaggctctctgggggcagtaatgactgaactggcttttcaaggataatgaagagtttctcagcaggctaggaaggaaggatattccaggcagagggaataacatgtgcacaagcatagcagcctcatggtctgttcaggaaaagcagctggatacataggggtctattgaggagatcatgcatgtccaaagagctctgaaattttttcctggttttacaagagttagctgttttctttgaatgtcactagcattttataaatgacaaaaaataagccaaaggttaacaagcaccaaccaagccatacctgactagttgttacccatggaacatgaaaggatggcctgattcaaggactatcattcactgcaaatcctatgtggctactgttctggtctgggtccctcctttctgaggctgtggctgagaatagaatgagctgcctgtattgctttaccagcaccaggatttttgagaagttggggaggttctgggatcatgggattcatagcagatctaacttcccacatgtcccaccgtccacctatgctctggtgggaacctctgaggatggtgagaatcgagctggggcaacttgttaatcccacattagaaaatgtgcactgctttcaccaagtgtatgttatttcacatgtattacactagttgttgcttcgttctcctacttatagccctgaaaacagtacagagtgcaggttacacaccaagacagttgacatggagtattcattcttgctgtccaagtgacagagcccgtcattaggaatgacgatgcctgctagtttgctgtccattccaaa

SEQ ID NO: 14026 - DNA, 1121 bp, Homo sapiens
ccaggatggtctccatctcctgacctcgtgatccaccgcctcggcctcccaaaatgctgggattataggcgtgagccaacgtgcccggcctctatttcatacattagttggcacccactgtgttataggcaccgtgctatcaggaaacagagataataaaccaggtctggacctgaggattgtgcaagaaagacagacagatgtaagaaaacatatttctacatagagatgcacaagaacacatctgygtatgcaactgaagggaaagacaattgcttcagagcctggcagaggtcaaagaaggctctctgggggcagtaatgactgaactggcttttcaaggataatgaagagtttctcagcaggctaggaaggaaggatattccaggcagagggaataacatgtgcacaagcatagcagcctcatggtctgttcaggaaaagcagctggatacataggggtctattgaggagatcatgcatgtccaaagagctctgaaattttttcctggttttacaagagttagctgttttctttgaatgtcactagcattttataaatgacaaaaaataagccaaaggttaacaagcaccaaccaagccatacctgactagttgttacccatggaacatgaaaggatggcctgattcaaggactatcattcactgcaaatcctatgtggctactgttctggtctgggtccctcctttctgaggctgtggctgagaatagaatgagctgcctgtattgctttaccagcaccaggatttttgagaagttggggaggttctgggatcatgggattcatagcagatctaacttcccacatgtcccaccgtccacctatgctctggtgggaacctctgaggatggtgagaatcgagctggggcaacttgttaatcccacattagaaaatgtgcactgctttcaccaagtgtatgttatttcacatgtattacactagttgttgcttcgttctcctacttatagccctgaaaacagtacagagtgcaggttacacaccaagacagttgacatggagtattcattcttgctgtccaagtgacagagcccgtcattaggaatgacgatgcctgctagtttgctgtccattccaaa

SEQ ID NO: 14027 - DNA, 1295 bp, Homo sapiens
attaaatgcctatgtaaatgtatacctattttatgcccaggtaaattttcttccttttttttttttttcccagacacatggtctctttatgttgtccaggctggtctcaaactcctggcctcaactgatcttcccacttcagcctcccaaagtgctggaattataggcatgagccattgtgccttacccaacctacttatttggggatgattgtaacataccaaaagttagcaaaaatttcatttagatatttttatatattcaagtgaaagtgctgccatataagttgaccagactattattttttttagagatgggggtcttgttatgatgtccaggctggtctagaactcctgacctcaagtggtcctcccaccttggcctcccaaagatttgggattacagtcatatgccactgtgcctggtctgttgcaacttttgggcagcagaattacaaaattacctgattattttaatgtattatttcatctttgaaactctaccgtgcaaatgctaatactaaatcctagatatgagaaaaacttcacaaaattaaaattgatgagacacattttgaaaccactattggactaaaagctacaagacattagcttcactcatatttttatgagacttgagccaattgatttcaattacaaaagaaaagatcaatattcatgatcatgtatgaaatgttggggaatgtctcatcaaagattatgcctaaaaaaagcagtataaataaacttatatttgtcatataagctctctgaaaatctccccctctccctgcagttcaccatacattggtttattgtttacctcacccataggttttcttgttctgattttcagaacatggtatatattaaattcatgagctttctatataatactatatttaaccctacatatataaagtctacctaagccatagaaatatttctatcttatatgctaggtaaaaaaaaaaaaaaaaacagtctacttttttgacctgtgaattctttaagcatagtagaaggtcctataagctaaggtatggctacttggtcgttggaatttatttgcaaagctgttaccaattttaaatttgggaagaggctgggtgtggtggctcatgcttgtaatcctagcactttgggaggccatggtgggcagatcacaaggtcacgagttcaagaccagcctggccaatatggtgaaaccttgtcattactaaaawtacaaaaattagctgggtgtgatggcaggcacctgtagtcccagctactcagtatgctgaggcaaaagaa

SEQ ID NO: 14028 - DNA, 568 bp, Homo sapiens
agatttctgttgttggagccccccagtctacggtattgtgttacggcagcccaagcgaagacagaagtccagcttgaatccaaggtttctagctccagggatggggcggtgccaaattcttcaactgagaagctggtgcacttctagaattgctcctctcttcccacccctacctcaggaccccagttcccaccaactctccccatggcagctcccatgctgcagcctgatgaagsaggtcgcctgggaaactgctgccacacacagacctgctcagagcacctccccaacctgcagagcagttggccacaccaaatgtgaccaacaggagtctggagccacaagtcctgacctctccagtccccacttcctcagaagctgccactgttcctcctggagcagcaaggatgaaacggccctcttcaagcagaaaggcccagccattaaaaacatcaggatctggtagaacgcatcaagcccaggcagccgtggaaaggctggaggacacacctaaacatgtggaatcccaatgccagacagccagggccaaatccatatcccccaacac

SEQ ID NO: 14029 - DNA, 568 bp, Homo sapiens
agatttctgttgttggagccccccagtctacggtattgtgttacggcagcccaagcgaagacagaagtccagcttgaatccaaggtttctagctccagggatggggcggtgccaaattcttcaactgagaagctggtgcacttctagaattgctcctctcttcccacccctacctcaggaccccagttcccaccaactctccccatggcagctcccatgctgcagcctgatgaagcargtcgcctgggaaactgctgccacacacagacctgctcagagcacctccccaacctgcagagcagttggccacaccaaatgtgaccaacaggagtctggagccacaagtcctgacctctccagtccccacttcctcagaagctgccactgttcctcctggagcagcaaggatgaaacggccctcttcaagcagaaaggcccagccattaaaaacatcaggatctggtagaacgcatcaagcccaggcagccgtggaaaggctggaggacacacctaaacatgtggaatcccaatgccagacagccagggccaaatccatatcccccaacac

SEQ ID NO: 14030 - DNA, 2363 bp, Homo sapiens
ttccagcctctggattctgaggatctgtgaaaggatgggcccaaggctacccaggatgtgaatggactttttggctctttgttgggttatgtttttcctgccaaataaattgttagttcttttcctttaggcttccttctttaattctggtaagattcctgactctcctgatcctcccttggtctctaaatttgctctttatcttgaatttttttctcaaacctatctgtattaggccattcttgttgtgctataaagaaatacttgaaactggtcaacttataagaaaataagtttatttggctcatggttctgcaggctgtagaggaagcatagtgtcagcactgcttctggtgaggcctaaggaaactttcaatcatggtggaagatgaagggggagcaggtgtttcacatggctgtagtgggagcaaaagacagaaggtggtgtggggggagatgccacatgttttaacaactgtatctcatgagaactcactcgctatcatgagaacagcaccaagccatgagagatcctgcccccatgactcaaacacctcccaccaggcctcacctctgacattgggaattgcatttcaacatgagatttggggggatgaatatcccaactatatcattatcttgcttacatcttgacctttgcctctgatatttattttgtctaatgcaaatttgtgaacccctaaaaaattccaccacagattgctcmtgctgactcagatttaagtgggatgagtcaaataccagctccctcattcctatagctggtatttctcctgcagaaactggatgctcaataaatatctgttaattatgcactggtagcatggtcttcaaatgagttactaaatgaaattatcagaaatgatcacagccatatcaaatttgtgcatatggaaatatcagaaagacatatgctgaaatataacagttatctaaggtggcaggaatatgggcaaacacaaagctattattctacagcaaatatttgttacacttagaaattaaaaagtaaaatatattttcttaaaaaaaatgccccagtaatgcatatggtaggtcctactggtaactttcttctgatagaagttaatcacttctctcagcttctgcgtctgcagattgaaaacagagagcacaatatctgtctgacatactctaagatttgaacaggatgatgtatgtatcagtctgttttcatgcagctgataaagacatacctgagactaggcaatttacaaaagaaagaggtttaatggacttacagttccacatggctggggaggcctcacaatcatggcagaaagcaaggaggagcaagtcacatcttacatggatggcagcaggcaaagagagagcttgtgcagggaaactcccatttttaaaaccatcagatcttgtgagattcattcactatcatgagaacagtgcaggaaagatccacccccatatttcaattgcctcccactgggatccccccacaacatgtgggaattgtggcagttacaattcaagatgagatttgggtgggtacacagccaaaccatatcaatgtatctgaagctactttctaaactggagaaaaatatatgagttttaggtgttttagttattggcattgctgtggagatggatgttatattgccatacggatatacaactgccatactttctgatcttctgtcttttttttggacacagtcagttctcattgggcaaacatgtttgatgtgctcatgttcaactcttcaggagagaggcctggaataaaaagctattactaattccgacaagattctgtctttcctggcacatttgtcctgaaacaattccttattgagactttccttgagtggctaaaaactggattttgaatcagtttcctgaggacttcctgtttgtggtcactcagctgtgtcctaattgattactcactgcatttgcatctgatgcccatcactgttcttgttctacaagctggatagatgctcttgccttgattaaagcagagaatagccctagcctcctcctggagatcgctacttttggcctctttttgtctgcaatgtgcaatttttctagaaactgagaagcagagtgcttgagatccattcacatttgccatcttccccacactgtctcttcctcgtagggaaggatatggccttggtagaatagtatgaccttccttttggcagagcagttcatgtggagggatcataagctgagggtcttctagtgtccattatttgtctttcgttattaagggacatctgctaagaccttcagtcctgagcaaggtgagccattccataaagaagatatctacacagagtgcgtatgca

SEQ ID NO: 14031 - DNA, 2363 bp, Homo sapiens
ttccagcctctggattctgaggatctgtgaaaggatgggcccaaggctacccaggatgtgaatggactttttggctctttgttgggttatgtttttcctgccaaataaattgttagttcttttcctttaggcttccttctttaattctggtaagattcctgactctcctgatcctcccttggtctctaaatttgctctttatcttgaatttttttctcaaacctatctgtattaggccattcttgttgtgctataaagaaatacttgaaactggtcaacttataagaaaataagtttatttggctcatggttctgcaggctgtagaggaagcatagtgtcagcactgcttctggtgaggcctaaggaaactttcaatcatggtggaagatgaagggggagcaggtgtttcacatggctgtagtgggagcaaaagacagaaggtggtgtggggggagatgccacatgttttaacaactgtatctcatgagaactcactcgctatcatgagaacagcaccaagccatgagagatcctgcccccatgactcaaacacctcccaccaggcctcacctctgacattgggaattgcatttcaacatgagatttggggggatgaatatcccaactatatcattatcttgcttacatcttgacctttgcctctgatatttattttgtctaatgcaaatttgtgaacccctaaaaaattccaccacagattgctcctgctgactcagatttaagtgggatgagtcaaataccagctccctcattcctatagctggtatttctcctgcagaaactggatgctcaataaatatctgttaattatgcactggtagcatggtcttcaaatgagttactaaatgaaattatcagaaatgatcacagccatatcaaatttgtgcatatggaaatatcagaaagacatatgctgaaatataacagttatctaaggtggcaggaatatgggcaaacacaaagctattattctacagcaaatatttgttacacttagaaattaaaaagkaaaatatattttcttaaaaaaaatgccccagtaatgcatatggtaggtcctactggtaactttcttctgatagaagttaatcacttctctcagcttctgcgtctgcagattgaaaacagagagcacaatatctgtctgacatactctaagatttgaacaggatgatgtatgtatcagtctgttttcatgcagctgataaagacatacctgagactaggcaatttacaaaagaaagaggtttaatggacttacagttccacatggctggggaggcctcacaatcatggcagaaagcaaggaggagcaagtcacatcttacatggatggcagcaggcaaagagagagcttgtgcagggaaactcccatttttaaaaccatcagatcttgtgagattcattcactatcatgagaacagtgcaggaaagatccacccccatatttcaattgcctcccactgggatccccccacaacatgtgggaattgtggcagttacaattcaagatgagatttgggtgggtacacagccaaaccatatcaatgtatctgaagctactttctaaactggagaaaaatatatgagttttaggtgttttagttattggcattgctgtggagatggatgttatattgccatacggatatacaactgccatactttctgatcttctgtcttttttttggacacagtcagttctcattgggcaaacatgtttgatgtgctcatgttcaactcttcaggagagaggcctggaataaaaagctattactaattccgacaagattctgtctttcctggcacatttgtcctgaaacaattccttattgagactttccttgagtggctaaaaactggattttgaatcagtttcctgaggacttcctgtttgtggtcactcagctgtgtcctaattgattactcactgcatttgcatctgatgcccatcactgttcttgttctacaagctggatagatgctcttgccttgattaaagcagagaatagccctagcctcctcctggagatcgctacttttggcctctttttgtctgcaatgtgcaatttttctagaaactgagaagcagagtgcttgagatccattcacatttgccatcttccccacactgtctcttcctcgtagggaaggatatggccttggtagaatagtatgaccttccttttggcagagcagttcatgtggagggatcataagctgagggtcttctagtgtccattatttgtctttcgttattaagggacatctgctaagaccttcagtcctgagcaaggtgagccattccataaagaagatatctacacagagtgcgtatgca

SEQ ID NO: 14032 - DNA, 560 bp, Homo sapiens
aactggtatcaaaagcaggatcctccagatacttttcccaatcttcatccaaatattttyggggatcaacttgtaaggaatatatactttattatgttgtatatttaaaataatttacttaggaaggttgcacatgtctgtgtttctgaaaaagtgtatcttaaatcatgttttaataaagtactaatgttcagtttactcacaggtatgccataaagtatgtaaaaggatgattaaataagaaactattctatgatacagtaatgggaaatactaaaatatcacttcattagataaaataatttcatttgcttttgatgttttggttacttttgtttcagtttttatttggaagaaacattcatagatattttgtttaaaatattttattgtaccacagactttaaaagtttaagtaacatcattccattctggacatctagttatcagaagaaaagcaaaggtttctgggtttatattattaaggcactgtgacagtgggtatagctattactcagatagcaggtacatgacccttttaattcacaggggaaaaaaac

SEQ ID NO: 14033 - DNA, 568 bp, Homo sapiens
ccagaccttccatattattagatcctggctctaaactgatgctaataatcctcgaagtcaccaatgctaacatgctaacatggcccaccagccagaatgggggcttatcaagggcaagtgatggatgagtcttcacttagtctcacagtgagaccagtagggtcatggggacatattatggttctttctccagttccagaatgtacagtggaaacagacatataaaatctggtttgagtatttgcaatatggtctgagtattgcaactaattccatttaattcaacacttgctgagtacttactatttacaatgttctgtgatgagtcttacggcatcagaaatgtaagtttgtagatattgccctctaggtattcacagtttagtaactaaataaaaaatcttaattcttaaagggcacagagagacttaacaagaaagctattaygtcataaatgcagaaatacctgccttcctgaatcatatataaaatctaaaagactggctccatttgaaatgagggcaggagttgaaattcttctaagaaatatcttaataagagaagctga

SEQ ID NO: 14034 - DNA, 628 bp, Homo sapiens
taacacattaattttaattgtagccctctagagaggatgacctagccactgagtgaagatttcaggcaggtgggcctttctgtttccaccgaaattatattatattggcagccacctagtcttaaaattgcctttaggaaggcgtaggagactgaattggaaaatgcagccaggcaatttatgggaaaattgaacggagcgtccctctgagtaaggagacagggcgtggtaatgtcagtcctccttctaaagaccagagaaaatttctgttccacctgataaactctgtatccttttggactttgtaaatattgcacttggaattgactgtcatttaaatattgagaggaaatctgccaaagttatttgattagtcaaatgctttaaagattcattaaaataccaaccctgtgggatgaggggaggtattttattcaawgccttcctcatgtggtatctctgacatggcttatggacatcctcagtagttccaaagggattaaatgtttaagttcctggaacaaatggaaagtgcttactcctcactctttgtcaaactctaaaactacgactgcctcagtgaaaccccaaatatccttatgtctaaatgtcacaatgatgatgcagg

SEQ ID NO: 14035 - DNA, 551 bp, Homo sapiens
aatatttttgtttggtccctaactcatttgaaatgcactcctcatacttgtacgttcattgttcctctcttaaagttcctgaaattctatgctttattttattcctttctggaatctttggattacatagttattaacacaatccttgtcagctctgtgttgcctgctgttgattattttgaaatatgtatgtcacaagcagaacacttatattcttcataaagcagaagatgcatatcttctacttttactcaaatgtcttatccctttattctcttacaatggtaatattttccatccatttatgactgtttgttagaaaaaaattaatattgtctgggttgtacctgctctacctctatttttaggacttacgttatgaaatctcatttatttacttggatggtatagttatactgtgtggttttgagtccattaccatttcaaattcastattcaagccatatatcagtttatataccaaatttgctgtttgccgtctgtaactttgataaatgacctttctgttgttaccaaagagctataaaaat

SEQ ID NO: 14036 - DNA, 551 bp, Homo sapiens
aatatttttgtttggtccctaactcatttgaaatgcactcctcatacttgtacgttcattgttcctctcttaaagttcctgaaattctatgctttattttattcctttctggaatctttggattacatagttattaacacaatccttgtcagctctgtgttgcctgctgttgattattttgaaatatgtatgtcacaagcagaacacttatattcttcataaagcagaagatgcatatcttctacttttactcaaatgtcttatccctttattctcttacaatggtaatattttccatccatttatgactgtttgttagaaaaaaattaatattgtctgggttgtacctgctctacctctatttttaggacttacgttatgaaatctcatttatttacttggatggtatagttatactgtgtggttttgagtccattaccatttcaaattcactattcaagccatatatcagtttatataccaaatttgctgtttgccgtctgtaactttgataaatgacctttctgttrttaccaaagagctataaaaat

SEQ ID NO: 14037 - DNA, 558 bp, Homo sapiens
ttaagtaaaaactatgacaaaacccaccacacagcaactgacatctagtattttaatagttgtcaggtgtcagctaaggtaaaagagttttgtattccagttttaaaaatagctatagtaaaggtatctcttattagttctgaaaaaatatttttcacaaattcacttaatatcttcttctctttatttcaacattaaattaacccagtattgctctttatcaagaaatagcaggtaaccatagctaagaaacataagggtggctcctatgtactgtatgttcaatccaggataatcaggataatcaggttaaatcaggttgaatacccccagattcaaattgagatgactgaaagtaatatatcttcaattagtattgtatctccttaagtattatgagggttctcagtatacaatagaatattttggagtaaatacccaactgactttagcgttaggactatggatacttattrtctcctataacaatcagtctggtagcaaatatttccagaattcacggatttagtagtgtcaatgttgaggctactagtcagc

SEQ ID NO: 14038 - DNA, 552 bp, Homo sapiens
cattaaaatgtgccacctcagataatctgagctcagccgcctgggtttaccagaaagcagagcccgagaggaagctggggtgagggacaggggactgaggtagggcaggggagtttcagaagaaggatgcatatttgatttggcatttgaccaatgctgtaggcaactcgttgacctctcaagagccctgtgccacttgaaatacatattgggaactttcatgaggagaagagatgggaaagcacttatccactttcttttttttgagatggagtcttactctgtcacccaggctggagtgcaatggtgcaatctgggttcactgcaacctccggcttccaggttcaagcgattctcctgtctcagcctccagagtagctgggactacaggtgcgtgccaccacacccagctaatttttgtatttttaktagagacagggtttcaccatattggtcaggctggtcttgaacttctgacctcaggtgatccacctacctcggcctcccaaagtgctgggattacaggtgtgagccatggcacccggccagcac

SEQ ID NO: 14039 - DNA, 552 bp, Homo sapiens
cattaaaatgtgccacctcagataatctgagctcagccgcctgggtttaccagaaagcagagcccgagaggaagctggggtgagggacaggggactgaggtagggcaggggagtttcagaagaaggatgcatatttgatttggcatttgaccaatgctgtaggcaactcgttgacctctcaagagccctgtgccacttgaaatacatattgggaactttcatgaggagaagagatgggaaagcacttatccactttcttttttttgagatggagtcttactctgtcacccaggctggagtgcaatggtgcaatctgggttcactgcaacctccggcttccaggttcaagcgattctcctgtctcagcctccagagtagctgggactacaggtgcgtgccaccacacccagctaatttttgtatttttagtagagacagggtttcaccatattggtcaggctggtcttgaactyctgacctcaggtgatccacctacctcggcctcccaaagtgctgggattacaggtgtgagccatggcacccggccagcac

SEQ ID NO: 14040 - DNA, 541 bp, Homo sapiens
cctgaattcactgtctcattccctcctactactttataagagtttaagtatgcaggtcatcgatccttgacaatttttaaaaacatatttattgagatataattgatatataaaaactctgcgaatctaatgtatagaatttaatgagtttgggtatatctatacccctgtgaaacaatcatcacaatcaaggtaataaacatcaattacctgtaaaatttccctatcccctgctgtgtgttttatttgtttgttgcatgattttttgtgtgtgtggtaagaacacttaacatgagatctaccctcttaacaaaattttaaagtgcacaatacagtattgttaactacaggcactgtattgtacagtagatcttatattcatcttgcataacaaactactccatygaactacaactcctcatttccccttcccaccagtcttcggcaaccatcattccagtctttgtttctatgagcttgagtattacagatactttatgtaagtagaatcatgcaatatttgtccttctgtgattggctt

SEQ ID NO: 14041 - DNA, 751 bp, Homo sapiens
caatccttgaaaacaataggctctttggcccctttggtgggctgaattctcaggatcgcagaaatgaaaaattgtggtgatttggagggcattagattcttgtgtggctgactttatttyaacttcatgtttattctgtgttactgttgagcaaagacaaaattgccttggaagggtacagcggttctgtcatgtgaggctctcttaattgctaataccattcattaattagaagagggagaactagtgttggaggctcactggggacccagcaggtttagggctacctagtttagtatgctaatgacgactgcctctcctaatatgccagtcaaaagtgactccctttaatctgtcctgaactgtgtgacaatctgagcatacagtgacagctgcagaggcagaacgctgtatcccacgcagaggggcttggtgactctggttggagtccgggggtgggggtgcctaggacacaggaaggcaggagcctgtgagaacagaaccaggccagctctcacattctggtcagaaatgacaaggtacacatgtccctttagactctcatgaatagaaaaaccacaatggcctgattttcccttttgtctcagcatcaaatcctgcaagaagacccacccagatttgaaaggaaggtctgcggtgaataactgaagacttgaactccccttatatttcactcaacactctgaaaagtgtgttcctcccaggagggactgcagtttgatccagtgat

SEQ ID NO: 14042 - DNA, 642 bp, Homo sapiens
cccagttcctgctcctattctctgccagtttaaagaactgtgttctccattaaaataaaaaaaataattaaaaaaagctgaagctcatgctcattgtgatggtgcacctgagatacagtctcggtgcaaagaacatacttttccccttgaagctagagtgttcaaatggctacagacagaggcccgggtgaaattagcaaatatcacattgagagctcaagcaatgggcagtgcacagaactgttgctaatagacagaaatcttcaccttcgaaaactggatgagatgttgtctttggttcttgtactaagccatggaattgactgaaagccttgtaaatggaaggctcccaggtgtttaagggagatcactgccatggaaaccagaagcggttatgaagaggaagcaatggtgccactccaagacaactgttaggcttacagaaccatgtcagcggggaaagtttcccaaagggatacctttcattgccatcaaggagaggccaaagaagcmatgggaaggggaaattatacctggaagctcaccgagagctctctaaccaggttaaatcaacagcacagaccgctgacatggcaggaagttcttgccagaatcagccagttgtaaatgacaaatggatcc

SEQ ID NO: 14043 - DNA, 1560 bp, Homo sapiens
gcatgcctatctgaggctttcttcttgttttcccgtggagtatatccacaagatcatacttcgccatttttgtctcttaatgtgcatggccagggagtggcttctccctgggcctgcctttaattaacacgtaatgttaacaggtgtggaccatcagaaaatggcctctccccggctctggctgccaatttatcacatttagagagtcagtgcattaattgccgaaccatcacctgacatatctaatgggaaaagggagagtcatctcctgcccctctcatgcccatctacctgtaacaatatctactggagaacagagaaggaattcgccgactcacggcaaaatgccaaggatgcacccaagttgttcagaaaagatgacatgagaaggtaaaatccagagacagcaggaaagccctaagcggactaaaatctggaaggtttcccagcccctaatcccacacacaggtaattccctctcttgttttatatacttaccgtgatttcttttattaagaaaatagaagtttacggcaaattgccatttttgtgtatttttcacaaattgttgacttaataatagttgttagtttttaaatcataatacatgtttcaaaacaatgttttttcttagtcatagaatgagctctcaaaggtaccatagtcttaagtctatgtgttaaagttaaaattaaatagcactgtgtttgaaacctgaaaactctcaattcaggtagcatctttctcattcccatctgtgcagagaacttcaataaaattaatatattttcagaacttcagtttctcatctaaagagatattatatatatacatatacatatatgtagtctatctaacacatagaactgaaaaatgtgaaaatacatgtgaaagttctttataaatgctaaagtgtatcaaatcaaaatttgtttaatcatctgtaaaaacccagttatagtcatacagaaaaagaytggccaaatgatacagcccaaggaataagggaaggtttccctgatgaagtggactttgaagtaaaatatgaaggataagtctcagagcaaaaaaggtgagaaaaaaattctaggcacatgggaaagtcctgggtaggagatgtgttatgctgatgtcaactgcaactggcttacgagagcctatagttaaattttaaggaattttgcatgccctgttgttaaacgcagccttgtttttttttattttaagacagtgtctcactctgtcacccaggctggagtgcaatggcatgaccttggctcactgcaacctcgacgtcccgggattaagcaattcttgagccacagccacccaagaagctgggatgaaaggcccacaccaccacgcgcagctatttttttgtggaaggacaaaaacaacggagatggggtttcgccatgttgcccaagctggtctcgaattcctgggctcaggcaatcctcctgcctcggccttgcaaagtgctgagattacaggcatgaaccaccatgctcggcctgaaacacagccattgttaaaactaattaaacacatttgtaatgc

SEQ ID NO: 14044 - DNA, 523 bp, Homo sapiens
  misc_feature (1)...(523): n = A,T,C or G
accactaagagctcatactactcatatttttgctatttcaaaaaaatctacctcatgacatggatttacacacaggggagtataagcatgtctaatgacagccaagtgacatttgacagaataaaagtcccttttcatacattgttgctaggtttcagcaggctttaatttgcaggtctgggaaaattacaccaagtctatttgacttaattgaagttagcaacagtcatgtgtaaacaaaaaagaagacaaaaagaccaccatttgcattcctaattctgactcaaggtacatatgtgcttatagcaattntagtgaaactatgggtagattctkgacatgttgactttagccatccgatatggaagaaatggattgtgttgtatcctagctttagaatattatgtggttaagtgcctctcatatctgcagtatatatggtataaatatagaaaaacactggacaaactaaagttatgtatgtgtcaattgaatatttcataagagcacttcttgtagaaaa

SEQ ID NO: 14045 - DNA, 523 bp, Homo sapiens
  misc_feature (1)...(523): n = A,T,C or G
accactaagagctcatactactcatatttttgctatttcaaaaaaatctacctcatgacatggatttacacacaggggagtataagcatgtctaatgacagccaagtgacatttgacagaataaaagtcccttttcatacattgttgctaggtttcagcaggctttaatttgcaggtctgggaaaattacaccaagtctatttgacttaattgaagttagcaacagtcatgtgtaaacaaaaaagaagacaaaaagaccaccatttgcattcctaattctgactcaaggtacatatgtgcttatagcaattntagtgaaactatgggtagattctgsacatgttgactttagccatccgatatggaagaaatggattgtgttgtatcctagctttagaatattatgtggttaagtgcctctcatatctgcagtatatatggtataaatatagaaaaacactggacaaactaaagttatgtatgtgtcaattgaatatttcataagagcacttcttgtagaaaa

SEQ ID NO: 14046 - DNA, 540 bp, Homo sapiens
cgtggtggcaggcgcctgtagtcccagctacttgggaggctgaggcaggagaatggcgtgaacccgggaggtggagcttgcagtgagccgagattgcgccactgcactccagcctgggcgacagagtgagactccgtctcaaaaaaaaaaaaaaaaaaaagacttggaacaagacaatgatgcccactctmaccattcctattcaacatagtactagaagtcctagccatagcaaccaggcaagagaaagaaataaaatgcatcgaaataggaaaggaaaaaaatcagtagcatttctatacattagtaatattcaagctgttacaaatatgtaataagtcattcagttaatagggttacctacctaaaaaaaaaagaatgtgttataagccatgtataaagtaaccttttaaatgtgtaactgagtttataaaatagtatgggaaattctcaggggattaaaatgaagaagaatctggaactgggaaaccagttgggtttccaaattgggaaggcaatcccatttacagtagccacaaa

SEQ ID NO: 14047 - DNA, 490 bp, Homo sapiens
tggcctgcttgacctaaccctacagcattttcccaggaaactactayaggaaaacatgctttttatgtattacttaataatgttctgcacaccacacccctcatctttagttttaatacaatcagactctcacatagcatatccagttaaaacaaaacaatgctccagaaaactcttgttattcctcagcatcataggcagaaacatcaagaggccccaagcagtgttgctgttgggtcactggaaaataccttcaagccccaggcaggcaataaaataatgaataacagggcaagaaataataaggcctttctacatgaatcaaactcagtgtggcccttcttatactgtaacccggaattttttattaataccactggtgtgctggttaaattttgatttagatcaaaatcaaatggtgaactaaactagtttagttgttatctgatagagccagtgctttgtagctgtgccaatgatttgaaaacgt

SEQ ID NO: 14048 - DNA, 485 bp, Homo sapiens
ttcctgcaggattctaagttggatggcagcagctctccagctctgaggcaacgaaactgaaagctagtggagagttgcctgaattttgccttctcaggtctttccataagttctgtgaacactcaatttcctgtatcaaattccttcttcttgaaaatgcttagagtgatacctgttttttctactggagtctgactgattcaagctccaaagtctgccctcctaactgcctctcgcgttgttctaaacctttctggtgctcctggcctgctcctttgcaacccacacacactcacacatccagcrtaccctaagaagatgacactgcctcttagtgctcacaaaaggagtgcaagttatatgaacctcaactatcctttctatccaactggaactgtatctgtctgtttttcccccttctgctccgtcttagaagaaaagttcatcaatacttttgggaaaaaggtaaacttttaaacacgatg

SEQ ID NO: 14049 - DNA, 598 bp, Homo sapiens
ggccactgtgtaagtattattaaccgcgactcacagmtgagaaaacttgaagttcaggaaagtgaatgtgctcaaggtcacagctagtcaatggctcaaccgggattcacatctcaggctgtcaaaccgaaatacgggccctttcccgccttccacgccccaaggggaggccatgccgggaccatgtcgaaaggtggtgttccgctagattctaccctaaagcggcattgtcctcaaagacaggtcttttctgagccagtctaggaaatgtcctagctccagggcagtgttagaagagacttcccttacagcctgcttttttttttttttttttgagacggagtctcgctctgtcgcccaggctggagtgcagtggcgccatctcggctcactgcaacctccacctcccgggttcaagcaattctcctccctcagcctcccgagtagatgggactacaggcgcccgccaccacgcccggctcattttttgtattttttagtagagacggggtttcaccctgttagccaggatggtctccatctcctgaccttgtgatccgcctgcctcggcctcccagagtgctggctgggattacaa

SEQ ID NO: 14050 - DNA, 613 bp, Homo sapiens
ctgaatcaaagtaacagaaargatgcaaaattagaatcaggagtagagactttctctctctctctctctctcctcttctgcacatacagcagaaagtctatgtgagcacacagcaaggtagctagctgcacaccaggaggagaaccctcacagaacccaaccatggtaccctgatctcagacttccagcctccagaatagtgagaaagtacatttatgttgtttcagccacccagtgtattttgttatacagccaaacctgacaaatatgggtttgtctctatattttcttctgtagattttaactaccatttttaaaagcaaaagtgtattagtagaagctagatagtatttaccatgtagaagagatattatgcagaaaaacttcatacaaacatatttgaaagtcttaatgctgttatataaaacaaattaaatttctacacaaatacaagaaaccaaaagaaatgtaattccacatcaactgttatccaaatatctagaacagcattgtccaaaagaactttctacaattatagacatattctgtatctatgctttcaatagggtagtcacaaactatgtgtggtggctgagttcttgcaatgtggtta

SEQ ID NO: 14051 - DNA, 533 bp, Homo sapiens
cacgctagactaaagggtgggagccataaaataagaggctgcctgctgrgtggcagcatggctgaaacagaaccatgaccacttagcattatgtgttctttatagcccaacagtattaatagacacttttatcagttaatccccatcataattccatgaagtaagttaacattttttaaacgtgctttccatttattttcacaaatatttattaagcataggctagatgttaggtacagtcccagtacctggggtaatacaatgaaacaacacctggtaatggagagtgctcttttttcttccaggtacaatgggtgaaggggaggatccttgtctggcgaagggcaacactttcatgaagtttctagatacgcccacccttctactctctcaggaatgttattctataaattatccacttgtcctcctgtagttttaatctattttctgcttgatctttcctatcaatattcaacattcaaaaatgccaagaacagtatctgtcctgtagaaagtggtcaataatgatttgt

SEQ ID NO: 14052 - DNA, 533 bp, Homo sapiens
cacgctagactaaagggtgggagccataaaataagaggctgcctgctgggtgrcagcatggctgaaacagaaccatgaccacttagcattatgtgttctttatagcccaacagtattaatagacacttttatcagttaatccccatcataattccatgaagtaagttaacattttttaaacgtgctttccatttattttcacaaatatttattaagcataggctagatgttaggtacagtcccagtacctggggtaatacaatgaaacaacacctggtaatggagagtgctcttttttcttccaggtacaatgggtgaaggggaggatccttgtctggcgaagggcaacactttcatgaagtttctagatacgcccacccttctactctctcaggaatgttattctataaattatccacttgtcctcctgtagttttaatctattttctgcttgatctttcctatcaatattcaacattcaaaaatgccaagaacagtatctgtcctgtagaaagtggtcaataatgatttgt

SEQ ID NO: 14053 - DNA, 510 bp, Homo sapiens
ttatttatttatttatttatttatttatttatttgagacagaggctggcgtgcaatggcaygatctcagctcaccacaaccgccacctcctgggttctagcaattctcctgcctcagcctccggagtagctgggattacaggcatgcatcactgtgcctggctaattttgtatttttagtagagacagggtttctccatgttggtcaggctggtctcaaactcctgacctcaggtaatccgccctccttggcctcccaaagtgctgggattataggcgtaagccaccacacccagcccaattcaataggttttaaaagataaataacatttatcaatccaaatctgtgcacttaacatactaataaacattttcagtaccatgttaaattaggttaccaaaatggttcacattctactacacatcagatcaaggaaagcagggtggaggaatgataactattggactttgtactgaagtatatatatgttcatccctcttttgtgaaaag

SEQ ID NO: 14054 - DNA, 553 bp, Homo sapiens
acatattactgtgccttttcagggtgtgttgtttacttctttaactatcatttgtcaaaattttcattttgaaggatttaatggataatatttaatacacggtatattaaaaatgctattstgctaaaataccttttttctataaattacacaaagacatgaccatttctacctataaacatggatttacaaaaacaaaacaagctaataatctgatatacccaaatttaaggaaataatttccaacttttaattatattgaaactgatcctttttctgttgaaaggaaattcaaggcagctattatgtgtatgaataaatgatcaatacaataatcatagttatgagatctgtaagtaaattgttagagtctgtttatccaataccttagttactgtgtaagtcttttcccaaagcgaggctaccaattcacaggggctttatctttgtctaagcccatctctcaagtgaattaaaggcttgcgagagaaggcaaatgaccttttatgggtttggaatatactgcgaggttaagactgagaaatgccactcc

SEQ ID NO: 14055 - DNA, 586 bp, Homo sapiens
cattgtttccttgctttgccgtgyattttgtccaattctttcttcaaaatgccaagaacctggacaactttcagtcaagacctcttccagtaacatcagtaaacgaaaacatgacagttaagaaggcctatttactgcaattgtcttaaagacaattttagaaaattatgtggtgcttcaaacattttctgtttacatgtattaatctaattttgttctggcagcgtatccctatctgtacaggtctgcagcaacctcaattctcctcagaagaaagaattcgactgaggggcatatggtggaaggagagacagagtcaagttttagagcaggagtgaaagtttattaaaaagctttagagcaggaatgaaaggaagaagagtacactcggaagagggccaagcaggcaacttgagagatcaagtgcaccgtttgacttcttgatttggggttttatatgtcggcatacttccggggtcttgcgttacttatcccctgagtcttcccttggggtgggcagcctgcatgctgcccgcacgtgacacgcttgggaggggccacacccagtatgtttactggagttgta

SEQ ID NO: 14056 - DNA, 586 bp, Homo sapiens
cattgtttccttgctttgccgtgcattttgtccaattctttcttcaaaatgccaagaacctggacaactttcagtcaagacctcttccagtaacatcagtaaacgaaaacatgacagttaagaaggcctatttactgcrattgtcttaaagacaattttagaaaattatgtggtgcttcaaacattttctgtttacatgtattaatctaattttgttctggcagcgtatccctatctgtacaggtctgcagcaacctcaattctcctcagaagaaagaattcgactgaggggcatatggtggaaggagagacagagtcaagttttagagcaggagtgaaagtttattaaaaagctttagagcaggaatgaaaggaagaagagtacactcggaagagggccaagcaggcaacttgagagatcaagtgcaccgtttgacttcttgatttggggttttatatgtcggcatacttccggggtcttgcgttacttatcccctgagtcttcccttggggtgggcagcctgcatgctgcccgcacgtgacacgcttgggaggggccacacccagtatgtttactggagttgta

SEQ ID NO: 14057 - DNA, 774 bp, Homo sapiens
gttttctttcttagataatgaaaaggctgaatgttttaatacagtttattgaataatatatttgccagcattttagaagcattatagagtatggcacactagatggtttctaacagaactgtttatttcatttaacaaacagttgttaatcatatgccagaccctttgcttaagtactagggacacagactaaatgtggtcttggttcttaaaaatcttatgagtggccaagtatggtagctcaagcctgtaatcctatcgctttgggaagccaaggcaggaggatcacttgaagccaggagtttgaaaccagccatggcaatttagtgaaaccctgtctctacaaaaaatttaaaaaatggttggacatggtggtgtgcgcctataggcccaactgcttgggaggatgattgcagcccgggagttcaagaatgcagttagctgtgattatgccactgcactccaacctcggtgacmgagcaagaccctgtctctaaaacaaaaaaaaacaaaaactttatgttaggggagataaaaaaagaaaacaaatgaaagagatttttgccaagctactactaaacttcttaaaaatagcatcttttttgttcttgatgaatgatgattatcattgattctacgtgaataaaaggtagcctatttgatatgagtatagtatattagcaaattctactcccattatgaaatggaaattattgagatctaatacaatgataaagtatttcataaaacaatgactattctatttctaatctc

SEQ ID NO: 14058 - DNA, 561 bp, Homo sapiens
tggtccttggatcatgagagtacatcctgactgaataacagatctggtcctagacagtttagtgttttgtactcaaatttattttcagtcatgtcttcatggtagacattgttttttccattttacaaatgaaaaccctaagacttaaagagataagtaacttatgcaagatcacatagcaaattagtagagctgggattcaaattagttttatttggctctaaattctatgccattttcagtgttctactgccttgataaacttaaaaccgatctgctttctatccagaactgagttcacaataatttatcactcatttggaagaacagatcattgtgctrattttggaatttcccccaagataagctacgtttctatgaatacttactaaacttttttcttccttattctatattaggacgtcttgcatggctggtatacttagttgggacagttgtaggaggaagattaacatataccagtacagatgagcatgatgctatggatggagaattatcctgtcggtaagtaagagctatgtaatttactgaaattcacta

SEQ ID NO: 14059 - DNA, 744 bp, Homo sapiens
tgcatttggaaaataatgattcaataatgtatgaatccaataaaattatacttttatttcaaactacaaatatacatccacagtatgcttccttagtttttccttgttaacagatgaattttgtcaaaggctgattttggcaagctctctgtcaagtggaaggttgtttgagcattatctaaaacaatttcttcaaaggaaacaaaaaatgagatttaagtatttgatacttcatatgcgatttatagcaaatatggcaggtcacatactgaaaaagagtaaaaaaagagaccattgctatttaaaaagacagaacgctccaatattttctgttctaatattttaacttttttcattaaaatttcccctgtctcaattatatgactgtaaccagtaggggctgctcttagcattacaggcaaagtaatttctctggagttgatagtttcaggactggctctcaatataactgaaacaaatttagcttggtgaacattttatggcaaaactattgcccttttctttgtccagttagatattatttttaatyccttgcctttatgctttgtttttaagcatccaatatataaaacctatataaatcagtgaaaataatactacctgctactaatctttgtaaaattttttattggtataaatataataaaggaaagacattagaggctgtatattcaaaagataaactgcatttctaatagaaatagcaggaaggagaaagaaaat

SEQ ID NO: 14060 - DNA, 569 bp, Homo sapiens
gggaatttaaaaaagtaacctagaataaagtatgtctattcttgtaactccagacattccattgcagtgagattascatggatttggggtgaaaaagtagtatatactttcaaatgaccaatgaaaatacagtttacctttcaatagtcttatgattatgttatttaaagatgtttggaagatcaaaaggaaaatatgcagtagacatagttattgcaatttgcacatggtttccataaaccagatgatccatcagagttaacatggttctttacttttaattatctatttttcttagtatgttttcctactggatagcggccgggagtactccacctaagaccgcatgctctgtcaatctgttaccaggaagctttcaaaccggttttgattacgagcaaatctgtctacaggaagacacgccctgccttcccaagccacagggcttcgttgaacgaagtagggatttttatgaagttctttaaattgcaacagcagcagcatgttatttataaacaccaaacacattgaaatgtggagaaagactgtgaagggattattagtgataa

SEQ ID NO: 14061 - DNA, 380 bp, Homo sapiens
caaggaggtggagttgcagtgaaccgaaatcgtgcaacacactccagcctggtgatcgaacgagattccgtctccacaacgacaacgaaatttaagaaaaactgaaactgagaagggatttcttggaacttgctatagtatcrttgtaactgttctataaatctaagattatttcaaattttaaatatctgtatataccattaaaaaatccattgtgtattagttatagtttgatgaaaataagtttaaataatacataattattgttctattataaacttgatatcctagtcctgatatgatatcatagtcttgacatgtgatatcatagtctaaaaacaaaacaacaagaccagagaggaaggtaaagccattcctac

SEQ ID NO: 14062 - DNA, 538 bp, Homo sapiens
ctctccctctttctttgcacacacactctcctaacttctggaatgcagcccactccatcattaataccaccctagtccaagccactatcatttctcacatatccaacatgacaacctcgaaactcgtctacccacttctattcttgcctcttttccatcaattctccacctccctgacatagtaagtatttgaaaatgcaaatataatcacagcactcccctgcttaaaaccatggataaagacctaacttctccctgtagcctacaagaccccactcactgcctaactgcatggatctgcttgtactgcacctacacacacacacacaccmacacacacacacacacacacacacagtccctggtctcccacctcctcaaagagttcttctcactcccaccccagggcctttgcactgcctctttcttccacctgggatgctcccctcacccctagaccaacatcccttcactacttatccttcatctcttaatccttacttatccttcacatatcagctcaaatatcacttcctca

SEQ ID NO: 14063 - DNA, 538 bp, Homo sapiens
ctctccctctttctttgcacacacactctcctaacttctggaatgcagcccactccatcattaataccaccctagtccaagccactatcatttctcacatatccaacatgacaacctcgaaactcgtctacccacttctattcttgcctcttttccatcaattctccacctccctgacatagtaagtatttgaaaatgcaaatataatcacagcactcccctgcttaaaaccatggataaagacctaacttctccctgtagcctacaagaccccactcactgcctaactgcatggatctgcttgtactgcacctacacacacacacacaccaacacmcacacacacacacacacacagtccctggtctcccacctcctcaaagagttcttctcactcccaccccagggcctttgcactgcctctttcttccacctgggatgctcccctcacccctagaccaacatcccttcactacttatccttcatctcttaatccttacttatccttcacatatcagctcaaatatcacttcctca

SEQ ID NO: 14064 - DNA, 538 bp, Homo sapiens
ctctccctctttctttgcacacacactctcctaacttctggaatgcagcccactccatcattaataccaccctagtccaagccactatcatttctcacatatccaacatgacaacctcgaaactcgtctacccacttctattcttgcctcttttccatcaattctccacctccctgacatagtaagtatttgaaaatgcaaatataatcacagcactcccctgcttaaaaccatggataaagacctaacttctccctgtagcctacaagaccccactcactgcctaactgcatggatctgcttgtactgcacctacacacacacacacaccaacacamacacacacacacacacacagtccctggtctcccacctcctcaaagagttcttctcactcccaccccagggcctttgcactgcctctttcttccacctgggatgctcccctcacccctagaccaacatcccttcactacttatccttcatctcttaatccttacttatccttcacatatcagctcaaatatcacttcctca

SEQ ID NO: 14065 - DNA, 576 bp, Homo sapiens
agctccgcctttgatcccctgggcagcctccccaggggacagagaggcatgtagtcttccaagccagcctccgccaccatgtgcctgggtatcttctcagccactgtccttggtactgtccccagggagcttctgtgtcctgtatcaggtgggataagtactgctaagaagaataacacaagggacagtgatgggcygctggagaagcctctgaagagggggcgtgtgaggaaagatctgaaggaagagggggagacagctccactttcaggccaggggacggggaagggccctgaggtggggacatggctggggatagtgagcatgggggaatggcaggacctaagtcagagaggttaagcggggatggtgggaccaccacatgagggctctggaagggactctttctgagtaaagtaggagtagcggagagtttaaggccaatgaatggcatggtctgccttgtgttttaaaaagatcactctggctggcacatgcctgtagtcccagccacttgggaggctgaggccagaggatcacttgagactaggagttcaagttcagcctgggaaccta

SEQ ID NO: 14066 - DNA, 548 bp, Homo sapiens
ctttcaaagagtcaatgattatgtggttaggagaataagaggaggatccaagacagtggaggttcastgcccattcgcaatgattggtgggaaaacaccattgggaacaactgagctagtgagagatgttctccagaaagttttctcctagcctgtggcatggccattaacatggcataaccactttgatcatattggattaccaacagtgcttactggcaacactccccagggaatccagcacaaacacaattttcagtggaaaacaaagctccttaacgtttcgaagtagcaaaataaattttatattaaaaaaaatccaggcaacagctggggcttctaagaacctttagaaatgggccctctagcaaagcagtttgttcttagaagagaaagtacactttcagactttttaattgtgttaatgaagtaatatggcacaaatgaagtctaattcagcttatacaaaaacaggttgtcaaattatgcttcaatgtatttttctctgtctggaaatggatacttaaatgcctgtacctagaaaaaag

SEQ ID NO: 14067 - DNA, 595 bp, Homo sapiens
agattctacagctgcaaaggttcttggttgggcagcccaggaagcccagggtgtgagctggatgtatgcagatgagtcgccagtctctaattaaatcaatcactgatgtaattttctgggtatactaatgatgtaaagtgatgtaaatgaaattgaactctccaagtacagcttgtgctttcatgggctctgggttaggcctgctctgtaaggtccttctggcagtgagaggatggaagaaaaacacagccagtaaacctgtgcttgcttcaaattggttctttctcaactatgtgtcttcatcttacccaatattggctatggcagctgagataactgatgtttwaatcattttataatcacagggagaaaacttacccatttcaatcctgctgtcaacattagcactgacttttgatgcagagctctcacctgttacacagtttttcattgtcttctccctagagctgccacatagaataatttatttacaactcaaaaaaaaaaaaaaggcttctgagatcaccagtaaatgctatttagaaagcagtctatggtgatcagatttttctcaaatgctctagaacatattaat

SEQ ID NO: 14068 - DNA, 563 bp, Homo sapiens
ctgccagtaatgacctctggaccatatctgacacaaagtagtttaagacactagatattttacactcgaatccagatttccctcttctactgaaagaaaaaggagggccagagctttcattttcatggtgacaatggtcaggcagagcagtggctactgccatcgaacagtcaggtctttcttgttggccacaactctcaaaacaacactttactcttgatatgatccacctcgcccctgttggcatttgcagtttgagccactgctggaactggaagacaatgccaaggaatctggacttatttccaagggcaacacaggcctgctgagggcaaggatggtccggstggacaacataatgaagacatgtggataaggtcatttcttttgagttccttctcctgaaagggttgaccccaaactaggcctgaatagaggccatcagaatgttctctggtcttgaaaagcagtttcctggcactcgatttttttctctctcctgccctgttaacaatgctgtatcctagatgttgagtcataatggctctacctaattttactag

SEQ ID NO: 14069 - DNA, 477 bp, Homo sapiens
aaattaaaaaatgtagttagygcaatttcggtaaagattctcagcattagcaaacaacttaatcagaaatagtcatcaaatactgtggatattatccatacttgtataatacttttaggataaaatttaggacactgtactttttacagcacttcccctttgttatggagaaatgaaatgaaaaatttattgaacaaccaatactaaatattaccaatgaagaaaaagatggatggaacataatgtgatatgaaaataatactagacaagaaaggattaaatgtatgacttaatctttttaatatttttgtgttcagacacttcaaaagccatattaaatgccaagatttaaaagtaagaaatctaaaggcataatcagagtggaattacatattttaccctcctaaaaagaaatttaaagtatgtaaagtaagttatataattaattttaacatatttgtttctacttaaagatcc

SEQ ID NO: 14070 - DNA, 870 bp, Homo sapiens
tggctttactctgactttagtggctaggcacttgttcaagggcagataagtgacatctgacatctatgtaagaaaatatttaaataaagtaagggttcaagcagaagaatagataggcagctactgcaataatcaaagctgataaaataaggtggtaacattagaggttaaaatctgtatatatgtaagaamgtatagaaggaaggaagaatttgctgatagatagatgtggattataagatcaaagtttccaggagatttttgttttctgttttgtcatgtgtgtttcttttttaaaaatactttatttctcttttttggcctgagaaactgtaataatgtctaccactgagttgtgggaagacttggaaaggagcatatttatttaagtgacaagattagaacagaactctacaatttgtttttgtatatattacctctgaattgtctattagccatccaagtggtgaagtgaagtagaactgtcaaaggattattgcgcttaaaatgtctattcaatgtcactaatcataataatatcacctgaggtttgtatgggccactcttgcccatgactggacatgatttccatgactaccctggaagtagctactttcattattactaggtgaaaaaaaaaaaaaaaaaagttcagggaagttgttttcccaagtttcttatttcaaaatagaggtcataaatttcttacaggattgttataagaattgaaataatgtaatgaacataatacattgagttaaaatcacagttttcacacaaaggtactaaaaccaatataataaagagtagttaacaatgttaatttatgggctaaaatttccattttatgattcgtgaccaaatataatt

SEQ ID NO: 14071 - DNA, 572 bp, Homo sapiens
  misc_feature (1)...(572): n = A,T,C or G
atatgttcattgcagcactattcacaatagcaaagacatggaatcaacctaagtgcccctcaatgatagagtggataaagaaaatgtggtacatatacaccatggaatactatgcaactgtaaaaaggaatgagatcatgtcctttgcagggacatggatgcagctggaggccattatcctcagcaaactaatgcaggaacccaaaaccaaataccacatgttttcacttttaagtggaagttgaatgatgagaacacatggagggggaacaacacacactgggggctgtcggcaggtcgggggtgggggaaagggcattaggaagaatasctaatggatgctgggctcatacctgggtgatgggatgatctgtgcagcaaactgccatggcacgtgtttactgtacatcctgcacatgtacccctgaacttaaaatcaaagttggnacaacggtcaatgtctggggtttatgaacagcaaaaactgatatatttcatatagtggagatatttcttttggaatattccatgattaaggcttttgtggcatacacaacaatgtgatcaatgtc

SEQ ID NO: 14072 - DNA, 514 bp, Homo sapiens
ctgaggtgggagaatcacctgagcccagggagttggaggctgcagtgagccatgatttcaccactgcactccaacctgggtgacagagtgagaccttgtctcaaaagaaagaaaaaaaaaktagcatgacactagctctgaaacaccaaagaatttatcaacgtatttaatattacctcttagttttctgtccttaaaagtttctcatgttttaaatgtttgtactgtaatgtttgtgtttgtttttgtactttgtagaattgccatgaacttgaaaagatggacctggaagagtgtgttcaggtaagattgtagattttaattcagaaatacagtatagtagacacttagataatacacaacatcagaatgtgcaattccctaccctagtgtaggatactgtagtgcctgacagcattgcagattccccattaagtaaggtatcttccaggcagaggtgctcatggtatgtgttgcagaactgtggaaatatatgccatcaatcaggttgcca

SEQ ID NO: 14073 - DNA, 514 bp, Homo sapiens
ctgaggtgggagaatcacctgagcccagggagttggaggctgcagtgagccatgatttcaccactgcactccaacctgggtgacagagtgagaccttgtctcaaaagaaagaaaaaaaaattagcatgacactagctctgaaacmccaaagaatttatcaacgtatttaatattacctcttagttttctgtccttaaaagtttctcatgttttaaatgtttgtactgtaatgtttgtgtttgtttttgtactttgtagaattgccatgaacttgaaaagatggacctggaagagtgtgttcaggtaagattgtagattttaattcagaaatacagtatagtagacacttagataatacacaacatcagaatgtgcaattccctaccctagtgtaggatactgtagtgcctgacagcattgcagattccccattaagtaaggtatcttccaggcagaggtgctcatggtatgtgttgcagaactgtggaaatatatgccatcaatcaggttgcca

SEQ ID NO: 14074 - DNA, 496 bp, Homo sapiens
agctaaacacttcacgtgctttatctcagsgcctctcagttaatctcatcgtcacatgcttatggggccaatccatgacttcttcactttgcatctgtggagctcagaggtcttgtacggcctggccccacagtcggtaaatgaaacacagaccctggccgggtgcggtggctcacacctgtaattccagcactctgggaggccaaggcaggcagatcacgaggtcaggaaattgagaccatcctagctaacatggtgaaacccggtctctactaaaaatacaaaaaaatcagccaggcatggtggtgggcgcctgtagccccagctacttgggaggctgaggcaggagaacggcgtgactccgaggtggagcttgcagtgagccgagatggagcccccacactccagcctgggagacagagtgagactctgtctcaaaaaaagaccctgattccaaacccggtgttcattcattccttgttcaacaacgattcag

SEQ ID NO: 14075 - DNA, 496 bp, Homo sapiens
agctaaacacttcacgtgctttatctcagggcctctcagttaatctcatcgtcacatgcytatggggccaatccatgacttcttcactttgcatctgtggagctcagaggtcttgtacggcctggccccacagtcggtaaatgaaacacagaccctggccgggtgcggtggctcacacctgtaattccagcactctgggaggccaaggcaggcagatcacgaggtcaggaaattgagaccatcctagctaacatggtgaaacccggtctctactaaaaatacaaaaaaatcagccaggcatggtggtgggcgcctgtagccccagctacttgggaggctgaggcaggagaacggcgtgactccgaggtggagcttgcagtgagccgagatggagcccccacactccagcctgggagacagagtgagactctgtctcaaaaaaagaccctgattccaaacccggtgttcattcattccttgttcaacaacgattcag

SEQ ID NO: 14076 - DNA, 496 bp, Homo sapiens
agctaaacacttcacgtgctttatctcagggcctctcagttaatctcatcgtcacatgcttatggggccaatccatgacttcttcactttgcatctgtggagctcagaggtcttgtacggcctggccccacagtcggtaaatgaaacacagaccctggccgggtgcggtggctcacacctgtaattccagcactctgggaggccaargcaggcagatcacgaggtcaggaaattgagaccatcctagctaacatggtgaaacccggtctctactaaaaatacaaaaaaatcagccaggcatggtggtgggcgcctgtagccccagctacttgggaggctgaggcaggagaacggcgtgactccgaggtggagcttgcagtgagccgagatggagcccccacactccagcctgggagacagagtgagactctgtctcaaaaaaagaccctgattccaaacccggtgttcattcattccttgttcaacaacgattcag

SEQ ID NO: 14077 - DNA, 496 bp, Homo sapiens
agctaaacacttcacgtgctttatctcagggcctctcagttaatctcatcgtcacatgcttatggggccaatccatgacttcttcactttgcatctgtggagctcagaggtcttgtacggcctggccccacagtcggtaaatgaaacacagaccctggccgggtgcggtggctcacacctgtaattccagcactctgggaggccaaggcaggcagatcacgaggtcaggaaattgagaccatcctagctaacatggtgaaacccggtctctactaaaaatasaaaaaaatcagccaggcatggtggtgggcgcctgtagccccagctacttgggaggctgaggcaggagaacggcgtgactccgaggtggagcttgcagtgagccgagatggagcccccacactccagcctgggagacagagtgagactctgtctcaaaaaaagaccctgattccaaacccggtgttcattcattccttgttcaacaacgattcag

SEQ ID NO: 14078 - DNA, 578 bp, Homo sapiens
cctcaaaattacacccttaaaggcatataacaagtgtgcatctgcacccctatacaacctacctgtgctactatcttaggagttctttcatagtatccctgctcttctcagactgctaattattttcttcctataatggtgtctatctttggaattcttcttccttctagttaactctttctaacttgttatagatcaggaaagaaaacagccacatttaataactgtctaaaactaaagggattctgagggagagactaggatgttcacctgtaacatatacttttgtaactcaaatgtctgttaagttaaatttctgattttttggctatattctaaggcaaccaaggcttcttcctggacagctgacctctacttaattgagagtttaatgttcttccctaagtattttgggatagggctttccaaatattttaggtgctacctagaagtttcataaacaaaattcacccttagtacatactacgaacttacacatatatgacacacacacacagagttgacttctgaactaaatggcatgggtacacttatacatgayttttttttcaaccaaa

SEQ ID NO: 14079 - DNA, 597 bp, Homo sapiens
gagtgccagcttagccataaatcacactgacgtgagtgtttctgtttctaggctatcctataatgtcccactaatggtcataagatatctaagtaggagccagttcccctgagaaaaaaggggtacctgacatcatccaaaccttattcattaagttattttaactttgggcctggtgcggtggctcacgcctataatcccagcatttggggaggctgaggcgggcagatctcttgagcccaggtgttcaagaccagcctgggcaacatggcgagaccccatctctacaaaaaatataaaaattagacaggcatggtggtgcacacctgtagttccagctacttgggaggctgagatgggargactgcttgagcctggaaggtcgaggctgcagtgagccaagatcacaccactgtacccaagcctgggcaacacagtaagaccctgcctccaaaataataataaataaataaacaataaactttgaaatatctgcatcataactggacatcattactaaggtatcctaatggcaatctgtaaatgaaaacaatgttactttgtataaaagaagcaaatacatattgatgaagctta

SEQ ID NO: 14080 - DNA, 548 bp, Homo sapiens
tgagatagggkgtcattctgcatggtattctagctgatcacctgcctgcctgcatggcacagagaacattcggtggaatagttgaagctgtgaaacttcactgacccactcagagatagaaaggtctgcagagcacagactttagatctcctaaagagagctcttagaagatcaaaacatgccctttgctttacccacttggagctgatttgaacaagcaacaggaaaacaacacagaacggtatccagtatacttggcagagtttattgccaattggaattaacagaacactatctgttatcctgttattcacgtcaccaccaccaccaccagtaacatttaccaaacacgaatcctacctgggacttggttggtgttatacaaattaatcatcatcttctaagagcgtatttgctttcttgtctaaggctcaacctaacaatgccagactgtttaatttgtgaatgcaaagtattatttatgttcacaagtgagctcattttatcttgcaaatttaagtgttgcaaagatactgatgtgtgacagt

SEQ ID NO: 14081 - DNA, 548 bp, Homo sapiens
tgagatagggtgtcattctgcatggtattctagctgatcacctgcctgcctgcatggcacagagaacattcggtggaatagttgaagctgtgaaacttcactgacccactcagagatagaaaggtctgcagagcacagactttagatctcctaaagagagctcttagaagatcaaaacatgccctttgctttacccacttggagctgatttgaacaagcaacaggaaaacaacacagaacggtatccagtatacttggcagagtttattgccaattggaattaacagaacactatctgttatcctgttattcacgtcaccaccaccaccaccagtaacatttacyaaacacgaatcctacctgggacttggttggtgttatacaaattaatcatcatcttctaagagcgtatttgctttcttgtctaaggctcaacctaacaatgccagactgtttaatttgtgaatgcaaagtattatttatgttcacaagtgagctcattttatcttgcaaatttaagtgttgcaaagatactgatgtgtgacagt

SEQ ID NO: 14082 - DNA, 548 bp, Homo sapiens
catgacattatagcaaaagtcttcccactaggaccttgccaatttcagctttaattccatcagtaaacaactttgactgtgttgggaaaattccattaatcgttcatgttctgcgaataatgatacacaaggagctgtcagcactaggcagcaactttccatttgtttggtaattaagaactccaggccatctaatggtgctgagatgcaaattcattgcctggttggagccactggaatgggctgaaaaggattcacttgcacttaaacccctaatgtcagatkatttgatggatttttcctgcttttcttaggtgaacagcaagaatattgcttcaagctgaaatggtacactttgaaaaaaacctcgtgcttctttcaagaagatacaaactctttagaacacatacttcttgttattattttacttcaagttctgggatacatgtgcagaacgtgcaggttcgttacactggttacaagaatacatgctttttaaacctgtttttgaatgatgttttgataatacaaatacataaatgtacatt

SEQ ID NO: 14083 - DNA, 513 bp, Homo sapiens
aggaattatggaagggatctcatgcagggatggtgaatgcacagaccatgtgtggtcccctccaccctccagcccttgttggtcctcctggtgccctgcagagccgcagccaccccagagcctcccggtgggaagaagttggcacctgagataaacccatttgcttttcccacttgaattcagttctcttgttcctataggtgtggacgttgagggccagcctggaagcgccatatccagaggcactcagggaggggagcaggagacccagggctctgggattcaggtccctctgtcacaccctgcccttcttctgggtctttcttccccacctcccagccagaaattgcctcctggagccagcccagcctcgtcttgttcattggagctcagttggagacccgtcctcacccgaagcagggtgagaggacagcacctgccacctttaagtctgggctttgctggacgcctaggagaagccgggtcckcaggcactcgagtgggaagtgaaag

SEQ ID NO: 14084 - DNA, 551 bp, Homo sapiens
ccaccacacctggataatttttatatttttagtagagccagtgtttcaccatgttggccaggctggtctcaaacccstgacctcaagtgatcccgcaagcctcagcctcccaaagtgctgggattacaggattacaggtgtgagccactgcgcccagcctagagtacaaactttgtaaagagcacaaagcaaagactagagatatataagatatactctatgaagggattttgtctaattagaaatagaggcacaatagtgaaaaaaggactttttagattataatgaagaaagctgtatcacagaatgttctgcaaactaattttttaagcaagaaaaatattcaccatcaacaagcaagcaaagggttacaacataatatggtaagcatctagccaaaagataaagacaaaagttgctatgcaacttttattaagcaaatcctattcctgagaagtaagtaaacttattctaagaatttttattaatattccaaaatctgaatggaaactgatttttcaccctcactcatatctcaaaactcaaagaaa

SEQ ID NO: 14085 - DNA, 511 bp, Homo sapiens
cattatcaatctcatatccagtcttactttccacagtgcatcctgcatagtacctattgtaaccaatgagaataaataagggtttgaagacacatcttactaatacccgtcaactatcaggctaaaatggtcaggtccagatttggcatgtgataccccattactatatttccagctggttccaatatttgcccaaaatttccacaggaattcaagccaattgtgctgagttcttccagaagcattcatttcactttggaaaaattcccaggacgtgattcatacaggactcctcagagagtatacccgggtaactgcactctagggtcaccctrtcagggttaaaattccagcctcactttcactaagtgtatgacccttaaaaaagaactacatcaccttgtaagccttagtttcctcaccagtaaaatggcatctatacgccaaagagttgttgtaaatgattaagtaacatgaataatgaacttagcatatcacctaacacataaat

SEQ ID NO: 14086 - DNA, 566 bp, Homo sapiens
cacaaatatcccaaaatccaaataaaagcttggaatctgaagcacgttaataccaagaaattgcaaataattgattttcaacttatattttttgcaagttttttatatctgaaattattycattatagaagggtcttttaaagttgtccaaaaattacctccagaaagaagttaggtgcaaatacagagttgagctgttttcttatttcaaggaatattcctatggtatcaaaattgttatagagcatggaaaacaatggaaagtatctcaattaattctataaagctaataagaacctgatattaaaatctggcaacactatcccaagaaaaagactcttttttttttttttttctgagatagagtttcactcttgttgcccaggctggagtgcagtggcaagatctcagctcactgcaacctccacctcccaggttcaagcaattctcgtgcctcagcctcccaagtagctgggattataggcacacaccaccatgcccagctaatttttgtatttttagtagagacgggatttcaccatgttggccaggctggtcttgaactc

SEQ ID NO: 14087 - DNA, 566 bp, Homo sapiens
cacaaatatcccaaaatccaaataaaagcttggaatctgaagcacgttaataccaagaaattgcaaataattgattttcaacttatattttttgcaagttttttatatctgaaattattccattatagaagggtcttttaaagttgtccaaaaattacctccagaaagaagttaggtgcaaatacagagttgagctgttttcttatttcaaggaatattcctatggtatcaaaattgttatagagcatggaaaacaatggaaagtatctcaattaattctataaagctaataagaacctgatattaaaatctggcaayactatcccaagaaaaagactcttttttttttttttttctgagatagagtttcactcttgttgcccaggctggagtgcagtggcaagatctcagctcactgcaacctccacctcccaggttcaagcaattctcgtgcctcagcctcccaagtagctgggattataggcacacaccaccatgcccagctaatttttgtatttttagtagagacgggatttcaccatgttggccaggctggtcttgaactc

SEQ ID NO: 14088 - DNA, 566 bp, Homo sapiens
cacaaatatcccaaaatccaaataaaagcttggaatctgaagcacgttaataccaagaaattgcaaataattgattttcaacttatattttttgcaagttttttatatctgaaattattccattatagaagggtcttttaaagttgtccaaaaattacctccagaaagaagttaggtgcaaatacagagttgagctgttttcttatttcaaggaatattcctatggtatcaaaattgttatagagcatggaaaacaatggaaagtatctcaattaattctataaagctaataagaacctgatattaaaatctggcaacactatcccaagaaaaagactcttttttttttttttttctgagatagagtttcactcttgttgcccaggctggagtgcagtggcaagatctcagctcactgcaacctccacctcccaggttcaagcaattctcgtgcctcagcctcccaagtagctgggattataggcacacaccaccatgcccagctaatttttgtatttttagtagagacgggrtttcaccatgttggccaggctggtcttgaactc

SEQ ID NO: 14089 - DNA, 475 bp, Homo sapiens
attcctccaaaccatggggtttaagtgtgttgaagtaaagcagtgcaattattcatctagattctgtgttcctattaaacacaccatcacaaagctggactccattcttagtatgacaaatgcawccaagtccaaatcagctctgccaaatctaaacaggagatgagaatgatactcagaagattcacagtacaagtttcacatgatctcatctgaggtgtgtgatagcccttgtggggtgagctttattatacgcatgctatagaaagataactgatgcacagagaggctaagttattaacccaaggttacaaaactagtgaaactaaactgaaattgtgtctgcagacactaaaaccaatcttctttccatactttgtagcagtggctgagcaggaagaatatgtcatgacctcctagcatgctatgagaattttcttatatttatttcagagatttttgtctcttttttttt

SEQ ID NO: 14090 - DNA, 560 bp, Homo sapiens
taattttatttttttaatcgctttctccacatgatggtaattttaatagacagtgtgattcaaaaggtttgccttgagtcgctaattattccaatccagactactctctccaaggtccaattacagcaatgccccagagagttaakgcccatttaagctcgtggagcagtcagtgcatcaactctgttttatcttcagtttgtcaaggcatggttatttcactggatattttacctgatgaggccattatctccatttgctggtccaatttatcctgtaatattcattcattcattcactaactcattcattcattcaaaaatattggtcaaattcctgctgcatgtgaggcattgtgctggtcaatgtagatggaaataaacattccttaccccgtagaatttgatttctagtagcaggatgttaaatgtaatcaattattacaggtgatttaaagaaagctaatagtgggacacaagaaggagtcaaactggtgagggagttcatttccagagggcaaggaagagtcagaaaacgtgtcttagagaaggtcaatgaac

SEQ ID NO: 14091 - DNA, 560 bp, Homo sapiens
taattttatttttttaatcgctttctccacatgatggtaattttaatagacagtgtgattcaaaaggtttgccttgagtcgctaattattccaatccagactactctctccaaggtccaattacagcaatgccccagagagttaatgcccatttaagctcgtggagcagtcagtgcatcaactctgttttatcttcagtttgtcaaggcatggttatttcactggatattttacctgatgaggccattatctccatttgctggtccaatttatcctgtaatattcattcattcattcactaactcattcattcattcaaaaatattggtcaaattcctgctgcatgtgaggcattgtgctggtcaatgtagatggaaataaacattccttaccccgtagaatttgatttctagtagcaggatgttaaatgtaatcaattattacaggtgatttaaagaaagctaatagtgggacasaagaaggagtcaaactggtgagggagttcatttccagagggcaaggaagagtcagaaaacgtgtcttagagaaggtcaatgaac

SEQ ID NO: 14092 - DNA, 1562 bp, Homo sapiens
tgtaatgtttaaatggcaaagccaaagagacaacaagcaaaagtccaaaacttctcctgagcactggcagataggctctcaggagacatatcccagaagatatttcagaatcctaaaactgtggaaatctattaataggaaacaatctcacaatataatcaatacagatggagtaasgtaaatttagatcattctggggtctgcaggagaaaaaaagggtataaaatggaggcttttagtttgttgaagttgtacacactgcagttttagtttgtgaagtagggtagacaagttgagatactttttagaaataatataaaagacaggtcagcctagagaataaggagtaggagaagagagtgagagaaaaagtgggcagtaatcatagacaggcttttaggggaagaaacaaattatttggagaggatttctagcgatttttgcaatataaaaaatcactccatcactccaaaaatatagatttttttcagtaaaaattaaatgttagttaaatttaagttttggggggagtacaagaacattttaagactggcttcaaaaagtcctagcaaaagcaagagggttttggtcactttgaggttaatggagaagatattcacacacagaaggcattttgaaagagtaatttcagagtatattcacatccaaggaaaattacattttttgatatccttgctttttataaagcaatgaaattttacatagaattagctatataaaatatatttgataaaagcctgaaatattatactagaaagtcattgtatttttaaaatagaatttcgagtatgtcagtacttagagtgtgaggcggaagacagcacagtacaggatagagctgagaggctttgaagccatattgagccagacctctttggtgtgaccccttggttaagtcatttaatttaactaagccctgttttctcatttttaaaattataggagtgagaataacttcatagcgttattgagaggactgtaaataagtaaagtgactacttaattatgatgatgattataaatgttacatcacattaaacatgcaaaacatttattgcagtgcttgacatataatatacattccgaaaagaattccagttcctttcctttctctctgcaattggcatatcaagctaaggtacaagaaagcagccagtgcaacaaggactggcatataccaaaatgagatgaggactcacttggaacactgaagtagctcagcatgtgattcagaaactagaaaataagaacaacaacaaaaaaataataaccaggacatagaaaatacattagacattcttgactaagggttccagcaacaactgatgtgatacaattaattgagtatagcagactccacagtatttttacatgtatgttattatcctatgaagtatccagaagacacaagcagacatattatatcagcaaatgttaccaaaaagtactagcaggatacacatttcctcagatgggctgctgataaaagtttttgtaacatttaagttgcttttatttttatttatgttttgactaggcaa

SEQ ID NO: 14093 - DNA, 536 bp, Homo sapiens
atttaccaggagactgtagaatgactttgatgcttttgaaaatatagctaagaacagatatctcaactggggtcatcatcagtcaactgttcagcttgacagtctttttcaatgtttagtcaagacagtattgaactagcttttttctttgaaaaatttttatgatattttccccagagcacctgcttttaaaacttaaaaatgtatgtggtattctaaatttggggctcaaaacatgtcttagatttgatttcagttcaataaggataatttaatatgaagtaagtgagtataaaattgagaatctgtttaagattttaaatgattcatatagtaatacattcttagcaatgaytggtgctaatacaggctcacttattttttctttgctatgtagctctttcaaaacatttatagccatcatcatcatcatcatcatcatcatcatacccaagaaactttaagatctaattacatgcagctgtatgtaaaacttttaaaagcaagtgaggtcaggcatggtggctcatgcatgt

SEQ ID NO: 14094 - DNA, 517 bp, Homo sapiens
tttaaccaaagaaaactataactttctatttaagacaatgtgatttttcccatctctttttctttcaacacaaagtcccttatgcctacagtgcctttcccacctctccttcctcacccctattctggtaaaagccctaataccttatggctcaatccaaagtttgccacttayggagttttcactgagtccaggacagagtcagttcattcttctcaatgattctcttccatcatgcttcacaacttaaagtatagtcagatgcttctgtgtgtgtatttcagttctgctgcgcctatgcagttctaccatcccatgcagtgtatggcccagagcagctatttaatacaaattgagtcaaagaataggagtggggacatagtgaaaactgcattcaccaaggaaacattttgttattgtctccagtattcactgagttctgtttgaaaataaaatcattaaagaaactacatatgctatgttttcttgatttcgaaaatgccacctattttaagac

SEQ ID NO: 14095 - DNA, 517 bp, Homo sapiens
tttaaccaaagaaaactataactttctatttaagacaatgtgatttttcccatctctttttctttcaacacaaagtcccttatgcctacagtgcctttcccacctctccttcctcacccctattctggtaaaagccctaataccttatggctcaatccaaagtttgccacttacggagttttcmctgagtccaggacagagtcagttcattcttctcaatgattctcttccatcatgcttcacaacttaaagtatagtcagatgcttctgtgtgtgtatttcagttctgctgcgcctatgcagttctaccatcccatgcagtgtatggcccagagcagctatttaatacaaattgagtcaaagaataggagtggggacatagtgaaaactgcattcaccaaggaaacattttgttattgtctccagtattcactgagttctgtttgaaaataaaatcattaaagaaactacatatgctatgttttcttgatttcgaaaatgccacctattttaagac

SEQ ID NO: 14096 - DNA, 517 bp, Homo sapiens
tttaaccaaagaaaactataactttctatttaagacaatgtgatttttcccatctctttttctttcaacacaaagtcccttatgcctacagtgcctttcccacctctccttcctcacccctattctggtaaaagccctaataccttatggctcaatccaaagtttgccacttacggagttttcactgagtccaggacagagtcagttcaytcttctcaatgattctcttccatcatgcttcacaacttaaagtatagtcagatgcttctgtgtgtgtatttcagttctgctgcgcctatgcagttctaccatcccatgcagtgtatggcccagagcagctatttaatacaaattgagtcaaagaataggagtggggacatagtgaaaactgcattcaccaaggaaacattttgttattgtctccagtattcactgagttctgtttgaaaataaaatcattaaagaaactacatatgctatgttttcttgatttcgaaaatgccacctattttaagac

SEQ ID NO: 14097 - DNA, 535 bp, Homo sapiens
ttttaaccttctatatttctgagtaatttgtaaacaacaataggaatcagaagaccaatcrcatcaacttctggagctgggggtgagattcacgtttcctgaagtatagggataggtgagaaagagcaaatccatggacctgaacttcattaggattctgctaagatgaaggaagtggatgctgggtaggccaccagtagtattttccgtaactttgaaaaattcagagcattaacctcctgtggattaatatgtgcaaagcattaacacactgcaggcatataataaggacttgataaatgatagttatttctattattattattcgatgtgtgaatgtgcttaagagtttcttatataccttcccaaggagctcacgagtacactttggttatcttgtctatatccttgtggacctagatgggcaaatatatgcagaaggaaagaagcataaatcttcctttcaaatcaaaagggcccccttcgctagatctttttcatgttaggtcttttgcctccttctgtaccttctgac

SEQ ID NO: 14098 - DNA, 579 bp, Homo sapiens
cttgcttcattcttttcttcattgttcatttactttaccaattccacttttccccttttttagagttttttaaactaattcttcttcagaggttttttttattttagagtttttaaaattaataccagaaattaatgatttcaggatgatcttcatcacctttatttctatggctccaaacatgcttgtatttaattttctactggaaatgtctgtgcaatgcaagaacataagggtttcctctccaatataaacatggtgaaattgtttgctttaattttctgtcttactgttataaaatggaaagggataataaatgcatcttggattcttgatcttttgatataatttctaactttaatattaccttaaaaaatcatcccccactggacagaagaaattactttrgcatttcttcttgcattacaataatgcacaaggaactgaaatacagtgaataggatctaatcctgtcctcaagaggtttatagacttgtaaagaaataagacaagaaaccagtcaactataattcagttgtgaaaaatgttctctcactagagagttactttttgagatcg

SEQ ID NO: 14099 - DNA, 579 bp, Homo sapiens
cttgcttcattcttttcttcattgttcatttactttaccaattccacttttccccttttttagagttttttaaactaattcttcttcagaggttttttttattttagagtttttaaaattaataccagaaattaatgatttcaggatgatcttcatcacctttatttctatggctccaaacatgcttgtatttaattttctactggaaatgtctgtgcaatgcaagaacataagggtttcctctccaatataaacatggtgaaattgtttgctttaattttctgtcttactgttataaaatggaaagggataataaatgcatcttggattcttgatcttttgatataatttctaactttaatattaccttaaaaaatcatcccccactggacagaagaaattactttagcatttcttcttgcattacaataatgcacaaggaactgaaatacagtgaataggatctaatcctgtcctcaagaggtttatagacttgtaaagaaataagacaagaaaccagtcaactayaattcagttgtgaaaaatgttctctcactagagagttactttttgagatcg

SEQ ID NO: 14100 - DNA, 661 bp, Homo sapiens
tttcttaatgtttttatcaccggtcatttgtcaaaagatttcaaagatgcttttaaataagtatcacgaaatttcaaaatttatacataaatacgaattgtaaccctcatatgtattgttcactggtggtatagaatatttaaatctaggaattttaaaaacaaagatcttgtcttgcaagctgacatccaaacctccttccccagacccactgtctggtgatctgtgggctggaggcttagccaccttcgtcaggtttaaactgctacggagacctcttatggcttgctagaagcagattcacttcctacatttaataaaagagcctgaatcctgctgtgaatgtattttctgaattcttatgctgtttctaaaacattagcaattgctaatagtcatatagctcagagaggttgtgggagctcctcaggacrcacagcaccagagtagcaatctggaaagacttcaattctccctgaatctgtgaaggagaagatgtaagccacttgtcagctcctgaaggaaggagggaagcaagaaagggaggcagggaagggaaatggtgatgggaagaagaaatgaagtgggtagggcaggggaaaagggggcaaaggagcaagcatggctccgatccgtcgtcccctccctgacggggctcatg

SEQ ID NO: 14101 - DNA, 633 bp, Homo sapiens
accactacaacagcgtgggggaaactgcccccatgagtcaattatctccacctggccctacccatgacacatgggggttattacaactcaaggtgagatttgggaggggacacagccaaaccatatcacttcttcagctgacttgtgggttgctatttatgacaaattatcttaggaattaaataccagtttatgaatattgcaccattagggcattatcttttgccagctttcctgctcaccactcccttgtcctttattccgaatgtggacacatgggtaggaggcctgcaaacccgtgatgacatttctcagtgtgtggggccatcttggatcctggcagtggatgagaaaggcgtgaaatggcaaggaacggcratggtcaactgaacagtgcatggttgtccgtgggttgaggaaacgtgatgtccgtggatgttgtttgctcttttccaaagatgcaaatgctgctgtgaatacggaaccacaatttgacctaaagacatgtctgcactcacatgccaaaatagtttgtcatttgctgtcctttgataattccatgtaaaagactatctcacaggtagcctagagatgtttgacacaaaaccaaaagatgaggaagggccaccccaa

SEQ ID NO: 14102 - DNA, 633 bp, Homo sapiens
accactacaacagcgtgggggaaactgcccccatgagtcaattatctccacctggccctacccatgacacatgggggttattacaactcaaggtgagatttgggaggggacacagccaaaccatatcacttcttcagctgacttgtgggttgctatttatgacaaattatcttaggaattaaataccagtttatgaatattgcaccattagggcattatcttttgccagctttcctgctcaccactcccttgtcctttattccgaatgtggacacatgggtaggaggcctgcaaacccgtgatgacatttctcagtgtgtggggccatcttggatcctggcagtggatgagaaaggcgtgaaatggcaaggaacggcaatggtcaactgaacagtgcatggttgtccgtgggttgaggaaacgtgatgtccgtggatgttgtttgctcttttccaaagatgcaaatgcygctgtgaatacggaaccacaatttgacctaaagacatgtctgcactcacatgccaaaatagtttgtcatttgctgtcctttgataattccatgtaaaagactatctcacaggtagcctagagatgtttgacacaaaaccaaaagatgaggaagggccaccccaa

SEQ ID NO: 14103 - DNA, 1071 bp, Homo sapiens
gcataataaaggtttcaatagttgtaaacttttaaattcacacacttttatgattttactgtgtttctattttcaatatataatgaatttgctagttacacagtgacttctgttgactaactcaacagcttatattttggtgatttagagacatgactgcaaatactttgacattctaatcaaaccatagtccctgcccttgcactttagcaaggcttgtggctgtctcagcaaagaaaatatggtagaagtgacagcgtaattttgaagactgtgttagaaaaggcagtatattatctctgtctgtctccttgtctctgtctgtctgtctgtctttgtttttacttatatctctttcttcctctctctctgtccttctgcctctttttctccctccgtacactgtggagccctgtattacagccaaagtcttgatgataaatgactgtttggggaggggcacacagaggagactaggaagtcaggattattcagtcaaaaaggagtttcagtctttcgacatcaatcactaagtatgtgaatgaatgaccttcagatgattacatccccagccatcatatgaaagtaacgacctgagaaatactctgtatgaaccacctggctgagcccacccaacactcatgctatgagagttctaataaaatgcttattgtttttcaaagtccccacttttgagggtagttggttgtgacgtgatagataactaaaatatttctaaaaatgtaattatacattcataataatatataattaatatagaggcaagaaaatgaaaactacaaatgtagcattttgaaaataactgaaactcagaaagggaggtcagcatagcatggtggttaagagcttttgtactctgcatccagttagcctggattcaagtccctgcaaaaccactacagaattwtgtggggtttggcaagttgcctcacctctatgcctcaacttctccatcagtgaaacggagatgaagtaacgccattatctacctcatgtggctgatgaaaggccggatgcattaacttggtaaagcactacaggtgctatatg

SEQ ID NO: 14104 - DNA, 543 bp, Homo sapiens
ggaacaaaggcaagtcaacagtawactattttataggcaaaggcaaatatcctcaattttgcttcagctctctgaatacttgggacagatcatatattcactttaacaatgcagatatcagccttgggctctgcttcctttggtctatataaagagttcacactagatcaatcaacatgttgcatttgcgtggtgttgtactggctcacattttctcttggatcctgccttctgttctttccatatcccttttgtgtatgaaaacatggagcacgttgcagtctgcagttacactggctgacagaacagacattgagtcaatcccggggagcaatagattcaaccttgggaagctccagcatgttctggcagctgctagtgaaagctgtactatacatgcctcccagaaatgtcctgggcatgttgctttctaagagaaacatttgtataaactacccattgtgcaaacttaacatcagttagtggtttctcatacaacttgtagaaacttttgcacaattctcggaagagaaagcagtgact

SEQ ID NO: 14105 - DNA, 543 bp, Homo sapiens
ggaacaaaggcaagtcaacagtaaactattttataggcaaaggcaaatatcctcaattttgcttcagctctctgaatacttgggacagatcatatattcactttaacaatgcagatatcagccttgggctctgcttcctttggtctatataaagagttcacactagatcaatcaacatgttgcatttgcgtggtgttgtactggctcacattttctcttggatcctgccttctgttctttccatatcccttttgtgtatgaaaacatggagcacgttgcagtctgcagttacactggctgacagaacagacattgagtcaatcccggggagcaatagattcaaccttgggaagctccagcatgttctggcagctgctagtgaaagctgtactatacatgyctcccagaaatgtcctgggcatgttgctttctaagagaaacatttgtataaactacccattgtgcaaacttaacatcagttagtggtttctcatacaacttgtagaaacttttgcacaattctcggaagagaaagcagtgact

SEQ ID NO: 14106 - DNA, 543 bp, Homo sapiens
ggaacaaaggcaagtcaacagtaaactattttataggcaaaggcaaatatcctcaattttgcttcagctctctgaatacttgggacagatcatatattcactttaacaatgcagatatcagccttgggctctgcttcctttggtctatataaagagttcacactagatcaatcaacatgttgcatttgcgtggtgttgtactggctcacattttctcttggatcctgccttctgttctttccatatcccttttgtgtatgaaaacatggagcacgttgcagtctgcagttacactggctgacagaacagacattgagtcaatcccggggagcaatagattcaaccttgggaagctccagcatgttctggcagctgctagtgaaagctgtactatacatgcctcccagaaatgtcctgggcatgttgctttctaagagaaacatttgtataaactacccattgtgcaaacttaacatcagttagtggtttcycatacaacttgtagaaacttttgcacaattctcggaagagaaagcagtgact

SEQ ID NO: 14107 - DNA, 654 bp, Homo sapiens
tactctactagcctatgctcatgaaaaatcaagaaacaacaaatgaaattttgctgtaagaaaatgggggttattgaaagatgccaaatcatggtcttgtcagagaaaatggccaattattgcatgaaccargcataccctgtactgggtagaaaatttgcaattaaagaaaaactcaaaaagcataaatcttaagattttcacttaaatagaattttaaaaagcttaaatcaagaagggcttggaaaaaggaaatgagagatgacaacaacaaaactttggaagctagaaacaaagccagtcagtttgggtaagtggaagatggggtaggaagcaggggagacttaaaagcaagctggttcacactgctaaatgccagaaaacataagaatcagaagcaccagtgatttttaaaagggagggtgcagaggactgaaaacagagctgtttggaactcaatcttagaggcacttgatgtgctttactgtttattgagacaagatttacgcctatgtctgagagtttggggattaatatgaaaaaataattacatgcaataatgaaaaaatttgtacctccaacgcaagcagaatattattttaaaaggcagcagtaaatactagcactgatattataaacacagatataagtata

SEQ ID NO: 14108 - DNA, 570 bp, Homo sapiens
attcactcctgtttccttggagaagagggagggatagaaatgatacccctctcgggaaatgaaatgaaactctcctttatggccaagatacaaacactggtagggaacaaggatggctgtccttgttaaggtcactcagatgaaccagtctgggccatcagtagtgggttgacacacatatccaaatccagtctttgttagtactaagtctctactaaacagaaaatagcagtattttgagttgttttacaatcataaatgaattaatgttatttcctatttatgttgaaggttcgtgcagactaacagtacaccattttttaaaatcactgctttgaatcgccttaaycaaaatctctttcttttctaggcacagggtggtggtttcctatcctcctcagagtgaggcagaacttgaacttaaagaaggagatattgtgtttgttcataaaaaacgagaggatggctggttcaaaggcacattacaacgtaatgggaaaactggccttttcccaggaagctttgtggaaaacatatgaggagactgacactgaagaagcttaaaatcac

SEQ ID NO: 14109 - DNA, 1347 bp, Homo sapiens
gggaatttggtatacatatacaaaagtgtgttgaggaaccaaacgcaggagtacagccagaccttaggaagggcaaagttgagaacgaaaaagcatccgcattcccamgatgcacccttggttcatctttcctccactttttttgcacatctagctcattctctgacactagagtcctgctttctctgcttctttatccacaaggctgaatatggctgaaccacagcaacaagtttagaggtgattgttctctcattcacagagaccgtgtgcctgtctctccatttcttccttctgggagaaggaatctgattggccctgcttgaaacaagtgttcagctctgtccaatcacctgaggccagctaggtgagtcactcacatgggcagagtccctggaagcccacttctgtggatggggtgcgtctcagaaaggtagaatggtttgagagctggtatgttgagttttggtaaagataccccaagaagtgtctccagggtggccaccaaattcttgaaacacagggaaaagcataatgaatgggttataaatcgtacataataaaaatagtattatctatgtttccagacttgctggccacctcatactacaaggaatagagtttacagccctaaaacagaaggattctacagggaatgaatttgtgatgttgtcattagcctggatgtccatttatctgagctaatcggtcataaatgcccatgtggctcatgtaaataagattcgtacataataaagagataattacctcagctttctagttgcaaccaaatatcctctagttacagaggatacttagcaggctaattagtagcattcattaccctgcccctagttccccaagaatgattcatgtgagatcctaagtaactcaaaccctagtgctctgatttggaacaaaaggaactgagagctagagggatggccccagaaggaggctctacagcttgttgccatacagccagagaggggcattaattaacaacacctgcttgaaataatgcacaggacatgcctggcttcagctttaaactcttagtgtctgcatccttgtgctccttctatttatcctccaaataccatacacgtaggctcaggggacaaccggatggtacactcaaatgatgacaaaaccattgagattcacataaattaataatttgcctttccagtcgacgtggaaatccgtcagcactctattggcaatttctatcagctctctttcaagctctgtctcaatttatcccagatctcagagctcctcaccacctccattgccaatgtgtaatcaagccgtaatcatctcttcttgattactgccacagcc

SEQ ID NO: 14110 - DNA, 586 bp, Homo sapiens
tgcaatgagctatgatcacacatcacatcaatgcactccagcctgggcaacggagtgagaccctgtctctaaaagaatagaagaggctgggcgcggtggctcacgcctgtcatcctaccactttgggagaccaaggcgagtggatcatttgaggccaggtgttcaagaccagcctggtcaacatggcgaaaccccatctcttggcaggcgactgtaatcccagctactcaggaggctgagataggagactcccttgaaccgacgaggcggaggttgcagtgagcgaagatcacaccactgcactccagcctgggcaacagagcaaggctcggtctcccaaaaaaaaaaaaaaaaaaagacacrtggaagtaatttaaaaacacttaggaagatgtcatttcttcctatcaaggcgtcctccctttatgttttgtcgttatattgggaacgataaaaaaaatccttttttccgacccatgtggaccaggctggcctcgaactcgtgccctggaacccccgcctccgtgagggcccgagggcaggcgcaaccggcctgagccacaatggctccgggtgtcggggctgt

SEQ ID NO: 14111 - DNA, 521 bp, Homo sapiens
gactcacaggtacttgtagttagacgcttcatggtttataggaaggctgagtgctaaggggaaatgggtagcccactaagggtcaaatctatcttacctgcctcgtttctgtaaataaagtgtcaytggagcacagccatgtccctttatttaggtattgtctgtggcttttagtatacaatgacagagttgaccacatgacccataaagcagaaaatatctagtatcggtcctttgcagaaacagtctgttgatcccttatatagttggtagcacaactgagatatcagaatttaggcttcttgacctccaatactgtgctttcctaattacacttgagacttgctctctccaaacttaattacaggaagagatgattttaccagtgtttaatcaactagaaaactctgggccgggcgcggtggctcacgcctgtaatcccagcactttggaaggccgaggcgggcggatcacgaggtcaggagatcgagaccatcctggctaacacagtgaaaccccgt

SEQ ID NO: 14112 - DNA, 521 bp, Homo sapiens
gactcacaggtacttgtagttagacgcttcatggtttataggaaggctgagtgctaaggggaaatgggtagcccactaagggtcaaatctatcttacctgcctcgtttctgtaaataaagtgtcactggagcacagccatgtccctttatttaggtattgtctgtggcttttagtatacaatgacagagttgaccacatgacccataaagcagaaaatatctagtatcggtcctttgcagaaacagtctgttgatcccttatatagttggtagcacaactgagatatcagaatttaggcttcttgacctccaatactgtgctttcctaattacacttgagacttgctctctccaaacttaattacaggaagagatgattttaccagtgtttaatcaactagaaaactctgggccrggcgcggtggctcacgcctgtaatcccagcactttggaaggccgaggcgggcggatcacgaggtcaggagatcgagaccatcctggctaacacagtgaaaccccgt

SEQ ID NO: 14113 - DNA, 521 bp, Homo sapiens
gactcacaggtacttgtagttagacgcttcatggtttataggaaggctgagtgctaaggggaaatgggtagcccactaagggtcaaatctatcttacctgcctcgtttctgtaaataaagtgtcactggagcacagccatgtccctttatttaggtattgtctgtggcttttagtatacaatgacagagttgaccacatgacccataaagcagaaaatatctagtatcggtcctttgcagaaacagtctgttgatcccttatatagttggtagcacaactgagatatcagaatttaggcttcttgacctccaatactgtgctttcctaattacacttgagacttgctctctccaaacttaattacaggaagagatgattttaccagtgtttaatcaactagaaaactctgggccgggcgcggtggctcacgcctgtaatcccagcactttggraggccgaggcgggcggatcacgaggtcaggagatcgagaccatcctggctaacacagtgaaaccccgt

SEQ ID NO: 14114 - DNA, 445 bp, Homo sapiens
ttcagttgctattaaaactcaggcaaactatgtacttccactgctacaaatttggatatatttggatataaaattggatgtattagcatgatacatacaaagatatatgtatatgcaacattgtttatmatgttaattcttagaattagcctaagatgaccatcatagggaactggttaaattgtgaatacatacattggaatacatttcaagagtttacttaaaaggaaactgcacatttacgtgctgatgttgaaaaagtttcaaaatatagtaagtgaaaaccagtagcagcatagtatttttatataatgtaatcctgtttccttcaaatataagaatataagtatgcatacgtattcatatatatttttgtaaacatatgggatatttgaggaaagatacatacacaaaaatattaacagtggaattttggatcaggcaa

SEQ ID NO: 14115 - DNA, 445 bp, Homo sapiens
ttcagttgctattaaaactcaggcaaactatgtacttccactgctacaaatttggatatatttggatataaaattggatgtattagcatgatacatacaaagatatatgtatatgcaacattgtttatcatgttaattcttagaattagcctaagatgaccatcatagggaactggttaaattgtgaatacatacattggaatacatttcaagagtttacttaaaaggaaactgcacatttacgtgctgatgttgaaaaagtttcaaaatatagtaagtgaaaaccagtagcagcatagtatttttatataatgtaatcctgtttccttcaaatataagwatataagtatgcatacgtattcatatatatttttgtaaacatatgggatatttgaggaaagatacatacacaaaaatattaacagtggaattttggatcaggcaa

SEQ ID NO: 14116 - DNA, 547 bp, Homo sapiens
ttttcttaataaacttgctttcactttactctgttggctcactcttaaattccttcctgcgtgaagccaagaacccacatggcctcccagctaaaccccaattttggggtttgccctgtgacaagtaggagcgatcatgtatcattttttatcagtggggtctttgtgacccttatgttgcaaaatcagtcctgccaaattgctgtctcacrcttataagtgagaacatgtgtatttagttttctgttcctgtgttaatttgtttaggataatagcctccagctgcatccatgttgctacaaaggacgtgatttcattctttttttatggctgcatagtattccacggattatatgtttcacattttctttatccaatccaccattgatgggaacccaggctgtttccatgtctttgctattgtgaatagtgcagtgataaacatgcgagtacgtgtgtctttttggtagaatgatttgttttcttttggaaatagtaatgggattgctgggtcgaatggtggctttaagttctttgagaagtcacc

SEQ ID NO: 14117 - DNA, 547 bp, Homo sapiens
ttttcttaataaacttgctttcactttactctgttggctcactcttaaattccttcctgcgtgaagccaagaacccacatggcctcccagctaaaccccaattttggggtttgccctgtgacaagtaggagcgatcatgtatcattttttatcagtggggtctttgtgacccttatgttgcaaaatcagtcctgccaaattgctgtctcacgcttataagtgagaacatgtgtatttagttttctgttcctgtgttaatttgtttaggataatagcctccagctgcatccatgttgctacaaaggacgtgatttcattctttttttatggctgcatagtattccacggattatatgtttcacattttctttatccaatccaccattgatgggaacccaggctgtttccatgtctttgctattgtgaatagtgcagtgataaacatgcragtacgtgtgtctttttggtagaatgatttgttttcttttggaaatagtaatgggattgctgggtcgaatggtggctttaagttctttgagaagtcacc

SEQ ID NO: 14118 - DNA, 544 bp, Homo sapiens
tgggggtaatgaaactgttctggaattagatactggtgatggaggcacaactctacaaatatactaaaaataatgggatagtacactttaaagacttaactatatggtatgtgaattatacctcgacacccctgctatttttaaaagataaaaaaagaaaaatagtaagcaaaagatgataaacatcayggaagaaaacttactatgagcatcactcttatataactgatttttacctcaacaaaattaaaatagcacagactttaggacctaagaccaaatataatcaattatcacaacaaagcagcagacaaaaacaggtgtctctccagtcacaggaaaccatcacagaagaaatttaaaagcattagaataatttgagaattataatcataatgatgagctgagtcacactgaataaacaaaaacccatgagtccataacaataataaaagaagaaatggcaaaacaagacacaaaagcaatcttctagaggctaaggttgtgcccggctcatttttggggttggtttgttggttggttg

SEQ ID NO: 14119 - DNA, 556 bp, Homo sapiens
tgtccaccaaccttactatcatatgcagagcctgaaactgagcttagacatctctatgtcagtgattccccaactctagtgcctgtcagaatcacctggggaatctattcataaagcagatttccaggcaaccagcctccagagaggctcagccattagggctggagtggggcccaggaacctgcaatggtgacatgtgcttgcaggtgtatctgatagagttgggcccaagttactttctagtctaccccctttgattcttgaggctcagagtgggtaggtgactttccaatttcacagagctaatggacatcagaattcaggtgaaaacctaacccaaggtaggctggcgatgttagggctggctagatgcagggcagaggacaatttgaagaggcccaagaagaacctcacggagaaagatgccaccatgtttgaaatcccattagatgcacacwcctctgggccttgaaaacttttgatttcccagagtcccctcttaatatgttaatttttctggggtggaagcgtcctatgttattgcagtgggcacatt

SEQ ID NO: 14120 - DNA, 896 bp, Homo sapiens
tgattggctgcctggctytgaagcctggttctatcatttactagctatatgacccctgagccaattatctaaccttctgtgcctgtgttctcatctctacatgaaattattcaagtagctagttcatagtgtcattgtaaggattgaatgtgttgatacatgcaaaactttaaaaacagtgcctagcacattttaaatgatcaacaaaatattatgtagtatttgtgtttgttgaacaaatgtcagcacaatgcagaatgtctctgtgagaggtaatatattaaatggagagtaatcagacaaaggggtaaagggagtttttagaataattcattttttttccttgtttaggtcagtatccatagcagaaggcagagtggtagaaagaaataatattagtattggaaccagagagacttgggttcaattctcagcttcaccttttaatttctgctctctagacagggttaagtaaaaaaaaaacaaaatgatatattgcttggtggttttatcaaagtagcaacatgcctaagagtcactcttactttcgaaatatgatttgttttgttgtttttcagcaaaaccattcattattgcttcaagtttaaattatgcccgaaacattgggctttcatttttaacctctctttgcttcagtttctctatttgtaaaatggggatagtgcctacctcagagagcacttgtgaggattgaattgatgtgtgtaaagcacttagaagaatgcctggtatgtggtgggaacactaggcatttgctttcactgtcattattctttgaacttcatctttgatttttcttgactccctccaatataatcacatatcctactttctctacctcataccagctacccttcccaatttcctgcttgtaa

SEQ ID NO: 14121 - DNA, 896 bp, Homo sapiens
tgattggctgcctggctctgaagcctggttctatcatttactagctatatgacccctgagccaattatctaaccttctgtgcctgtgttctcatctctamatgaaattattcaagtagctagttcatagtgtcattgtaaggattgaatgtgttgatacatgcaaaactttaaaaacagtgcctagcacattttaaatgatcaacaaaatattatgtagtatttgtgtttgttgaacaaatgtcagcacaatgcagaatgtctctgtgagaggtaatatattaaatggagagtaatcagacaaaggggtaaagggagtttttagaataattcattttttttccttgtttaggtcagtatccatagcagaaggcagagtggtagaaagaaataatattagtattggaaccagagagacttgggttcaattctcagcttcaccttttaatttctgctctctagacagggttaagtaaaaaaaaaacaaaatgatatattgcttggtggttttatcaaagtagcaacatgcctaagagtcactcttactttcgaaatatgatttgttttgttgtttttcagcaaaaccattcattattgcttcaagtttaaattatgcccgaaacattgggctttcatttttaacctctctttgcttcagtttctctatttgtaaaatggggatagtgcctacctcagagagcacttgtgaggattgaattgatgtgtgtaaagcacttagaagaatgcctggtatgtggtgggaacactaggcatttgctttcactgtcattattctttgaacttcatctttgatttttcttgactccctccaatataatcacatatcctactttctctacctcataccagctacccttcccaatttcctgcttgtaa

SEQ ID NO: 14122 - DNA, 896 bp, Homo sapiens
tgattggctgcctggctctgaagcctggttctatcatttactagctatatgacccctgagccaattatctaaccttctgtgcctgtgttctcatctctacatgaaattattcaagtagctagttcatagtgtcattgtaaggattgaatgtgttgatacatgcaaaactttaaaaacagtgcctagcacattttaaatgatcaacaaaatattatgtwgtatttgtgtttgttgaacaaatgtcagcacaatgcagaatgtctctgtgagaggtaatatattaaatggagagtaatcagacaaaggggtaaagggagtttttagaataattcattttttttccttgtttaggtcagtatccatagcagaaggcagagtggtagaaagaaataatattagtattggaaccagagagacttgggttcaattctcagcttcaccttttaatttctgctctctagacagggttaagtaaaaaaaaaacaaaatgatatattgcttggtggttttatcaaagtagcaacatgcctaagagtcactcttactttcgaaatatgatttgttttgttgtttttcagcaaaaccattcattattgcttcaagtttaaattatgcccgaaacattgggctttcatttttaacctctctttgcttcagtttctctatttgtaaaatggggatagtgcctacctcagagagcacttgtgaggattgaattgatgtgtgtaaagcacttagaagaatgcctggtatgtggtgggaacactaggcatttgctttcactgtcattattctttgaacttcatctttgatttttcttgactccctccaatataatcacatatcctactttctctacctcataccagctacccttcccaatttcctgcttgtaa

SEQ ID NO: 14123 - DNA, 641 bp, Homo sapiens
tgaaacagtgatgctgttaagtggcttatgacctctgaattcaatattatccttcagctcttcaagttctcttcccttcattgaagacccataggcattttcaaataaatctgttgcaaagatagaatagaaggtagaatataatggctggtatatcagaaagacatgtcacttcagaccagttatttaaaaaaatttttttaaacaaaaagtaacaacaatcacattcagagactaaaattgaactagaaaaaatttgaattttacatataaataygatttatattatttagaaatcaaactgctagtacaagtgtcaaagaattctaagaaaaaggatatacaaactctgagcctgcctttataaaaactatagtgctaacaaagccttaccctaagcaaaacataccttataaaaagtttatctagaatgctttattcatagtatacctctaatcaatatttgaataagtttcaattcattattacagggaccagaagtccttagaaatataatattcctcctacccttttcacacaaagattaactttcaaacctaacaagaaactatgccttactaatattaaaatgtcaacataacattggcttcctatccacataacacaatggcaccttatgt

SEQ ID NO: 14124 - DNA, 541 bp, Homo sapiens
aagaagaatacaagcgcttttgtggctctaatcaatcacttttgactcctgctgatacctgagactgaaaaagacactggatgatatataggacaccatgtgagatacattttttgtgtctctgtcaagacagtgaactacaaaataaatgatattggggcaagtttaatgtagttctcaattaactgtttccaaaggaaagaattaaaagaacaaaaatagacaaagcataaaragtcttcttttagaaaacatttgtcaaagacaatatatcttttgaatatatttctctgatcaattgctgagtaaagcaacctgcattccaacaaaaatataacacagaatacagccacacatactgtctgctgtatataatcaattctgccttccaatacaaggttttcagggaacttcacttactgacatctcaaagatggcagattagagctaaaggtcacgctcttcttttgaaaaaagggtctgcttatgtaccatagttaaaagggattatcaaaataaatttaccttgcaaggatgtgtg

SEQ ID NO: 14125 - DNA, 541 bp, Homo sapiens
aagaagaatacaagcgcttttgtggctctaatcaatcacttttgactcctgctgatacctgagactgaaaaagacactggatgatatataggacaccatgtgagatacattttttgtgtctctgtcaagacagtgaactacaaaataaatgatattggggcaagtttaatgtagttctcaattaactgtttccaaaggaaagaattaaaagaacaaaaatagacaaagcataaaaagtcttcttttagaaaacatttgtcaaagacaatatatcttttgaatatatttctctgatcaattgctgagtaaagcaacctgcattccaacaaaaatataacacagaatacagccacacatactgtctgctgtatataatcaattctgccttccaatacaaggttttcagggaacttcacttactgacatctcaaagatggcagattagagctaaaggtcacrctcttcttttgaaaaaagggtctgcttatgtaccatagttaaaagggattatcaaaataaatttaccttgcaaggatgtgtg

SEQ ID NO: 14126 - DNA, 533 bp, Homo sapiens
atttccctgatgattagagctgtagatcattttttcatgtacctgttagatatctctatgtctttttgattatttgcccatttttacttggattattattattatcattataactgctgttgagattcttatatattctggatatttactccttgccagatggatagtttgcaaatattttcttccattytgtatactgtctcttcactctattgattgtttcctttactatacagaagtttcttagtttaatattgatatgatcccatttatgtatttttgcttttatttcctatgcttttgaaatcctatccaaaaaatctttgcccagaccaaaatcatacagcatttcaccaatgttttcttttagtagtttcttagcttcaggtattacagttaagtctttaatcagtttttgagttgattcttctatatgctgagagacagggttctagttttattcttctgcagaataaaggataataaataataagggtctagtttataccgaagaatctctctcaacatataca

SEQ ID NO: 14127 - DNA, 515 bp, Homo sapiens
tgggattttcccattttctacttttgcttcaagtgtgttcgtatgtttccctgaagccccttttgttcatggctgctttgaatttttgtcagacaattttaacatttatgacacctctagtttatggtatcgtgagtgatttttaatggaaatcataatatttttatattctattttgagactcagggtcttctttatactgtttaatttarctgatattttctgacacacttcaacagtggaaggatgtggggctgaatgtccaagttcccaataacctcctttgccatcacaagggaggggttgttcttcctgcaagcctgggtgggcactctggcttctcctgggggctccattgtcccactggtggggtggcctcactgctgctgggcaggtgtgaaattcctgattctctaccaggcctccccatccagaagcaagggggaggtgtgtacctcatgactggtgcttggggtggaagttcaggctcctcatgtggtcccccgatcttgggt

SEQ ID NO: 14128 - DNA, 515 bp, Homo sapiens
tgggattttcccattttctacttttgcttcaagtgtgttcgtatgtttccctgaagccccttttgttcatggctgctttgaatttttgtcagacaattttaacatttatgacacctctagtttatggtatcgtgagtgatttttaatggaaatcataatatttttatattctattttgagactcagggtcttctttatactgtttaatttagctgatattttctgacacacttcaacagtggaaggatgtggggctgaatgtccaagttcccaataacctcctttgcmatcacaagggaggggttgttcttcctgcaagcctgggtgggcactctggcttctcctgggggctccattgtcccactggtggggtggcctcactgctgctgggcaggtgtgaaattcctgattctctaccaggcctccccatccagaagcaagggggaggtgtgtacctcatgactggtgcttggggtggaagttcaggctcctcatgtggtcccccgatcttgggt

SEQ ID NO: 14129 - DNA, 566 bp, Homo sapiens
tcaaaccttggcccaggagtgactcagtaatgtaggaattccsggttgtatggcatgcagagaggaacagaatgggctggcagcttgcccaaggtcacacagcccagagtaaataaaacccagctgccaccacccctagtctcatgctctggccccgtcctgaggctgctttctgtctggtcaccctggggacttcctgccccaatcccaagctgtgctggtgactgtggcatggcctgagtgtgaagtggctgtgatggtgagacctgaaatagtcctcccttgccgccagacgctggcatgaagaatagcagcttcacagaggtttgatcaatagatattatgcgaatgcttagagcaataacattcctctccattaccaggctaacactcccagtaaaaagtatgccttgatcctgatggttttatattttctggtttgtcagactgagatcagggtctaactgatgcctatatgaaagcataacaggtacatgactggcagaggtccaactcctttttctctgaattagaggcccttttgctgtgagctggcaagagctcca

SEQ ID NO: 14130 - DNA, 521 bp, Homo sapiens
gcttgatcaatgctgatattagaagactctgatgcgttcttcagtatctcaattgcattttaaccccagaatttctgcttgatttttaataattatttaatctatttgttaaatttatgtgatagaaytctgaattatttgtctgtgttatctttgaatgtttttgagtttcctccaaatagctgttttttggtttgagtggcagctcaaatatttgagatatttgaaatattcaatatttcaatacaaaatattgaatatttagcattctttgactaaaaggtcacttatctctgtttttccaggactggttcctggtacattatttacttcatttggtgaggtcatgttttcctgcatgttcttgatgcttgtggatgttagttagggtctgggcattaaatagttatttatagtagactttgcagcctcggcttatttgtattcatccttcttcagaaggcttttcagttatttgaaaggacatgggtgttgtgctctaaggcatatctgcattaagt

SEQ ID NO: 14131 - DNA, 521 bp, Homo sapiens
gcttgatcaatgctgatattagaagactctgatgcgttcttcagtatctcaattgcattttaaccccagaatttctgcttgatttttaataattatttaatctatttgttaaatttatgtgatagaactctgaattatttgtctgtgttatctttgaatgtttttgagtttcctccaaatagctgttttttggtttgagtggcagctcaaatatttgagatatttgaaatattcaatatttcaatacaaaatattgaatatttagcattctttgactaaaaggtcacttatctctgtttttccaggactggttcctggtacattatttacttcatttggtgaggtcatgttttcctgcatgttcttgatgcttgtggatgttagttagggtctgggcattaaatagttatttatagtagactttgcagcctcrgcttatttgtattcatccttcttcagaaggcttttcagttatttgaaaggacatgggtgttgtgctctaaggcatatctgcattaagt

SEQ ID NO: 14132 - DNA, 873 bp, Homo sapiens
tcccaagtcactttgatgtggccttgccgtggggacrgtcggcccctcaggatcttggcaagccaaagcagtcttgttgggtgaagccaagagcacaattaagaaatttaatttgcagactcacagttagctcacttaagaaaactttccatgcatcctctaatcatagaaataggttcagcgtttgtcagctatggggctgtgctcttaatcttctcattctgctcacttctccccaacccagggttccccaaagtttggtcctgaaaccaccagcagcacctgagaacttgttagaaaggcacattcccaggccccattccagaacccctgaatcagaagctggagtggggcaaggtaacctgagttgcagctagctctccaggggattctgcatactgggaccattgaggaagccttgaagggtactaatgctctgtccccagccccagaggccctggcttaattagtctgggatgaggctgggacacagggatttttcaaaactcccatggtgattctaacgtgtagctggggtgacaatgactgcttttgagagctttgcacagtgggggcgatgtgatctggcacatgttgagatagatgtaaatttcttacacagaggggggtgtctgtgcagtgccaatgtctactttaagatttacctggataattattcaatacaaattcctggcttccaagcccaccaaatcaaggaaagagcctgagaaattgcagctttttaaattaaactagtgccccaagacagatgatacttatcatcagagagttggggacactgtggttctcaacagaggacactagaggctgggaagggtaggaggaaagagaggatagggagggatttgttaa

SEQ ID NO: 14133 - DNA, 873 bp, Homo sapiens
tcccaagtcactttgatgtggccttgccgtggggacagtcggcccctcaggatcttggcaagccaaagcagtcttgttgggtgaagccaagagcacaattaagaaatttaatttgcagactcacagttagctcacttaagaaaactttccatgcatcctctaatcatagaaataggttcagcgtttgtcagctatggggctgtgctcttaatcttctcattctgctcacttctccccaacccagggttccccaaagtttggtcctgaaaccaccagcagcacctgagaacttgttagaaaggcacattcccaggccccattccagaacccctgaatcagaagctggagtggggcaaggtaacctgagttgcagctagctctccaggggattctgcatactgggaccattgaggaagccttgaagggtactaatgctctgtccccagccccagaggccctggcttaattagtctgggatgmggctgggacacagggatttttcaaaactcccatggtgattctaacgtgtagctggggtgacaatgactgcttttgagagctttgcacagtgggggcgatgtgatctggcacatgttgagatagatgtaaatttcttacacagaggggggtgtctgtgcagtgccaatgtctactttaagatttacctggataattattcaatacaaattcctggcttccaagcccaccaaatcaaggaaagagcctgagaaattgcagctttttaaattaaactagtgccccaagacagatgatacttatcatcagagagttggggacactgtggttctcaacagaggacactagaggctgggaagggtaggaggaaagagaggatagggagggatttgttaa

SEQ ID NO: 14134 - DNA, 505 bp, Homo sapiens
gcgtgtttctaattttctttactgctagaataatatttgtataacaaatatcttatcctgaatgttcttgtttataacttttgatgggaccctatagtgtttaagataagatttaaaatcttaagcttaacccatgagacccttcattttcagactcatctttgtgccagaacgattctgaatgtcttgttgttccttccacgtctcatgctatttctaccttctttataaactcctaagtgcctggaacattctccccctcttattaactgccctttgtttccataacatcctgtggaaatcctctttttataatttatcacactatactgtaatcaatagtgtttttaagttttctgttacataaaatccttagggatataaaaatgctttattcaagytgtattcttagcaccttgtacagtgtctgacacattgtaggtagtttagtaaaaatttgttgagtaaatatgtgcgtgaataaagagatttcaatgttgaaaaa

SEQ ID NO: 14135 - DNA, 516 bp, Homo sapiens
cagagtgtgaaggaaagcagaagtcaaaagacagacctggccagatgcagtggctcacacctgtaatcccagcactttggaagtccgaggtgggcagatctcgaggtcaagagattgagaccatcctggccaacatggtgaaaccctgtctctactaaaaatacaaaaattagttgggcatggtggcgcgtgcctgtagtcccagctactcaggaggttgaggcgagagaatcacttgaaccagggaggcagaggttgcagtgagctgagattgtgccattgcactccagcctggcgacagagcgagacactgtcaaaaaacaaaacaaaacaaacaaacaaacaaaacaaaacaaaacacagacctgctgcacaaaggtggcctgggggagccttgaggcagcctcaaaggatcaggatgtataattacatggccaagatggaaaccagagacgtgtagacagaaggaaatgtttggtcaatgggaggggccaggttktaatgggaaccttgtgt

SEQ ID NO: 14136 - DNA, 1385 bp, Homo sapiens
tcctaccaattctattatttctgttaatttagtaactagtaaacctcgttttccactctgtgaagtgacaatccccctggccatgagctcttttatttcaggactctaatttgaaacatttcaatcacctctgaaagttgcaaaatgatccacatgctgatctcccagaagctatgtcataatgcagatgtgctacactttgcaagtagaaacagaatgttaaaagatcagattacctttcttcttggaaacctacattaayacctaagatgttacttaggttagcttttattttgctggaggctctcaggggtgccgctgctggttggcaacgccattaagtaagttcaagttgggaatggaaggttaacaacagtctctgtaatagaaatgtagacaaaagataatctaagtttctagctttcaagggattcatggcggtagctgactgtgagctctcagtattaaatctaataaagtcctcgggcagagcagtggtggggttgttacctttgagaaatgacactctggttttccacattttgagtcagaaataggcacactggaagactcttctattttaagggaacatgaactgaaatcaagatttgtaataattttttggctctagcgtttataaatgatcatttccaatataaaaatcttgaatgaaaatacgataatgaaactgcttcttcttatttattttccaggtcataaactggcacagacactgacgtaattttgcaactgcacttcatcaaaccaaacttctttttcctaactcagttttctctcaagcgaacagtgtcatcacaggaagaggctctaatgtaagtgctgctaatgactttagatttaatttgaatataaagtagaatattagtttgagaagaagcaccttgtaacgtgcaaagtttgaaggtgcagttaacttggaaagttctagtttcagttcactttctcaagttgcccttcacagatttcctttcagttgttcctacttcctccagaataatgtcatgttcattgaaggatttctttggtcattttatctttaggaagagctaaacagaaatcacatattccttgacaaggtcttaccatactcactacactgtcctgcattcaaaatctttgctgttcatgaagaatttgcattacatgaacttttcttcctatcgaattatttaaaaaaaatagaaaccagagacaaatgagaaagatagcattcttaatctaactgaagttttttagaagtaaaaaatatataaaccaaaaaaatttaatgaccactagcagcaaaaacagcttgtgttaaacactaacaccattaaaccactaaatagaaagaaaatcgccaccatctctgggtaaatcaggtg

SEQ ID NO: 14137 - DNA, 1385 bp, Homo sapiens
tcctaccaattctattatttctgttaatttagtaactagtaaacctcgttttccactctgtgaagtgacaatccccctggccatgagctcttttatttcaggactctaatttgaaacatttcaatcacctctgaaagttgcaaaatgatccacatgctgatctcccagaagctatgtcataatgcagatgtgctacactttgcaagtagaaacagaatgttaaaagatcagattacctttcttcttggaaacctacattaacacctaagatgttacttaggttagcttttattttgctggaggctctcaggggtgccgctgctggttggcaacgccattaagtargttcaagttgggaatggaaggttaacaacagtctctgtaatagaaatgtagacaaaagataatctaagtttctagctttcaagggattcatggcggtagctgactgtgagctctcagtattaaatctaataaagtcctcgggcagagcagtggtggggttgttacctttgagaaatgacactctggttttccacattttgagtcagaaataggcacactggaagactcttctattttaagggaacatgaactgaaatcaagatttgtaataattttttggctctagcgtttataaatgatcatttccaatataaaaatcttgaatgaaaatacgataatgaaactgcttcttcttatttattttccaggtcataaactggcacagacactgacgtaattttgcaactgcacttcatcaaaccaaacttctttttcctaactcagttttctctcaagcgaacagtgtcatcacaggaagaggctctaatgtaagtgctgctaatgactttagatttaatttgaatataaagtagaatattagtttgagaagaagcaccttgtaacgtgcaaagtttgaaggtgcagttaacttggaaagttctagtttcagttcactttctcaagttgcccttcacagatttcctttcagttgttcctacttcctccagaataatgtcatgttcattgaaggatttctttggtcattttatctttaggaagagctaaacagaaatcacatattccttgacaaggtcttaccatactcactacactgtcctgcattcaaaatctttgctgttcatgaagaatttgcattacatgaacttttcttcctatcgaattatttaaaaaaaatagaaaccagagacaaatgagaaagatagcattcttaatctaactgaagttttttagaagtaaaaaatatataaaccaaaaaaatttaatgaccactagcagcaaaaacagcttgtgttaaacactaacaccattaaaccactaaatagaaagaaaatcgccaccatctctgggtaaatcaggtg

SEQ ID NO: 14138 - DNA, 1385 bp, Homo sapiens
tcctaccaattctattatttctgttaatttagtaactagtaaacctcgttttccactctgtgaagtgacaatccccctggccatgagctcttttatttcaggactctaatttgaaacatttcaatcacctctgaaagttgcaaaatgatccacatgctgatctcccagaagctatgtcataatgcagatgtgctacactttgcaagtagaaacagaatgttaaaagatcagattacctttcttcttggaaacctacattaacacctaagatgttacttaggttagcttttattttgctggaggctctcaggggtgccgctgctggttggcaacgccattaagtaagttcaagttgggaatggaaggttaacaacagtctctgtaatagaaatgtagacaaaagataatctaagtttctagctttcaagggattcatggcggtagctgactgtgagctctcagtattaaatctaataaagtcctcgggcagagcagtggtggggttgttacctttgagaaatgacactctggttttccacattttgagtcagaaataggcacactggaagactcttctattttaagggaacatgaactgaaatcaagatttgtaataattttttggctctagcgtttataaatgatcatttccaatataaaaatcttgaatgaaaatacgataatgaaactgcttcttcttatttattttccaggtcataaactggcacagacactgacgtaattttgcaactgcacttcatcaaaccaaacttctttttcctaactcagttttctctcaagcgaacagtgtcatcacaggaagaggctctaatgtaagtgctgctaatgactttagatttaatttgaatataaagtagaatattagtttgagaagaagcaccttgtaacgtgcaaagtttgaaggtgcagttaacttggaaagttctagtttcagttcactttctcaagttgcccttcacagatttcctttcagttgttcctacttcctccagaataatgtcatgttcattgaaggatttctttggtcattttatctttaggaagagctaaacagaaatcacatattccttgacaaggtcttaccatactcactacactgtcctgcattcaaaatctttgctgttcatgaagaatttgcattacatgaacttttcttcctatcgaattatttaaaaaaaatagaaaccagagacaaatgagaaagatagcattcttaatctaactgaagttttttagaagtaaaaaatatataaaccaaaaaaatttaatgaccactagcagcaaaaacagcttgtgttraacactaacaccattaaaccactaaatagaaagaaaatcgccaccatctctgggtaaatcaggtg

SEQ ID NO: 14139 - DNA, 1385 bp, Homo sapiens
tcctaccaattctattatttctgttaatttagtaactagtaaacctcgttttccactctgtgaagtgacaatccccctggccatgagctcttttatttcaggactctaatttgaaacatttcaatcacctctgaaagttgcaaaatgatccacatgctgatctcccagaagctatgtcataatgcagatgtgctacactttgcaagtagaaacagaatgttaaaagatcagattacctttcttcttggaaacctacattaacacctaagatgttacttaggttagcttttattttgctggaggctctcaggggtgccgctgctggttggcaacgccattaagtaagttcaagttgggaatggaaggttaacaacagtctctgtaatagaaatgtagacaaaagataatctaagtttctagctttcaagggattcatggcggtagctgactgtgagctctcagtattaaatctaataaagtcctcgggcagagcagtggtggggttgttacctttgagaaatgacactctggttttccacattttgagtcagaaataggcacactggaagactcttctattttaagggaacatgaactgaaatcaagatttgtaataattttttggctctagcgtttataaatgatcatttccaatataaaaatcttgaatgaaaatacgataatgaaactgcttcttcttatttattttccaggtcataaactggcacagacactgacgtaattttgcaactgcacttcatcaaaccaaacttctttttcctaactcagttttctctcaagcgaacagtgtcatcacaggaagaggctctaatgtaagtgctgctaatgactttagatttaatttgaatataaagtagaatattagtttgagaagaagcaccttgtaacgtgcaaagtttgaaggtgcagttaacttggaaagttctagtttcagttcactttctcaagttgcccttcacagatttcctttcagttgttcctacttcctccagaataatgtcatgttcattgaaggatttctttggtcattttatctttaggaagagctaaacagaaatcacatattccttgacaaggtcttaccatactcactacactgtcctgcattcaaaatctttgctgttcatgaagaatttgcattacatgaacttttcttcctatcgaattatttaaaaaaaatagaaaccagagacaaatgagaaagatagcattcttaatctaactgaagttttttagaagtaaaaaatatataaaccaaaaaaatttaatgaccactagcagcaaaaacagcttgtgttawacactaacaccattaaaccactaaatagaaagaaaatcgccaccatctctgggtaaatcaggtg

SEQ ID NO: 14140 - DNA, 651 bp, Homo sapiens
atgcttagcagcataatattcctgtcatataggtatagaaaagaacatttcaataattgtaattgtcagaataaatgactctctttttagatgaagggcttttcttttccaagtttttttttttttttttttcaatcaactgagtttcaattaacacagcagcaggacaaattagctgaagggttttttcaaccagaagcatacatatctaagctgagctgcagctctaaacttcttcattttgtaggtggaggatgggttaattgcttttaattagtctaattacgctaagtgggcccaatatttgtctgtgtgttgcttrtaccagggacctgaaaacctcaaggcaaaatttctctcatcatattatttctctctgcaattccttgcccttttattctcctaattggctactgagcactgcttctataaccctgttggaccaaagaacatggagacacatattcagtgatttccactatatttttctcttcacattagaagaacgtctttgttcttccagcatatggctccctaccagaaaggtcatttcccatgatggtatctgctcgttacttcttctctctggggcctcttccagccaccctatttagcattgacacctacccaccaaccgtctacctcttttta

SEQ ID NO: 14141 - DNA, 651 bp, Homo sapiens
atgcttagcagcataatattcctgtcatataggtatagaaaagaacatttcaataattgtaattgtcagaataaatgactctctttttagatgaagggcttttcttttccaagtttttttttttttttttttcaatcaactgagtttcaattaacacagcagcaggacaaattagctgaagggttttttcaaccagaagcatacatatctaagctgagctgcagctctaaacttcttcattttgtaggtggaggatgggttaattgcttttaattagtctaattacgctaagtgggcccaatatttgtctgtgtgttgcttataccagggacctgaaaacctcaaggcaaaatttctctcatcatattatttctctctgcaattccttgcccttttattctcctaattggctactgagcactgcttctataaccctgttggaccaaagaacatggagacacatattcagtgatttccactatatttttctcttcacattagaagaacgtctttgttcttccagcatatggctccctaccagaaaggtcatttcccatgatggtatctgctygttacttcttctctctggggcctcttccagccaccctatttagcattgacacctacccaccaaccgtctacctcttttta

SEQ ID NO: 14142 - DNA, 532 bp, Homo sapiens
tactgcaagacaagggtgacatgaccaccatatttaatgtcattacattaatgaatgattcttatgggccaaagaacaccaactcttgttttttaaaaaattataatatcctgctaagtaaataagaaaaaaacctattttttaatctgtgactcattggtaaattgaatggctaaattatattttggtgggagtacaattgtaggttgccaaagaaatgtgggttatatgcttaagcatagaaatattaatgggcatgcttgtgtgcaatgaaaaatgatattaaaaaatgggtaagtgttcagcatattttgtttcatttgcaacatgagtaaaatcacattgttcttctgaagccaagcacagctaaaggcaagaggcacagataaggtggggctgtgatggggaacactctgctgtcatgctttaaggaagtttctggcaaacagagaatgtatgttaagtacctgcagtggccyatttcatagagacaccatataaagagtcctgcaaagcaaaactgacttatgta

SEQ ID NO: 14143 - DNA, 542 bp, Homo sapiens
tgaaaatagtcttcacattatgccaaagggcataatgggcactatagctgcctgttgccttgtggagttttatcaataatgtagctaataaacagatgttttgtgggtaaccacactgtgttataggttatctaagaactcatacctttgctttgacttccaccagcattcacgaattaagaaaacctcaggggagaggggaggtgttgtatgaaatacagcattctcatttgtcaccaaaattactgacttttgaagtcagtaattatttttattgtgtttatttgttttcaagaaaataagtgggagaatcttacaatgacttctgagtcctctgtcttaaggatacctcttaaagggtcaattaagatatgtatttcatagtagttgcttaaaagatgactaacaagtttttttttwaaaaaaaaaaaatatgttaaccattttctgtggccaactgcctgaaaagcttcagattgctttatatttccaaccaacactgactggcatttactcttagtaagcagaagttgtcacaaacg

SEQ ID NO: 14144 - DNA, 576 bp, Homo sapiens
atgtgcttgccaaaagctagttagcatttggataacttccaaaggttgctggtgctctaatggacttggtctgtggagtagcaggggttagactggatgcaattattttctgtaactgcgactggcgcctaggctgggccaggggaaggaagggagagcagagggcagtgagtgtgagatagcacttcctgctgtgtctttcccaggcgcagctgccacagcccagcagctatgatgtgtcagctcctcttctggcctgtgttaaggaaggggaaataaacgcttttgagacctgtttctgttgcccataatggtaccattactcacttgcagatgtggcccacatcttccttgccasctccaggggtaatcttccaccccccccattgctcaggtctaagtgttctgagaaaataaataagagctgccagggtttgttggagacccactatgaggaagcaaagcctttctcaaaatctagaaataatttgtgtttctagtcagtgacacagagactcctctgaggattaatcaccatttcttaaagtagaaagaacatggtactttaataaaatg

SEQ ID NO: 14145 - DNA, 536 bp, Homo sapiens
ttctcttttccttcacttgggaagacagaaaatacacatggagagtcatgcctcagggatacactaagagccctayttatttttcacaaatattaaaaggtctctcagatgttgacttctgtaagaaatctattttaatgcaatacatagatgatttgcttctctgcttagaggataggcaaacctctatagaggatgagattcacttgttataaccattagctctaaagggacacaaggcctcaaaacaaaacacattagttttgtcacacaaagatatttgggtaatttaatatcaaaggaaggtcttttcatccacctaaacagtatattggccttccctgacccccaaaactataaaacaactaaaaagatttctggggtgacaagatactatcagaattaaatttcaaacttctgcctaaaaactcagcttttatatactcttctgaacaagataaactagaacccctgaaatggactaagaaaaatcagttaacattgaaagaagttaaaaaaagctttataaatgcccc

SEQ ID NO: 14146 - DNA, 536 bp, Homo sapiens
ttctcttttccttcacttgggaagacagaaaatacacatggagagtcatgcctcagggatacactaagagccctacttatttttcacaaatattaaaaggtctctcagatgttgacttctgtaagaaatctattttaatgcaatacatagatgatttgcttctctgcttagaggataggcaaacctctatagaggatgagattcacttgttataaccattagctctaaagggacacaaggcctcaaaacaaaacacattagttttgtcacacaaagatatttgggtaatttaatatcaaaggaaggtcttttcatccacctaaacagtatattggccttccctgacccccaaaactataaaacaactaaaaagatttctggggtgacaagatactatcagaattaaatttcaaacttctgcctaaaaactcagcttttatatactcttctgaacaagataaactagamcccctgaaatggactaagaaaaatcagttaacattgaaagaagttaaaaaaagctttataaatgcccc

SEQ ID NO: 14147 - DNA, 536 bp, Homo sapiens
ttctcttttccttcacttgggaagacagaaaatacacatggagagtcatgcctcagggatacactaagagccctacttatttttcacaaatattaaaaggtctctcagatgttgacttctgtaagaaatctattttaatgcaatacatagatgatttgcttctctgcttagaggataggcaaacctctatagaggatgagattcacttgttataaccattagctctaaagggacacaaggcctcaaaacaaaacacattagttttgtcacacaaagatatttgggtaatttaatatcaaaggaaggtcttttcatccacctaaacagtatattggccttccctgacccccaaaactataaaacaactaaaaagatttctggggtgacaagatactatcagaattaaatttcaaacttctgcctaaaaactcagcttttatatactcttctgaacaagataaactagaacccctgaaatggactaagraaaatcagttaacattgaaagaagttaaaaaaagctttataaatgcccc

SEQ ID NO: 14148 - DNA, 536 bp, Homo sapiens
cacggcaccactgggaccgcacagccgcacagaagcgagacgcacagagtctcccaccctctctgcgttctccaacccggagcagtgcccctcttcataccaggtagcagtttaatttctagcattaatccctaaagtttagccagctcaacccagttagccagaggatcccagatgtcaaaaagccaggggcataaacaggcgcagggaggaaatgcacccggggaggcgagygcctgttctgccctgggatggatggtgggccgtgtctccagggccgctgcagccaagcctccatcatcgctgcagggccaggtgagtgccctgaagctcctcacgagaaacacaggcggaggcacctgtgaggacgaagggccggaaggggccttccacgaggcacactgttcaccaggggctctgctcacaatgcggcttgttagcgtcaggtttcaggagagaagggtatccgtgagcccgggtaacgaaggaagacttatctcactaaggaagctggaagtttctcacaatgaatcctg

SEQ ID NO: 14149 - DNA, 1455 bp, Homo sapiens
tcaaggcaacgtatccgattaatatcttgaacctttaagctataatcgtttatcgcccccatcctaacaggttcatttttaccttttaatctgaagtcattctgtaagaaaatgctattattaaaaacaaaagcacttaccaattacggtgtcacctctaaagggcattttggaaagtgacaacttttctattaaaacacacactggaaaaaaaaaaaaaaaggatagacgcaatgttacttttcyaaaagcgcctgccacagcggcttgcctttgccacattctgagttgtgtgcggccagctcctgcccctcacccgcccaacctaccctgctgccagggctggaaacatcccagaaccatttcagaaccaccatgagaagcccaagacgcctcctccgctgagcagcctgaagaaagtgctgcagacccagccacgtggcagaaggcccatgtgtgagcccacgtgcacttcagagaagccgggccggcctgtcagggagctgcagacgtccctgtgacaggctgtacgggaagcatagcggcttctgctcctagacctgtcactcaggacccaagcgacagacagccatcacctgcaatgctccagaccacaggtcatgcctgtcacttccccacatagctcgtcactcacactctccatgaccagaaacgtggccctgaccagccacgagggggccaggacgcacgagacagagacgactggacagcatcagcagctcccacggccacacactgctctagctcccaccgtctctacctaacaacggaacccactcgcagacgcctgctgcacacttgttcatggtatttgctatttctcctgagggactaaactctccttccattttttgtcaccgtgaacaaggaggcctgaccgtgctacagatgcggaggccgtcggtccacctggcgtccctgcacacaggacagggaccacacacacacttcccatcgtcacagatactgccactcatcaaactgaacagaccagacaactcctgttccacgagagaccctgctctgtgtctgtcagcaccaagattcttcagtgccaaccgcagccgactggaaagaggaaaacggtcctctcgatgtgaagtaacctggtacttccatgcctccgaggtgaggccggcaccctcaccgtccacggccacgtgagtctgctcctcttctgcatgaaatgcccacacgtctgctctgccccatttcatactggatcctttacctcgtcacaggcagttttacaatttagtctttgtacactaattaactttttaccttttcgactgtagaacagacgtttattctcaatctccgttttccctaccaacctacacatggtctattcttcaatataaggcccaacataattatctccttttgtttctaccttgtggaattattatgataaaatctgttagctgggga

SEQ ID NO: 14150 - DNA, 528 bp, Homo sapiens
acaggcatgagccaccatgcctggccttgcgcagaaccttttcatctttcgaactcattctacaaggctagcattaccatgatacccaaaccagataaggatacaacaacaaaaaagaaaactacaggccaagatcactgatgaacatagatgcacaaatcctcaacaaaatactagccaactgaattmaacagcacatcaaaaagatcattcaccatgatcaagtgggtttcaccccagggtgcaaggttgattctacatatgcaaaccaataagtattgaaatgatcacatgatttttgttctcagttctattaatgttcttgattctgttaatgttctgttcacattgcagaaaaagcatttgacaaaataatttcagtagctgctgaaaaagcatttgataaaattcagcatacctttatgatacaaaaaaccttcaataaactgggtataaaagaaacataccttaaaatagtaagggtcatgttaattccctgagtgaattcatattaattcactgagtcat

SEQ ID NO: 14151 - DNA, 1611 bp, Homo sapiens
tgcataaaagataataaaatgaaaacatactactcataagccttggtcactgacatgagcatatttggaatgaaaaattattgagaattgcaagaccaggtatgttcctgtcagtgtcatttaataaaaagaccataacattttaaagtacagaatgttgatgaatggggctatcaactcttagtaacgatccttccataacttgaaaatgcaaataaacttctttcaagacctaagtttagactgaaggccctctaaattatgttcctgtatttccttgtactatcccatgatattaaagctcagtcttgaagatacagtctccaaagcatgaatatccacgccactgaactcagatatctcacttgcttttccctgagttcaaggccctgattttgtaggtgaggtacacgcccagaggggctacatgtcctaccctaggctcaacaactcaatgaggatttaggtagtcacttgatacttctcccacatacttgcagatgaacctgcacttagtaatacatcgctttaccctcctaccccttacatttaagtcacttcatgcttttcactattgtacattcattttaagttcaatcacacaaagcggtgcagtgagacaggttttaatattcacatttgacagagaagaaaagagagtcccaagcgatggaggaacttgccggtgatcatgcggctgtgtcagtcagctccggctgctgcaacaaaataacataggctggggggcttcaacaacagggatttatttttcacagttcttgaagcctgggaagtccaagctcaaggtgccactttggcccctcagtgatggacctcttcctggtttgcagatggcggccttcttgctgtgttcgcacatggaggagggaggtgagggctgaggttgggggtaggggacagagagtgtgagagaaaagcaagctctttggtgtctctcctaataaaggcactcatcccatcatgacctgctacctccatgacctcatccaaatccgattacctcccaaaggccccatttacaaataaccatcacactggggttcagcgcttcggcacacacattaggggtggggacaaaattcggtccatagcaagagccaaattcatgccagttccagaactagtatcagcacccaagataactgggttcaataacactgggcaaacatttatcgaggactgcactgtgaggggcactgcggcatgacagacccaagtcttgtcagtgacctgagagaggtatggaataactagggagcgagtrccacagtgggaaacatccctctgagcaatcagaagcgatatttcagccgactgagccgaggaacagtgaaaacgcttccaacaggcagatgttggggagaggacattgcaggcgcagaagagtgttaggaagggctgtgaaatggaaaggtgtcgtcttggaggaatcgggcagagccagtttacccacagggaactgggcatgtaggggagagtggtgcagaataaggctggaaaatcccgagttcttacaggcgcactcgtctactccgcggacagtctcttcctttctattgtcagcgtcctgggggtagggttgtgttatgc

SEQ ID NO: 14152 - DNA, 530 bp, Homo sapiens
taattttttttttttttttttgtatttytagtagagatggggtttcactatgttggccaggctggtctcgaactactctcctcaagtgatccgcccaccttggcctcccaaagtgctgggattacaggcatgagccactgtgccaggccttcctatttgttaaatatctaatattcttagttctttatctttatatatgaagaaggtggagctcagagagattaagcaaattgccaaaagctgtaagtggtaaatccaagctttggagctaggctgtctgattccaaagacgactctaatacaaatatgtgcaaatccagcccaaggcctgtagtatttatggtaactcacttaaaccaagcccaagtatcatttctttaaatggagactaattgctatataaatattcctgaagaatactctttttatgcttgggtcagcaaaaatcatcatatagctagtgtatattcgttgaaagaaaggtgaaatattaaatttttaaaaatgagcaattgcttgtgtatcaggcc

SEQ ID NO: 14153 - DNA, 1368 bp, Homo sapiens
aataaaattaaaatatccgataattcaacaaagcactcatatataagaacaaattctgccatgcacccttttggcaatagtggttccacagattcctgtattctaacaacccgagtgatgtctgatgctggcagcaggtggcagcatgtggactgaggtctccacttagtctcactagatctgcaggaggctggccgcctttcaaaaggcccgctaaaaaaaaaaaaaaaaaaaaaaaaaaaaattggcccaatggcccttaaattcacccataaagcttcaaggttgagacaggtgttgccttacagaatatgttgctgatgctgaatgcggtgtgaatgccggtgagactgttgtttgaatgtgatcacccctactaagtcagcatagctgcagggcacatgagacagaagtgggtgggacttgcaggactggttcctcctaccttgtcactcaccacagtccactgaccttcacataaagcaccagcagtcacccaggctctcaggaccccagcttcctcacctgtaaatgaagcagctagaccagatgaataataataatgatcataataatggctcatatgcactgactgttgaccttgtgccaggcactgtgcattccctcctgtagtctcccacatgctgctgtggtccgttgatgtatacagctgatcccaagcctaactacaacctctgcacctcgggcttcggcaaacctctgatgcctgtcagtttgagataatgacttcttgatctgtacatataaacattgttgtagggatgaggctgatgatgaaggcacatgcgatagatgtttttacgtaatttggatatgaaccttttttataggggttggctaaggtagtaatgatgggtaagattaaggggattagggttattatggtagtggaaaaatacatgtttgctacttttatttggagttgcatcaatgtttttggttcctaagaccaacggatgactctaatcctttcaaagttgagaaagccatgttgctaggcatgggggcatgagttagcagttcttgtacactttctcggtagataagaagttgcaggcttctattgttagattcacaatctaatgttttggttaaactataagtgatagcaagtgacaggctcctgwaggtgaggaaccagacatcaaggagaaaaacaaccaagcatcggactaagtactttacatgctgtttttccttcataacaattcaaaaaggttgctgtactcatccacaatctagcaaaagagcaaaatgaggcccacaaaggttggatatcttacccaaagtcaaataagacatggctctgtggtgatcaaacaatagcttgaaggaggacagttctca

SEQ ID NO: 14154 - DNA, 533 bp, Homo sapiens
ccaaacatctggatgttttttctctagtgccaartatataactgtgtggaagaatgttccagttttggcatttacttggcatccttatatacactcttcaaccggacgtaccatgtcacctgaggaactccagaaatttgggtcaaaaagatgtgtatttctgattaggtttaattcttaaaactgtaaatataagctatctgaatacataagcatttggcaatattctgtagattctaacagcccctctctctatgttggcgtcatgtccaggaacattttagatatactaccataacattttctaaatgactgtattataatttaatgttatatttggcaaacacaacctaaaatacagtagctaatagtgcaagctcattttacttgcatatcattgtaaatcactttcatgtagtacttaccaaatgtgtcaggttattacaatctatttaatgacttaatgtgtaagatgcattgttcttaaattcaattataccctttgcacctctggaattaaggtcatgtcagca

SEQ ID NO: 14155 - DNA, 531 bp, Homo sapiens
ttcaaaggcatctgaatgatttgattttttactcccttaactaccccctaccccaccccaatttgaattatctatataggaagtttcccaaaagatactaacttgaaccaacctgataattgttttattgcttattgtaaaacaatgcacttcaaaacatataatgttttcagattttaaatcaatcctatgatttcattacaactttacaattgtgaaattacrtggtttttcacagtttcacaaatatagtgaacattgaaaagtaagctgagaaaatcattgtatgaatgtaatgaatatatttcatgatgtaaagacatgtatacaaacttggagctaaatatatttatcaaatggagagggaaagcaaactcactcttaatatttcccctaagtcttctaagtttcatctggggattctgcagaatcttctcaattacttattttaaaaaattaaaaattctgtctccagagaaccaacgggcagcattcttaagtatatgtcttgctctttgcatatatatataa

SEQ ID NO: 14156 - DNA, 554 bp, Homo sapiens
ggctttttgctttctatgttattatttttattagtattattatttcagatttttttttgtcttgcctagggccttggcctcctcttcgatacccatgtgtgtggtcgatattatcctgactactggcttccttagatcagctaaaatatacttcctgcccactttatcccatgccatcagttacattccagatatttggacacagagagacttctctggccccatttcctatttggtccatgttcatatttagcctcatctgtagatgtccatgcccaagtgctgctgggtgagtggaaatcatagccttcttactcatgtactgtccaaagtgctagcaaagaataattggtgatggcataacaggcctctgagctctttatcaagagcccaggttcaaatcgtccttctgtgcatttttttgcagcttttattttattggatttgaaaaaaacatttgacatcaatgatccatttttgaaacaggctgttttctttccatctttgacatratttgttttcttccacttgtcttaccaatccttctcaggctt

SEQ ID NO: 14157 - DNA, 554 bp, Homo sapiens
ggttttgactgagtaagcaagacaatagataacaagtgtgccacacaaatcaaattactataccatccatccacaacttgcaaaggaagggactataaaaaattagccrggcctggtggctcacgtctgtagttccagctacttggaaggctgaggttggaggatcacttgagcccaggaggccaaggatgcagtgagctatgatagcaccactgcactcatgagagtggggaatagtggtccccacttctctcttcaaataggccattcagagggccctacgtgtgaaccctggagtttgctgcaaacgagtggactgatttctgacatgcacctgagacatttagggtgagagggtttgattgtccacttgaggtagcagaacagaaaaatacacactgggctgcactgggatggggagctggatgtgggtaaggttgtgcaaatagttttcatgaggcagaagctggcctgagggatgaagagagttaatctggagctattttgcaatctgctcaaaagcattgcctcagacggtggaccaacagattact

SEQ ID NO: 14158 - DNA, 553 bp, Homo sapiens
ccttcctccatctttttgttctattccagccctcaactgattgcatgatgcctgcctgcactggtgagggtgatctttactgagtccatggatttaaatgctaatctcttctgcaaaaactctcacagacacatccagaaataatcttgtatcagctatctggggctcccttagtccagtcaagctgacatataaaattaatcctcacactcaccaggctaggtgaggaagaggaggaattcagggcaggaattaatgaccatgtgttccttcttctactaccagtttctaaagcaggctcaagctggtgagggggcagttttaactttccaacaagttccatttctctacgattttattatcrtgttcatgtatactataaaacaagactattcttaaaaaattgtactccaaaatataacattgtttattttattttttagagacatggtatcaccatggagagcagtggcataatcattgctcactgtgcagccttgaactcttaggctcaagtgatcctcctgcctcagtctcccaagtcgctcaggtg

SEQ ID NO: 14159 - DNA, 533 bp, Homo sapiens
aacagagccaaaggaatggacagagccagaggaacagagccaaaggaatgaacagagccaaagaacagagccraaggaacccactctcccagccaaagaaagtggtgagtgattgtgcgaccctgcccgggaagccatgcttcctcctatcgatctttgccacccgtggatcagtagatccccttgtgagcccatgccatcagggcctagggtctgatacagagagctgtgtggagtctcagcagagcacccactcaggcgcatacagagacccaggagttttacatactctggccttggggtccctggaaaggtgggagatccatctgtacataaccgtaagaaggggattaaatccaaggagtcattagcatcgttctgtgagtcccatttccacagcacttcacaagttaaagcccactggcttggaattccagtcagccaatggcaacaggctggggtccgcctgagacaagacaaagtccttgagggaagggacagccaccatgtctgcagttcagttgactcagtca

SEQ ID NO: 14160 - DNA, 501 bp, Homo sapiens
gtaatcccagcactttgggaagctgaggcgggcagatcacctgagatgaggagtttgagactcgcctggccaacatggygaaacccagtctctacaaaaatacaaaaattagccgggtgtggtggcacacacccataatcccagctaccagggaggctgaggcacaagaatcacttgaacccaggaggcagaggttgcggtgagcagagatcccaccactgcattccagcctgtccaacaaagcaagactctgtctcaaaataaataagtacattattcctgattataactatttcctcaattctaagatttttttttttttgcatttcagtatttctgaaatcagatgatctaaaaattaattaatgaagtattatttctcttctccccctgaaaagctatgataaaatcaatgatgtattttataattgatggtatcttaacattaaggcaatatagtgatgagaataactgttggccttcagaactcaatttttcagt

SEQ ID NO: 14161 - DNA, 514 bp, Homo sapiens
tcccagaattccacatggagataatgagttctcatttcatgtttagaaagagttggaggaggcagaggagaactgcatgcgtgtgggcatgggcsggggggacctctgatatagaaaaatgaaagatgattttgttttttctgatcaggaccaaagaccaagctattagatatttccttaagtgcttttttagtgtggatttggagaaataacttggagggatgattgctctctgcccccacttgtacagttcttaaaatgctggagttggtttttgctattgaaaaaggcaggcagcagcccccagaaacctcctgagggtgcagatgaggcaggggccccagcagacccccagctgatggacacagtgtctccccttttgggcgtggcctgctaacaatgacctttctggaaagcctttgattctggcaagtgtcctcaggcttcctggtacctgtgactgagaagagtcacctggtgagaaaaacaatgttttctctggtccagtgacagc

SEQ ID NO: 14162 - DNA, 583 bp, Homo sapiens
ttcagttcattacttctaatataaacacccggtatgcccagtgttttgcatcagctgactgtctttacacaaaccgaacatgtgcagggccttgggcctttgtctctgaagtcggtttaatgactagggcaaagtgagatgttttgtctgattaaaggctcagctcttcaaagccataccttcttccatttgggaaacgacaatgtttatggttcccgtgcccagttggtggatggatggagtgggtaatgagcaaatctctgtgcctgaaaatascagtcctggttaaaaaaaaaaagagaagaggtccactggcccatatgctgggcaaatcgcccctgactcttccatataatggaagcccaatggcatataagtccttattgccttattgggtgctatctatcaggcacaggcaccagttgcatgagtaaaaataaatgcaaaggcatgctgcttgtatttttaaagtatttctaattttaaaagtaacatgtttattacagaaatttgaaaactacagaaaaacaaaaccaagaaaaatcacccatgatcttggaatctagggatcaacctattattg

SEQ ID NO: 14163 - DNA, 347 bp, Homo sapiens
tgttgcattctgtttttcatagttttaattcacaagtccatcatcagtctcagcttctttgaaggcatttatctttttagtttggctgctttatccaccaatgtataaatgaataaatagatatgatatctatctatatatatacacatacaatggaatattagacataaaaataataaaatttggttatttgcaggagcatgaatggaaattgagatcattatgtaaattgaaatatgccaagcaaagaaggacagctattgcaaggtctcatccatgtgtgggatcccagaggctggaaagggcatgtgggagaggaaatggagaggagttgattmatgggtaca

SEQ ID NO: 14164 - DNA, 535 bp, Homo sapiens
gttggatttttttagaaggattaattaagagtatttataaggtggggcagaaaaggacaaccccaaattcacagttctaagtcagtccaggattttcacttcatggctcctcagatcacagtcccttcccttttggttcattcataaacactcccaccttcctgtctgccttcccatccygctccgaaacaaaacatttattaactgaagcttccaactgtgacagaaattacagtcatgttaatggtacagatggtgtaaaaaatgcaatctaaaaacatgattaaaaaactcaggagctaggtaagccaagttcatctcagatatggctgaccagacatctatgaggaaggaaatacacttttttggttaattagtttgcttttatccatccccgtaattagaacatgctttccgcctacttaatcctaaaacagtcattagatttaataaacctttctagactgccacaaatgagaaaatgaattagttaaaaagtaagcattaagctgtactagcaatatgatcataacat

SEQ ID NO: 14165 - DNA, 566 bp, Homo sapiens
ttttctgggtagcttaattaaaatgactggcaagttgatgttggctgttggcaggcagcttaaggttttccctgctggagtccctccatgggttgtttgaatgtccttatgacatagcttgcatccaccaaagcagcggagtcaagagaaaagaagaagacatytcttctatgacccaaccttgggacccatccttagacccaccaatatttcttccacattctgctctttaaaagtgattcactaagcccagcccacattaaagcagagaaagattaggctctgcctttggaaggaggaagtgccaaagaatttgtgagcatatttaaaaactactacaccatatttctgtaatggctaagttttatgatatccatatcttccacaaattgaggtggattgtcaatgtttgtctttaccattctcaaaatgtgatcagaaggccaccgagagaggcaaggttcctcagttacataaaatggtctcaggttggacgatattatctggattttcatgctgtgtgtttctgtcctagcttcccaaattggctgttatacttaatagaa

SEQ ID NO: 14166 - DNA, 566 bp, Homo sapiens
ttttctgggtagcttaattaaaatgactggcaagttgatgttggctgttggcaggcagcttaaggttttccctgctggagtccctccatgggttgtttgaatgtccttatgacatagcttgcatccaccaaagcagcggagtcaagagaaaagaagaagacatctcttctatgacccaaccttgggacccatccttagacccaccaatatttcttccacattctgctctttaaaagtgattcactaagcccagcccacattaaagcagagaaagattaggctctgcctttggaaggaggaagtgccaaagaatttgtgagcatatttaaaaactactacaccatatttctgtaatggctaagttttatgatatccatatmttccacaaattgaggtggattgtcaatgtttgtctttaccattctcaaaatgtgatcagaaggccaccgagagaggcaaggttcctcagttacataaaatggtctcaggttggacgatattatctggattttcatgctgtgtgtttctgtcctagcttcccaaattggctgttatacttaatagaa

SEQ ID NO: 14167 - DNA, 592 bp, Homo sapiens
ccaaacttgatctgatgatgaatatatatatatatatatatatatatatatgtatatcttacaatgttgtatatggaaagtcatgtttacataaaaggcctgaatattacagactcagaaaaacaaaggcatgagtgaagaagagaagtcttgaaataaagagacaaagaatacctgatagcaatagaccagctgtccctcaaaaaaagacttcagtcaatagcacatctttgaggattttttcagaaactagttcaattagctattaaacctctcctgaacttttcagtagtaatttttcacttcttcctattactcaagacaaagtgagacaaatagcctaaacaggaaaaaaaaattctattagcaacacttactaataaaatcaagaacatagaacttttctcttaaaaatgaactatatatttttcagatcctgacttcagccatttattatttttatttaagaacaaagtgtacagagtctgaagaatgcagacatgtgtacaaatggctcaggaaccacatatataaattcagagattaaatccctttagygtttcatgtatttgtgctcacgtaagtcaataaa

SEQ ID NO: 14168 - DNA, 489 bp, Homo sapiens
cttttatttttaagctcaatgaaatagaaataaaaactatctttcaattaaaaagttcaattaaaaaatatattttttggtttttttttgtttgtttttgagaaagagtctctctctgtcacccatgctggagtatagtggcgtgatcatggctcactgcacccttgaccttcctgggctcaggtagttctattctctcagcttcctgaatagctggaactccaggtgtgcgccaccatgtcccgctaatttttctattatttgtagagacagggttttgccgtgttgcccaggtaggtcctgaactcctggcytcaagcaatcctcccacctcagcctcccaaagtgctgggattacagttgtgagtcacagtgcctggctaggaagtaattttatttaaaggaaatttagcaagataaaaggggacaatagagagaaaaagaaaggagctcaagcattggaattgagagaagatttataatggatgg

SEQ ID NO: 14169 - DNA, 489 bp, Homo sapiens
cttttatttttaagctcaatgaaatagaaataaaaactatctttcaattaaaaagttcaattaaaaaatatattttttggtttttttttgtttgtttttgagaaagagtctctctctgtcacccatgctggagtatagtggcgtgatcatggctcactgcacccttgaccttcctgggctcaggtagttctattctctcagcttcctgaatagctggaactccaggtgtgcgccaccatgtcccgctaatttttctattatttgtagagacagggttttgccgtgttgcccaggtaggtcctgaactcctggcttcaagcaatcctcccacctcagcctcccaaagtgctgggattacagttgtgagtcacagtgcctggctaggaagtaattttatttaaaggaaatttagcaagataaaaggggacaatagagagaaaaagaaaggagctcaagcattggaattgrgagaagatttataatggatgg

SEQ ID NO: 14170 - DNA, 477 bp, Homo sapiens
ttgggtgaataattcaacagcagagcttctttcttcactgggagaccagcccttccctctgggctttgcactctccagtgtctcccagctggccccttctttgcaccccctctctagttcacaggmctttaccctctctttcttctaggatccaatacactcaccagcctcaactgttttcctcaccaccagctgtgcacagtcaactttcgtccacaccattccctaatcacaatcctgatccgcagctcctgtgcctcctaatattaattacagacggccacttcatttaggagtgtaattgctttcagtacttaacctttctgcagttcaagtggggtgcacagagaaatgctcaacctcaacgcgggcctgggaaccccacagagctctgtccaacacgtataaacctctgtgagagctccatgttagagaggggtgtggagagacatcaatagtcattcagcctctaatggg

SEQ ID NO: 14171 - DNA, 565 bp, Homo sapiens
cacccatctctggactgtgttgaaaattttgaaaaccaacaataacaacaactttgctacaaggaaaactctttttgataaaaatagttatcagttacaatattgttttatttgcatgaaattctggtttatgcaggaatccacacctacagaactcgtgcccaggtatgattcagccactaagagggctcacgttcactttgattacttagtttatatcttttttatttgattgaaagttgcttcccataaagaaagaaatttgcatgcagcgaccaaaggatcaacccagttacctgatccttyccattaagagtttacttgttttacgttgtgttgttagactctgtccattagtgggaatggttctgggcatcctctctggacttgggcttatatttcaggctcatggctgcttgagtgagctgtttatgttcagtgttaaggaagtctgtgaagagatgtttttcccccataaccttctgatacaatcatcgacacagaaacccaatgccatttttaggagaaagttggagtaaagtaaacactcaaagtggtttcagga

SEQ ID NO: 14172 - DNA, 566 bp, Homo sapiens
gggattatcaggggccctgctgacactcacctgagattgcagagtcctggggaaagagatgggctacagtgactgggccaatgagcagctgggtgggctgggaaggagttgcctgtgaccagggccaggtagatacrggcctgcccaagggcatgctctggggttgaggggacccctcagaaaaagactggacatagccactggatgcccagaggcggacggaatttttctttctttctttttttattatactttaagttctgtgttacatgtgcagaacatgcagttttgttacataggtatacacatgccctggtggcttgctgcacccatcaacccatcacctacattagggtatttctcctaatgttacccctagcctcctacccaataggccctggtgtgtgatgttcccctccctctgtccatgtgttctcattgttcagctcccgcttataagtgaaaacgtgcagtatttggttttctgtttctgtgttagtttgctaaggatgatggcctccagctcaatccatgtccctgcaaaggacatgaactcatcgtttttt

SEQ ID NO: 14173 - DNA, 566 bp, Homo sapiens
gggattatcaggggccctgctgacactcacctgagattgcagagtcctggggaaagagatgggctacagtgactgggccaatgagcagctgggtgggctgggaaggagttgcctgtgaccagggccaggtagatacaggcctgcccaagggcatgctctggggttgaggggacccctcagaaaaagactggacatagccactggatgcccagaggcggacrgaatttttctttctttctttttttattatactttaagttctgtgttacatgtgcagaacatgcagttttgttacataggtatacacatgccctggtggcttgctgcacccatcaacccatcacctacattagggtatttctcctaatgttacccctagcctcctacccaataggccctggtgtgtgatgttcccctccctctgtccatgtgttctcattgttcagctcccgcttataagtgaaaacgtgcagtatttggttttctgtttctgtgttagtttgctaaggatgatggcctccagctcaatccatgtccctgcaaaggacatgaactcatcgtttttt

SEQ ID NO: 14174 - DNA, 543 bp, Homo sapiens
tctggagaaccctgactaatacagtacccttaagcaaggagctaaacatgtacctggctcagtatctaaagaagttgatggaagagatccagtggatctggggagrgctgcaggaccagttattgccttgccattaggatgagccatcagatcatagtatgtgtgagctgcaacggtgcttcatgccttgctttgacctgagcataaaaagaatgcggttgctactctacttcccttttctaaatctcatgcaaaacatttttggtagcccacactagcttggatctatgtaggaaagggaattcttagaaatgttgttccagcttaactaagttggctcaatacaaattcatcacaaacataaccaccatgaattataacattggcaggattgtctcatgtttgttggtgaagcagaatgttttcttaccttttcttatgtgttatctttgtttccttcttcccacatgtggcagccagataggtgcactgtttggttcatcctttaagaaaaattgccattcagctgtgagaaggacagtc

SEQ ID NO: 14175 - DNA, 543 bp, Homo sapiens
tctggagaaccctgactaatacagtacccttaagcaaggagctaaacatgtacctggctcagtatctaaagaagttgatggaagagatccagtggatctggggagagctgcaggaccagttattgcyttgccattaggatgagccatcagatcatagtatgtgtgagctgcaacggtgcttcatgccttgctttgacctgagcataaaaagaatgcggttgctactctacttcccttttctaaatctcatgcaaaacatttttggtagcccacactagcttggatctatgtaggaaagggaattcttagaaatgttgttccagcttaactaagttggctcaatacaaattcatcacaaacataaccaccatgaattataacattggcaggattgtctcatgtttgttggtgaagcagaatgttttcttaccttttcttatgtgttatctttgtttccttcttcccacatgtggcagccagataggtgcactgtttggttcatcctttaagaaaaattgccattcagctgtgagaaggacagtc

SEQ ID NO: 14176 - DNA, 508 bp, Homo sapiens
gacacaggataccctctgagagatctcctctacagagaaggaaatgagagctaatgcaatcacacagtggtgatgtatttgataaggtcacagaacagktaccccataatatgagaagttttaggatgcagctaaaatagagcatatgggtggggacttttctcaatttttttaacacaaagattttcattttatttttacatggaagcaagtaagcacttgtgtgtcattctaaatacatacataaatcctaaatttatattctaagtttatatattctatatataaattcttgataaattccatttatatctataatgtatattctagatttgtttatatgtgtatctcacaataaaatttataattagtactttttaatacactatagaaattcatattcacaacagttttaacaattctttgcaattgagttttataatggtaacaactagcatttgtataacacttgatgtttgagaaataataggacctagttccacaaacc

SEQ ID NO: 14177 - DNA, 538 bp, Homo sapiens
taaaccttaaaattataattctgagtggaattggaatggatttttatttaattttaaaaataatttgcatttataatattgttcttctatccaagaacattatgtatgcctctccacatattcagattctgttcagattttaagcatggaaaaaagaaactcattttttacttatttatcttttatccagtgaactacataaattctcttattagtcatttgcttaatgactaagagaatcacttggatatctaagtatacaatagtatcatctgaaataattgtawgttcttcttcatatttatacaattaattcagttttttattttattgaattaagtagactctcctgaactgttgcaaatgaatgctgtctttgtttctattagctcagcctattattcaagctatattgaatctatatcttggattattctcaactgtttattctgttgtttagaaaagccataattgagttagaaattttaatacatattatctgtgtcttctctgagtttcatcctttctgctgtatttg

SEQ ID NO: 14178 - DNA, 1896 bp, Homo sapiens
ccattgacactgtcatcttttgctatttattttaggtaaatataatgttgtgagggcaaaacttcacctctatttccacaaaacagaagaggagcaatttatgaagctatttgattcattctcaaggagattctttcttagttaataaagatggttgcagtcctgttttgagtttctgggtgggacttttcttttcttttcttttttctctcttttttttttctttttgagatggaatcttgctctgtcatccaggctggagtgcagtggctcgatctcggctcactgcaacctctgcctcctgggttcaagtgattctcctgcctcagcctcctgagtagctgggattacaggtgcctgccaccacatccggctaatttttgtatttttagtagagacggggtttcatcatgttggtcaggctggtcttaaactcctgacctcgtgatccacccacctcagcctcccaaagtgctgggattacaggctgggtgggacttttcaatatgaaagatcttagatttttaaagtttgtcatttgcctctgctgctgtgtggagatttccattttggaaacattttgctcagcgtcaggactatgtgagctgctgcagttatgtgacctccttccctgtcccttccagagggcaaggatttctgctgggaagggctgaacagacacagccacgagctcttgcactgtcattcctcagtccctgcaggaggatgtcctagagcaacttacagagctgagcgctgctctgccccctgcagtccccggggacacgggggtggggggagcccagggctgtctccagcaagctgtccatcattgtggcgattcagaaagctgacctgagatccagctggacttcctgtgccagtaccttcccagcagcttcctgagaaatcggcaggcaccatcttcccttcccctgggaaaattaaaggagtgatccagaaagatcaagacactatgtcccctaattccctccctgttaattttcctgtgagagagaaacttctcaaagacagtgtttgccaaggaaaatcaagagggaaccttgccccatgggctatttttctaagggaaagcttagagagtatgtgaaaccacctgacttttaagcctagaaatcaaatttgaaacgtagtataagaaatgtaggatttccttaggtgaggaattatgattttattttaaacaacttttgaataagtaatgcagtcacatgggtcaaaatttaaacagatagacaataaatggtctttcatgccaccctatgctgtagccactcagtttcaaccttcttgtgtatccattcagagatctttcatgcaytcacagcacatgtatatctactcgccacttttcccatgaatggtagcacattacgtttagcaccttgctttttttcttttttttgagatggagtctcactctgtcacccaggttggagtacagtagtgtaatcttggctcactgcaacctccgcctcccaggttcaactgattcctgtgcctcagcctcccgagtagctgggattacagtatttttagtagagactgggtgtcaccacgttggccaggctggtctcacactcctgacctcaggtcctcctgcctcggcttcccaaagtgctgggattacaggcgtgagccactgtgcctggccgcaccttgctttttttcattttacagtatattttacaggtcttttgatatctgtccataaagaaccttctcttctctatggccacgtagtattctgccatgcgaatgtactattagttctctatactgtcccctatggttgggcaattattttctatggtttagctattcaaatctggactagtcactgagaacagttgggaatctgtctacttggagata

SEQ ID NO: 14179 - DNA, 1896 bp, Homo sapiens
ccattgacactgtcatcttttgctatttattttaggtaaatataatgttgtgagggcaaaacttcacctctatttccacaaaacagaagaggagcaatttatgaagctatttgattcattctcaaggagattctttcttagttaataaagatggttgcagtcctgttttgagtttctgggtgggacttttcttttcttttcttttttctctcttttttttttctttttgagatggaatcttgctctgtcatccaggctggagtgcagtggctcgatctcggctcactgcaacctctgcctcctgggttcaagtgattctcctgcctcagcctcctgagtagctgggattacaggtgcctgccaccacatccggctaatttttgtatttttagtagagacggggtttcatcatgttggtcaggctggtcttaaactcctgacctcgtgatccacccacctcagcctcccaaagtgctgggattacaggctgggtgggacttttcaatatgaaagatcttagatttttaaagtttgtcatttgcctctgctgctgtgtggagatttccattttggaaacattttgctcagcgtcaggactatgtgagctgctgcagttatgtgacctccttccctgtcccttccagagggcaaggatttctgctgggaagggctgaacagacacagccacgagctcttgcactgtcattcctcagtccctgcaggaggatgtcctagagcaacttacagagctgagcgctgctctgccccctgcagtccccggggacacgggggtggggggagcccagggctgtctccagcaagctgtccatcattgtggcgattcagaaagctgacctgagatccagctggacttcctgtgccagtaccttcccagcagcttcctgagaaatcggcaggcaccatcttcccttcccctgggaaaattaaaggagtgatccagaaagatcaagacactatgtcccctaattccctccctgttaattttcctgtgagagagaaacttctcaaagacagtgtttgccaaggaaaatcaagagggaaccttgccccatgggctatttttctaagggaaagcttagagagtatgtgaaaccacctgacttttaagcctagaaatcaaatttgaaacgtagtataagaaatgtaggatttccttaggtgaggaattatgattttattttaaacaacttttgaataagtaatgcagtcacatgggtcaaaatttaaacagatagacaataaatggtctttcatgccaccctatgctgtagccactcagtttcaaccttcttgtgtatccattcagagatctttcatgcactcacagcacatgtatatctactcgccacttttcccaygaatggtagcacattacgtttagcaccttgctttttttcttttttttgagatggagtctcactctgtcacccaggttggagtacagtagtgtaatcttggctcactgcaacctccgcctcccaggttcaactgattcctgtgcctcagcctcccgagtagctgggattacagtatttttagtagagactgggtgtcaccacgttggccaggctggtctcacactcctgacctcaggtcctcctgcctcggcttcccaaagtgctgggattacaggcgtgagccactgtgcctggccgcaccttgctttttttcattttacagtatattttacaggtcttttgatatctgtccataaagaaccttctcttctctatggccacgtagtattctgccatgcgaatgtactattagttctctatactgtcccctatggttgggcaattattttctatggtttagctattcaaatctggactagtcactgagaacagttgggaatctgtctacttggagata

SEQ ID NO: 14180 - DNA, 521 bp, Homo sapiens
tactctttagtgcattcaaacagatctcattgattgaatataagyaggttaaaagattggcaagacttgaagtccacaaatctgaaaaggtttttgaactgttctgatagcaaaagtcttttactgtatgccctatttaattcaaaccttttattcacttgaattatataaggagatattagtagatttcaatcagagaaaagactgcagtttacaaagttcaaggcagttgtcttaagatgatagaattgaaaaggcctccaaaatgtctgtcagatatagaaccttcataatctcaaacaccagattaaccctactgtcagggaaggtttaaatggccagatccaggattttatagatacttttataggtaataaatttatgataacactaaaaattatcgaattctcagatggcctcgtgtgagtttgtacctctagctggctaactaatcataacattttttttttttttttccgtgacagaatctaactctgccacccaggctagagtgcagtgat

SEQ ID NO: 14181 - DNA, 521 bp, Homo sapiens
tactctttagtgcattcaaacagatctcattgattgaatataagtaggttaaaagattggcaagacttgaagtccacaaatctgaaaaggtttttgaactgttctgatagcaaaagtcttttactgtatgccctatttaattcaaaccttttattcacttgaattatataaggagatattagtagatttcaatcagagaaaagactgcagtttacaaagttcaaggcagttgtcttaagatgatagaattgaaaaggcctccaaaatgtctgtcagatatagaaccttcataatctcaaacaccagattaaccctactgtcagggaaggtttraatggccagatccaggattttatagatacttttataggtaataaatttatgataacactaaaaattatcgaattctcagatggcctcgtgtgagtttgtacctctagctggctaactaatcataacattttttttttttttttccgtgacagaatctaactctgccacccaggctagagtgcagtgat

SEQ ID NO: 14182 - DNA, 862 bp, Homo sapiens
tcacactcaaagatttaaacgcaggttatatatttgacaaaatatatagttctcaaaatcagtctcacctcctaatattctttgaagtttcattacctraatttgttctaattttcaaaataaaaatccaaattaacagctttctttaaaacaactttttcttttcttttcttttcttttttgagactgttgctcaggctggagtgcagtggcgtgatctcagctcactgcaagcaccgcctcctgggttcacgccattctcctgcctcagcctcccgagaagctgggactacaggcgcccgccacctcgcctggctgatttcttatatttttagtagagacagggtttcaccgtgttagccatgatgatctcgatctcctgaccttgtgatctgcctgccttggcctcccaaagtgctgggattacaggcgtgagccaccgcgcccggccacaactttttctttaatggcttaacttcattcagctttacctgctaaacaataaagggaaaaatcaaagaaagaatagtcttctaggggtgacagttggtgttttagcacctgcctttatacctgggaggcagagatcacaggtggttacatctctgttgttcatttagtggaccagatttcatacataatcctatcttgcttttgtctttcactttctccaagagataagctagcaaaccttctccattgtaagagagaccaaattgaaaatttggtcacaactttactacccgagaaaaataacgttgctatgcttcctggaggagtgatagaaaatgcagtttccgagaattataaaaggtttattatttgtccagtattttaagagaaacaaaggggtctgtctctc

SEQ ID NO: 14183 - DNA, 544 bp, Homo sapiens
atgtttaggtacagaaatacttacctcatgtcacaattgcctacagtactcagtacagtaacatactatacaggtttgtagtctaagagccatacactgtaccatagtaggctataccacttaggattgtgtaagtacactctatgatgttcacacaacgatgaaatcgcctaatgacgcatttctcagaacgtatccccatcattaagtgatgcatgactatagttagatgagatcatcaaagcaattatcagatgaattatgtttaatatatgttcgtctaccaccttccctctgggccctggctggatgagcctgatgtattttttttcgttgagaaaataattcgcttgaatgctcatgaacaggcttacagtcccatttgtatcgtcttcagttaaggattagtgggcctgagaaagtgtccatcactgctgagkctgagcctatcactgtatgttgaacaccatgaaatcactggctatgaagttcttaagagaagaaagcaaacctaacacttgacagtaacatcggagttactggc

SEQ ID NO: 14184 - DNA, 640 bp, Homo sapiens
agacatcagtttgttttctacttgtgttaaaaagaaatctcatttttgtttcgctctgtatttctctgattactagtgagtttgaacattctctgcatttcattgcttattagtaactgtttcgtgggactctgtgactcgcaatctggaaagcagcagcttggtttctacagcggccaaccagcaacagaagcctggcaggtgtayacaaagttacaacaaatgtgaacaccttaattggctgctatttgtcattctagaatcaggcaacacctctttctgcaaaacagaatgagtgctccaatgagccgagcagaggaggttggtttataaacagactgaggaaagcagacacagagaacaaaatgcaggcggatgtgtggtggttccaagatgacttccccataaaggttaaagcagacgggacttcctcgtcatctgggctaaacctggcctgcttggaagttgggctgttacctctcctgattgctcagaaggtcaaataaagatcttcatttgggcttggtaccatacttcatacgggggcgtctgctgggcccagtgcaggagctcagtccaaaccagtgtcctcttatcaatttaatttcacaacgtgaaggcaaattcttccctcctcaat

SEQ ID NO: 14185 - DNA, 580 bp, Homo sapiens
aattctttctctgctgcaaaccttggtgtctattagttcagagcccccgcatcaaggatgggcacacagatatttaaatagccaacaaattgaggatctttgcttctctaaattccttaactcaaatgggtttaacaaaatgctatgttttatatagttaattgctacaaatctctttctaagacccggattaaattctgtaactttactttttggcttttggttttggctcttctgttgcttaaaaggccttcagggttagtgagtacctgctcacctccattcccacctgtcctagaatgtttaattgactctaagtattttggctctaaatcccttggccatagggtccccccccaagaaacaggatggatccagggtaggtagccacaccatcctgtcaatatgggacaaaatataagtttagacattgatgctgcctctctcagatcttggccaaaaagcagggaagataaactaaaaataaaaccttaaacctccctaccaactgaacagacccccttrtggccaataggaccctaacctcccaaacaaacccttaaaacacagttcctggcca

SEQ ID NO: 14186 - DNA, 564 bp, Homo sapiens
atttaaagagataacagttaagaactatccatgttcttgatgaaaatcatgacttctcatattcaagaaataagaattcctaacaggacaaataaaaagaaatccacatctagacacttcatagtctattaagtgtcaaggaattgcagaacccaacggataataaaagcagccagtagtaaaagacagattactcacaaaggaaaaatatttaaaagtacagacttttcatcagcaataagagaggtcagatgacaactggaccatcttcaaagtactgagagaaagcaactgccaactaaaattccacacccagataaagtataattcaaaagtgagaatgaaataatgagattttcataagaacagcagacgcatacttgcaggccctcactgaaaagcctactaatggatgcttttcaggaaaaaagaactgaacccagaggttagtagtgggatgtgagaaactatagtgaacaaaaaagttggtaaacatayagacaaatctaaagaagtattgattctataaaacaagaattatcatgatgattaatttgggggcat

SEQ ID NO: 14187 - DNA, 607 bp, Homo sapiens
tgatgagaaaacctggataccttggttgctggtgaagaattcacatacttactatggttttttttttcgatgggagcctccgaacgttgctgtttctagttggccatcttggccccgccccagaagtttcttcaacatgagtcatgtattatggagttttcctaaatttataatatggtgaagtagaaagtgtggtgaacaggcctgggtatcacaaagttagctctggcaacactgcaacccacagaaaatcayctaatttatcctttcctaagtttcctttacttctgatgtaaaataagggaacttgagttaatgatctcaaagatgttgatatggttaggctttgtgtccccacccaaatctcatcttgaattgtaatcccataatccctaggtgttgaggaagaaaccaggtagaggtgattggatcatggggacagcttccttcatgctgtttttgtgatagtgaatgagttttcatgagatctaatggttttattttattttttgagacagagactccctctgtcacccaagctggagtatacaatctcggctcctttcaacccccgcctctcaggttcaagcaactctcctgcctcagc

SEQ ID NO: 14188 - DNA, 556 bp, Homo sapiens
tcaggtcaatacagtaatcaacagtgttcactgtaatatacaataatcactaaagcaccttcatatggtgccacaaagcataccattttgaggaaatagaattaaaaatgggactttttataccagatgtaayatgacttggcaaagaaactgcacaatttttacagtaggacacaatggtgaataacttacattaccaaacacaccattaaatgggtagaatagctgtcacttctgctcagaattacatataaagagagagggtcactcacaatcttacactcatcaaaactcctattatgaactctaccactagcacatgactgatataatttataggcaaataaatatatactcagcaactcaactatcttaatcagctcattaaaaacatacagctttatttgtttatatttttaaacacatcagttctttacttcttgaataatgttataaaaatttcatacactttttgtgattttcctcttatatacagccattaataagagttgaagttttactttaaatgcccaaaccaagagaacatttgcttata

SEQ ID NO: 14189 - DNA, 556 bp, Homo sapiens
tcaggtcaatacagtaatcaacagtgttcactgtaatatacaataatcactaaagcaccttcatatggtgccacaaagcataccattttgaggaaatagaattaaaaatgggactttttataccagatgtaacatgacttggcaaagaaactgcacaatttttacagtaggacacaatggtgaataacttacattaccaaacacaccattaaatgggtagaatagctgtcacttctgctcagaattacatataaagagagagggtcactcacaatcttacactcatcaaaactcctattatgaactctaccactagcacatgactgatataatttataggcaaataaatatatactcagcaactcaactatcttaatcagctcattaaaaacatacagctttatttgtttatatttttaaacacatcagttctttacttcttgaataatgttataaaaatttcatacactttttgtgattttcctcttatatacagccattaataagagttgaagttttactttaaatgcccaaaccaagrgaacatttgcttata

SEQ ID NO: 14190 - DNA, 532 bp, Homo sapiens
attttaatgtgcaaatgaattctataggcattggtgcaagtggagaagagcattcctggactacctgaagtcacagtcatatggcagcacaatgtatcaaagattaatgcatcaaacgtcgatgagtctttttamgtatgtatgtgagtagtttaacgagtatggatacacttcttccactggttctgcttagaggaaagcttagatgactttgtgatggaatgaaataaaagaaaataaataacctgtattggaggcagtttagttattgatatctagttaataatataaggtacacctggcagcatgcactttgcttacctgaggcatttgatcttactatgtatatcagacagtataagttatgctgtgtaacaaaacactccaaatctcagtggcttaacacaattaaggtttctttctccttcatgtgatatatccaatgtgtgacaatagggtggacccaggcttactgaagctccatctcagctcatgcttaccactttagaaaaaggaagagaatgaggtgaat

SEQ ID NO: 14191 - DNA, 597 bp, Homo sapiens
gtgtcattagtctacgtatgttcttgtgaattaatcactttcagccctaactaccatagttagtaatatacatgttgtcttacagatttyccagcaccaagaattgccccttgaaataatgatagataatatttattgagtgcttaccgtgtgttaggcagattctaagtttttatatgtattatcacatataattttccatatgaaatagtacaatttttatcttcattttacaaatgagaaaattcaggcttagagaggctaagtgacttgcccaagtctttctgcctagcaaattcaaaagtagaattcacatccagtcttaaccactataccaggtcaaacctcatttaaaaattagcaagtctcatcctttctggtcagattgttacatctaaaactttagtagtgctgttttcattttattttagaacttgagtttcaggggtgggaaaaagtattctgggtttaggcctcctcagccttttattcctgtcctggagtgagagagaaccgggacttctgtatttgaatgcacagtgtcagagataaggattcccctgtgatggattaatcagagaaaatatccactaattt

SEQ ID NO: 14192 - DNA, 640 bp, Homo sapiens
tttatggacagggcattgtactaggagactcaggtgtattagattgtcttcatgaagcacaatctcctggggaaaacaaggctctctgactacagaatacgataaatgcgataatagaagcatatacagtattaaatttgtagcataaaggaggggaatggtgaggtttccttatatgagtccatgaacaatcataagatgattgtgggaaatgagaaaagatagtttgtttaattgaatcatgaagaaacatgtaagcaggatatagtagtaattattttaaattattttactgtggattaggcattaagtgcttatacttagaatttatttgattttcataactgtcttataagacaggaactatatttttcatcctactttatagataaggcaattaactcacttacactagaggtggagaaaaaccactgaagaattttaagcatgggagtgatatagtttratttgtggttttataagattactctgctagtatggagaatataacaggcaaatcaggagatgtcaagatagaccaagcaagttttgagggtagtagtggaaacagagaagagggggagactattacaagaggagttacaataaacggattttagttgttgattagatatggcca

SEQ ID NO: 14193 - DNA, 672 bp, Homo sapiens
tgggaatttattttgtgagcacttcgttattttctggcactaaaagatgctcccggcttatcctgtatatttccaacctgagtcctaggttcagcctttctcaaaaaagccctggttccttccactgaaaatggtattagaaaccaagctctgagcagtaggtatgctcattgctactggggagtcattgcttcattgcttgtaggcctgctcagttggcagaagagcaaaatatattaggtttgtgcaaaagtaattgcggttttgctgttacttttaatgtaactgtctgyatctataattctatatgtaaccatttatagatatacctctgcatatatataatgctgtgtgtaaccatctgcatctatattgagaagcatgagttcctactgaatgcttcacctctaatccattaccacatagatccttccagactcctctctttatctggaatctcccatgcctgcagtgaggagcctagcttccattatttgcttactttagttaattctttaatcccagtatacgtgtacggtggtttcagaattgttagctcatatccctagggggcacaactttatcagctagaatagagtgtgtatgtagagttcctgtgcctttagtcattcatttccaaagatacctaagccagcactttattcctcatct

SEQ ID NO: 14194 - DNA, 672 bp, Homo sapiens
tgggaatttattttgtgagcacttcgttattttctggcactaaaagatgctcccggcttatcctgtatatttccaacctgagtcctaggttcagcctttctcaaaaaagccctggttccttccactgaaaatggtattagaaaccaagctctgagcagtaggtatgctcattgctactggggagtcattgcttcattgcttgtaggcctgctcagttggcagaagagcaaaatatattaggtttgtgcaaaagtaattgcggttttgctgttacttttaatgtaactgtctgtatctataattctatatgtaaccatttatagatatacctctgcatatatataatgctgtgtgtaaccatctgcatctatattgagaagcatgagttcctactgaatgcttcacctctaatccattaccacatagatccttccagactcctctctttatctggaatctcccaygcctgcagtgaggagcctagcttccattatttgcttactttagttaattctttaatcccagtatacgtgtacggtggtttcagaattgttagctcatatccctagggggcacaactttatcagctagaatagagtgtgtatgtagagttcctgtgcctttagtcattcatttccaaagatacctaagccagcactttattcctcatct

SEQ ID NO: 14195 - DNA, 521 bp, Homo sapiens
tctagtcatcacaacactatgtgagatgggttctactgtcatctcaatttcaaagataaagacaatgagtctcaagcaaggtcactaagatcccccaaatgtattggtaggaaagtgcagggcatggacttgaatttaattctggctgaatccagtcatccactatactatattgcccctaagtttcttccactccctatgaaatcccttcccccgacagtgcatcattaaatgttcattaagraaacttttgcttcctaatatcttacaggtaaactccaacttcttaaattaggcaagaaatacaaatagatgaagattcgctacactatttgttcagtgactattataagctggatatagcaggtctaaaagagagaagcaggcttgctctttgaatacccagagtctcatttatgcactgaagccacccatgatgatgtctatccaaaagaattttcagttccctctgctcccaaccagggatgctttggggactaaatagatattgctcacagaac

SEQ ID NO: 14196 - DNA, 909 bp, Homo sapiens
cctctttttcctttaatttcagcccatgagtctaacccatcgtcaacctcatccaatatcatgtagcattttatggtttacaaagcttctccctgtggattatttcagttacttctcacagaaaccctctgagatagattaaaaaaacaaacaattcttgcacatgggccaaggaatctcttagagctaattggctgaatgcaatgtggtatatcagattggatcctggaagaaaaaaagattattagtaggaaaactggcaaaatccaattaaagtctgtgacttggttcatagtaatggactaaggataatttcttaattctgactaacggaacgcgtttctgtgagatgttgacaataggggaaactgggtgagcagtgtacggaaactctctgcaccatgtttgcaacttttcttttccttgcaaagtatccaaaattaaaagttgatcttttaaaaagctaattggaaatactttccagctgatttgaatacgttgctggagtatcactgagaaaccctggcagataaaaatatctgatatatagggagttgtgtctaccctcgcctttgcttccatattttttctttaaaaaagttatagttaatttttccactatgataaaagctcaatataggacatttggaagacatataatattgaaaggacagaaaaatatatcacctayggtcctgccacttcaaaacccccctccatgagtattttggtatatctcccctccatttcttaaagtttggttttatgtatacacacggtaggtatacagtatgcggtcatcctgtgtcctggttacgtagttatcacattctagttatctagaaattcacattcatgctgggggagggcaactttaaactcccagccatgagtcttagtgggtaccca

SEQ ID NO: 14197 - DNA, 546 bp, Homo sapiens
cagtacacctaagaataaagtagatgaagagcacataagatgcacataaataaaattgtaaaactccactgaagagcataaaaattatttttaaaatagagaaacatattttatcttagggggaaacattcaatatttcattctaaatcaaactagaattcaatagtctcagtcagatgtcaacagaacattttttggaacttgacagaataattctagagcttatctggaagaactaacttctgagaataatatgaaaaattccaaaatagaagaataatggcaaagcacttgccctggcaaacagcctgtcctggtaagagcaataatcagacgagtgaaatggaatagaaggtatacatgcaaacctgaggttagaaaagaaaatagtattgaaggatgatgcctaaaatcaatggaagaagatgaatcgctcatcaatggatgacatgggaaattttgctagtcatttgtaactctacctcaatccttacaccrtaataaattgcaggtgtatcaaatggttcaatgtaaaattgtaactat

SEQ ID NO: 14198 - DNA, 625 bp, Homo sapiens
atatattagatatatttctataattataaatatrtattagatatatttctataattataaatatattatatatttctataattataaatatgttatatatttctataattataaatatgttatatatttctataattataaatatgttatatatttctataattataaatatgctatatatttctataattataaatatgttatatatttctataattataaatatgctatatatttctataattataaatatgttatatatttctataattataaatatgctatatatttctataattataaatatgttatatatttctataattataaatatgctatatatttctataattataaatatgttatatattcctataattataaatatgttatatattcatataattataaatatgttatatatttatataattataaatatatatttatattatatatgtgtgtatatatatatgtatatatatatgtacacacctcagtctgggtcaatatgtgtctgtcatggcattttgacttgagtttgagtacataatactcttactagcaatgtcagaaggtatgggatacaaaattataatcttgttggtagatgcatttcctaccc

SEQ ID NO: 14199 - DNA, 625 bp, Homo sapiens
atatattagatatatttctataattataaatatatattagatatatttctataattataaatatrttatatatttctataattataaatatgttatatatttctataattataaatatgttatatatttctataattataaatatgttatatatttctataattataaatatgctatatatttctataattataaatatgttatatatttctataattataaatatgctatatatttctataattataaatatgttatatatttctataattataaatatgctatatatttctataattataaatatgttatatatttctataattataaatatgctatatatttctataattataaatatgttatatattcctataattataaatatgttatatattcatataattataaatatgttatatatttatataattataaatatatatttatattatatatgtgtgtatatatatatgtatatatatatgtacacacctcagtctgggtcaatatgtgtctgtcatggcattttgacttgagtttgagtacataatactcttactagcaatgtcagaaggtatgggatacaaaattataatcttgttggtagatgcatttcctaccc

SEQ ID NO: 14200 - DNA, 625 bp, Homo sapiens
atatattagatatatttctataattataaatatatattagatatatttctataattataaatatattatatatttctataattataaatatgttatatatttctataattataaatatgytatatatttctataattataaatatgttatatatttctataattataaatatgctatatatttctataattataaatatgttatatatttctataattataaatatgctatatatttctataattataaatatgttatatatttctataattataaatatgctatatatttctataattataaatatgttatatatttctataattataaatatgctatatatttctataattataaatatgttatatattcctataattataaatatgttatatattcatataattataaatatgttatatatttatataattataaatatatatttatattatatatgtgtgtatatatatatgtatatatatatgtacacacctcagtctgggtcaatatgtgtctgtcatggcattttgacttgagtttgagtacataatactcttactagcaatgtcagaaggtatgggatacaaaattataatcttgttggtagatgcatttcctaccc

SEQ ID NO: 14201 - DNA, 625 bp, Homo sapiens
atatattagatatatttctataattataaatatatattagatatatttctataattataaatatattatatatttctataattataaatatgttatatatttctataattataaatatgttatatatttctataattataaatatgttatatatttctataattataaatatgctatatatttctataattataaatatgttatatatttctataattataaatatgytatatatttctataattataaatatgttatatatttctataattataaatatgctatatatttctataattataaatatgttatatatttctataattataaatatgctatatatttctataattataaatatgttatatattcctataattataaatatgttatatattcatataattataaatatgttatatatttatataattataaatatatatttatattatatatgtgtgtatatatatatgtatatatatatgtacacacctcagtctgggtcaatatgtgtctgtcatggcattttgacttgagtttgagtacataatactcttactagcaatgtcagaaggtatgggatacaaaattataatcttgttggtagatgcatttcctaccc

SEQ ID NO: 14202 - DNA, 651 bp, Homo sapiens
gcatatattcagcaaactacattgtctctttaaaccaatctgttaaacaatctttaaaactatcttgtggttaagtaaaatttggagatattaaagaacttattcaagattgcacagattgcacaactagtcaagtcagttttcaaaatagctctaattccactatcttaacacttaaaacctatagtatacttccttctctactgcaatgactctctccttccagtccttttacagcttagaaaaagtacaagaaacagaaacccttttaawattattgttagtttgtgctttttatttttcttaaagtcgatcaaattgaactactctcatctttgattctctttagtctctttcccatatattacctcttctcaagccataatcctcaccagtacatagcaaaatccaaactttaaaatgtttgtatcatctcatcttctgcttttgggaaggtggtatagacatatttttgactattccttccaattaatactatgaaaaacattatatataacagacacatgagaagactctgaaagttggagagaagaaggaagaccagctaggcactccagtatcaaggaacggtgtaacacagtttctcggttttctttttgcctcaaatattcctgacttgggagtgaaaaa

SEQ ID NO: 14203 - DNA, 651 bp, Homo sapiens
gcatatattcagcaaactacattgtctctttaaaccaatctgttaaacaatctttaaaactatcttgtggttaagtaaaatttggagatattaaagaacttattcaagattgcacagattgcacaactagtcaagtcagttttcaaaatagctctaattccactatcttaacacttaaaacctatagtatacttccttctctactgcaatgactctctccttccagtccttttacagcttagaaaaagtacaagaaacagaaacccttttaatattattgttagtttgtgctttttatttttcttaaagtcgatcaaattgaactactctcatctttgattctcwttagtctctttcccatatattacctcttctcaagccataatcctcaccagtacatagcaaaatccaaactttaaaatgtttgtatcatctcatcttctgcttttgggaaggtggtatagacatatttttgactattccttccaattaatactatgaaaaacattatatataacagacacatgagaagactctgaaagttggagagaagaaggaagaccagctaggcactccagtatcaaggaacggtgtaacacagtttctcggttttctttttgcctcaaatattcctgacttgggagtgaaaaa

SEQ ID NO: 14204 - DNA, 537 bp, Homo sapiens
tatatacaatatgtatatctaactgtgtgaaatgtgaagtgctgtattcataattgttactctgtaccccaccttattctacaaaggatttaagacagtttacatagatatattgaataaaaggtcaaaaatatgttaaaaataaatggataccccttttcctatatatatatatatatatatatatatatatgaaaatatgtataaaaatataaacatttgtatatgtataaatacaaaatagatatatatgtgtatatatatatgtgtgtgtgtgtatactctgctgcagagggttgagtgttgtaatacaaaagttgctgttgaggtaaaagaaagcgattaatgggaaaacattgcaccatcttcatacaatcatctacctactccaaacatcgtaattatcttgattaattttactaaacttatattttgaaatcattatttcaggagatccataaaatgttcctgaacactcattttgtacaaggragtattctaaatactgctggaaaaacacaaaatgataaagatttg

SEQ ID NO: 14205 - DNA, 552 bp, Homo sapiens
aaactttgtccacccttaactgataatttattcacacatgttataattatttttaatcacctattatgtactaaatgctttcagatatataaataaattgacgttctattgaacaattgcctgtaattataacaaattcaatgattgcatgtatattaaccatcatatccctcctcctataaacattaacatattatttgctttttattgttcaaaagagacatatatcttctttcccagaggtaatggaggtaaacaagaaatagggagttaggaaaaactcaagaattaggagatatgtatgtcttttttttttttctctcctttggtaatgttttctttttccctcattaattctcaggagtctatttcaagaagackcacaaagagagattttcttaacttgggttgagaggttaatgaatttcttggattcaggaacccataaagttataatacaacattagcaatttgggcataagttacagcaaatagaaacctaatgcgaactagtttaaattagaaagggaattttttagttcatattaccca

SEQ ID NO: 14206 - DNA, 536 bp, Homo sapiens
atcactgcttttcacatacccagtacaatgtcaaattttatcagtatttttttttcaccgccgctttatccattcagcacacactttttttcttgagacagtctccctatattgcccaagctggtcttgaattcctgggttcaagtaatctcctgcttcagcctctccagtacctaggagatccagtaccaggtgcataccaacatgcccagcagcacacgcttgttgagtgactaatatctattgtacagtgtgcatctcccttgtccttcccttctmctgcatcagttgtaactaaataataatccaacatgacgggatcatttcatttcttcattcatttgctcacttcatttatctgctcattctgccatttaaaaaatatgaagcacttgtttcatgccacatgccttatagttactgtgaataaaaataaaccaaacatatagcccctgtctgggctcacaatacaagggcaatgactgacattgtgtggaaatgccttacacagagagggatatttggcaaaacgggat

SEQ ID NO: 14207 - DNA, 536 bp, Homo sapiens
atcactgcttttcacatacccagtacaatgtcaaattttatcagtatttttttttcaccgccgctttatccattcagcacacactttttttcttgagacagtctccctatattgcccaagctggtcttgaattcctgggttcaagtaatctcctgcttcagcctctccagtacctaggagatccagtaccaggtgcataccaacatgcccagcagcacacgcttgttgagtgactaatatctattgtacagtgtgcatctcccttgtccttcccttctactgcatcagttgtaactaaataataatccaacatgacgggatcatttcatttcttcattcatttgctcacttcatttatctgctcattctgccatttaaaaaatatgaagcacttgtttcatgccacatgccttrtagttactgtgaataaaaataaaccaaacatatagcccctgtctgggctcacaatacaagggcaatgactgacattgtgtggaaatgccttacacagagagggatatttggcaaaacgggat

SEQ ID NO: 14208 - DNA, 619 bp, Homo sapiens
tttttcttgcagaggtgtgggctatataggtcatggagtattctgggctttataacctactaaatttataatagacccactgggagggcattaatgaatatctggtgattgaatgagcctcaattgtgtacagttttcaagagctgtccattttgttggctgttcrtatacctggaggcccgcaaatctaggtctgaacatcccagagttgtgtctagagacctcttcgactacgaggctcctaggttggaaaccttcccgagtttgacaatcaccttcatctggagttgtcagcaccctcctaagggacctgctcatttggaaaatagcttagcatctgtgacaacctgaagagcatagacttttttatccattttattaagatatgtttaacattcttaaagtacatatttaatgtatacaacttggtaagtttggagataagtatatacctgtggaaccatcaccacgatctatgtcaaaaacctatccatccaaaagtttcctcccactttctttctttattgttattgttgttattatttgtgacaacatggataaacttggaggacattattctaagtgaaataaaccagatatataagaagcgtatcaattt

SEQ ID NO: 14209 - DNA, 619 bp, Homo sapiens
tttttcttgcagaggtgtgggctatataggtcatggagtattctgggctttataacctactaaatttataatagacccactgggagggcattaatgaatatctggtgattgaatgagcctcaattgtgtacagttttcaagagctgtccattttgttggctgttcatatacctggaggcccgcaaatctaggtctgaacatcccagagttgtgtctagagacctcttcgactacgaggctcctaggttggaaaccttcccgagtttgacaatcaccttcatctggagttgtcagcaccctcctaagggacctgctcatttggaaaatagcttagcatctgtgacaacctgaagagcatagacttttttatccattttattaagatatgtttaacattcttaaagtacatatttaatgtatacaacttggtaagtttggagatragtatatacctgtggaaccatcaccacgatctatgtcaaaaacctatccatccaaaagtttcctcccactttctttctttattgttattgttgttattatttgtgacaacatggataaacttggaggacattattctaagtgaaataaaccagatatataagaagcgtatcaattt

SEQ ID NO: 14210 - DNA, 542 bp, Homo sapiens
aagcaacgaggtgtcttgtcatagcattccaatttgaagacagcagcagaactgagagagcttttgccaaatccagtatgaagtgagttgagaagtccacagtaagataacatgaaaaggtgcagtttggcccctggaaaatctcaaaataagcaagttaggtttcctaggcataagagaaactacctacttgaaataaaaattgagtaaaataattacaatagagataaaggttaagtgaagtttcagagaaaagtagggaaaaaaacacaaccaggaaatcagaaagcaagctactacagtgttgacattacatgaaaacaataaaaggaattgagagaaattttaaaaatctcctagaaacagaccaccttccaraagtttagaagcaaaaataattttatatcaaaataagatataaaaatattgaagtcaaattccatacaaagtttttatatgaaagtataagaaaaagatactgtatggacaaactataaaatactataggtcattcaaaatgacctaaagtaaaattaaaatga

SEQ ID NO: 14211 - DNA, 554 bp, Homo sapiens
gtattacaggcatgatccaatgtgtctggctggactgggttcttaaataaccccaagtcactctctacttttgcatctacagctagacattaactagtgagtttattatattgttttaaatatgaagagctgtcatatgcaatctaactttgacttattttgtagaatctggatatatataactaggaacaataggtgaagattcaggaaaattttatttgatctcttaaagaaagaatttcaaaggtgttatttctagattttagtagtttctgtcattggtgggtttaaagaagaagctagagatgtcataaaattttacataagagatgaagggttgaaccagatgtggtctcttctgacygtgagattctatgcttccgaaagaatagaagacaggagttcattctgagaagattgaaggttgaacacgaagatgggaaaggattcaaggtagaggaagatttgagtacaaaagcatagaaactgttcctatgcaaaggtgtttaacaatcaccatatgcaaaaggatccatcgaatttagagaatatta

SEQ ID NO: 14212 - DNA, 1836 bp, Homo sapiens
tgcatgatgagatttggctttaacaaaatagatccaactgtaggagaccatcataaataaatgtggaagacctaccagtgaggcaaagcaacagagaatatgaaggaaagtctgagcaataggtcagaggcagcagcttagatacaggatagttgtgaaggattgatacagttggatataagtccagagaaaggaaggcaaaccagagaattggatttgattagtttcatagcacagtaaagtccaattataggcattttaatggggcctagaacagtcgcgggtagtgcagtaaagctactctttacagaaagaagagtttgggatgaactggaaaaagtcattttagttttcacttctttctcagggtcaaacagcatgtttcactattaagcatatgattaattctaattcatgagtagcaatttataatatagctacctatgatatagctacataatgggacctttacaggcctaacttgtatgcttaattaagataatgtttatgttgaacccagaatgctgccataaatatgtgtcactgctatagctcttgttatggcaattctaaatatgaaatttctcctaattaaatgaaacttccgtttaataaaataaacctattttgaaagttccaaatgtataaataacttttcctgttgtattacaccaagaaaaagatatagtcatgtaaaaaaaaaaagtgaagccaaaaacaaacaacatgaaagaaattattgatcaatttgatatgttataaaactaaattgtattaaaacaatataattacaaatttcaattacattacctgagttattgctaagttatttttttattattattattattattattattttgaggtggagtctcgctctgtcacccaggctggagtacagtggtgcgatctcagctcactgcaacctctgcctcctgggttcaaatgattctactgcctcagcctcctgagtagctgggactacaggcatgcatcaccactcatggctaattttcttttttgtttctgtatttttagtagagactgggtcttctcatgttggccaggctggtcttaaactcctgacctcaagtgactgttcgcctcggcctcccaaagtgctgggattacaagcatgagccaccrctaccggcccactaagttatttcataaatttaaaattatgaatccattttctcttatttgaaaacagtgcttctaaccaatatgtaattaggtaggttttcttaaaactgagatagtatattcatattgtggacatagtaatatttatccttttgtagttttgtgacctatttatcactgtgtttttaattacagttgggaaacctgtggtttccaataaaataaatgttaatatctactttttgaacttgtgtttataattgtgaaagaagcaaagatatgtttttatgctcattctgctattaattatgtatgtgcatgaaaaaaatttacttgatcgtaatgtatctctacattccttgtgttaccatgaggatagagaagatggatggtgaaaacaaaagtaaaaacactgagaaagtaggcaaagtatataagcatatcacaagattattgttactgtttgaccattactacttcctagtttggttctgccaactgtacatttctaaagttgtgctgagcaatcttaaaaatgagagcagtctctgtgtgtcttttcaaatacatttgaagatagtacagctgttatcaagaatatgatacttttatctcaaaatatttcaaatgtggcaacacatcagccactgtagtttataaaaataggaatttaatgaaacacgttgggca

SEQ ID NO: 14213 - DNA, 532 bp, Homo sapiens
taattcatttcaccctttactgataagttattgcctagttgttcaagaaaaatcttgaaacatattatgcaaaggaaacaaacaatatgattckatcacatagaatacaaaatctgaaagatggattatatgagcattcttcagttaattaattagtttgcactttgacccttaaaaatttaaagtaggtgttgaaaatattaaatagttttaaatcaattcctaaggccacagtaatcatgcataacaaatggccacaaaaccccagataactattacaatgtgtatattgctcctccatctgcagtaatcagctacgcagtactgctgttctcaattggatcaactcacatttttgcatgttagatggctgttaacatacactggggtgactgggctgagtcagctcagctcctcatctttcatcctgcaccaggctagcctggccacactttcatgactgcaagggcagaggcacaagagaaacatacattgtctttgaggcatagagcaaggatagtacacaatcata

SEQ ID NO: 14214 - DNA, 532 bp, Homo sapiens
taattcatttcaccctttactgataagttattgcctagttgttcaagaaaaatcttgaaacatattatgcaaaggaaacaaacaatatgattctatcacatagaatacaaaatctgaaagatggattatatgagcattcttcagttaattaattagtttgcactttgacccttaaaaatttaaagtaggtgttgaaaatattaaatagttttaaatcaattcctaaggccacagtaatcatgcataacaaatggccacaaaaccccagataactattacaatgtgtatattgctcctccatctgcagtaatcagctacgcagtactgctgttctcaattggatcaactcacatttttgcatgttagatggctgttaacrtacactggggtgactgggctgagtcagctcagctcctcatctttcatcctgcaccaggctagcctggccacactttcatgactgcaagggcagaggcacaagagaaacatacattgtctttgaggcatagagcaaggatagtacacaatcata

SEQ ID NO: 14215 - DNA, 569 bp, Homo sapiens
tgtgagtccttaaaagggacaggaattgctcactcggggagctcggctctggagacaggagtcttgacgatgctcccggccgaataaactccttcctttttaactcggtgtctgaggagttttgtctgcggctcgtcctgctacagagaaagagaacaagtaagaaagaaaatcagaaagagaaaggggaggaaacggcaaatatggagggccagagagagagagagagagagagaaagttaagctgctgaccctgaaggcaagggagagctggccatgcatctgtgtgtgtgggagccattggactaagcagctgagacagggtagacagtgtaagacactgtgcaggtgcactggtgcccagagaaaaagaagagagccagagctgttcatctttgcagacagaaagtggggagccagggtacagcacggctcagctcgtgcccagagagagaaagaggaagaaactgagtatgagggagaaaggaaacgggatgacagagagagagacagaagaagaaaaatgagtaaggggctrggcgcggtggctcacgcctgtaatcccagca

SEQ ID NO: 14216 - DNA, 531 bp, Homo sapiens
atgattaacagggtaattaatatccatattaatatgtattacaagcaccttgtatactttagagtacaggaaaagtaactaatttttatgttaaaaaatagaggttttcatcttcatgcatatgcaacggggtgtgaaaaataattagtgaatacagtttcgggtgaagagcagatgaaatcagctgtgaatggaaaataaatcttggggcccccaaatcactaagcaaaagggaaaattcatgctgggaactgcttaggggaaaccttcctcccattctgttcaaagtcatccctctgctcactgagctaaatgcaaatttgattgcctccgttggaaaggctagtcagaaactcaaaatgcyagccagaaactcaaaaggctagccagaatgcaaacctttttctctcacctacccgtgacctggaagccccctccctttttcgagttgactcacctttctggactgaaccaatgtacattttacatatattgattgatatttcatgtctccctaacatgtataaaact

SEQ ID NO: 14217 - DNA, 531 bp, Homo sapiens
atgattaacagggtaattaatatccatattaatatgtattacaagcaccttgtatactttagagtacaggaaaagtaactaatttttatgttaaaaaatagaggttttcatcttcatgcatatgcaacggggtgtgaaaaataattagtgaatacagtttcgggtgaagagcagatgaaatcagctgtgaatggaaaataaatcttggggcccccaaatcactaagcaaaagggaaaattcatgctgggaactgcttaggggaaaccttcctcccattctgttcaaagtcatccctctgctcactgagctaaatgcaaatttgattgcctccgttggaaaggctagtcagaaactcaaaatgctagccagaaactcaaaaggctagccagaatgcaaacctttttctctcacctacccgtgacctggaagccccctccctktttcgagttgactcacctttctggactgaaccaatgtacattttacatatattgattgatatttcatgtctccctaacatgtataaaact

SEQ ID NO: 14218 - DNA, 531 bp, Homo sapiens
atgattaacagggtaattaatatccatattaatatgtattacaagcaccttgtatactttagagtacaggaaaagtaactaatttttatgttaaaaaatagaggttttcatcttcatgcatatgcaacggggtgtgaaaaataattagtgaatacagtttcgggtgaagagcagatgaaatcagctgtgaatggaaaataaatcttggggcccccaaatcactaagcaaaagggaaaattcatgctgggaactgcttaggggaaaccttcctcccattctgttcaaagtcatccctctgctcactgagctaaatgcaaatttgattgcctccgttggaaaggctagtcagaaactcaaaatgctagccagaaactcaaaaggctagccagaatgcaaacctttttctctcacctacccgtgacctggaagccccctcccttyttcgagttgactcacctttctggactgaaccaatgtacattttacatatattgattgatatttcatgtctccctaacatgtataaaact

SEQ ID NO: 14219 - DNA, 625 bp, Homo sapiens
agcaggcccttgctgtttatttagccacagggggttttagcacctatggtttcaagccaactatgtgaacaggttatttttcttacttgtggactttgcactttttcacaggaggggctaagtggcccccagaggatcatttttccaagcaccatttgctgggccgactctgccctgctaccatggctttccatcacgcacaccactcagtgccacttggccatcgccaattcccaattcccaatttctcaacatctatgtgactcagagttatgcaggggctctgggagcccctgatgagggggagagcccacagaaccattgctcagggctcctttccaaatagagggtagacaactggcccagaaaaggaaaggctctaccagggcaaggaaaaagcaaacatcgctggcaaacagaacaaagtcagccrccgaaattgtgctcaggtttgtatcaggtagagggagggtatggggagaatagaaacagaatttgcacgaattaaagtcacacttctgttggcatgggtttttccatcccctttaagctaaaaagccctttcccccacagaataggcagcaaaagaaagcaaaaatctaacatcatccctcaattgtaacct

SEQ ID NO: 14220 - DNA, 543 bp, Homo sapiens
gttttttttgagacggagtctcgttttatcaccaggctggagtgcagtggcgcgagatctcggctcactgcaacctccacctcccggtttaagtgattctcctgccccagcctcccgcgtagctgagactacaggcatgtgccaccacacccaggtaatttttgtatttttagtagagatggggtttcaccatattggccaggatggtctccatctcttgaccttgtgatccgcccgcctcgacctcccaaaggcatgagccatcatgcccggcctcaggctgtttttaatgtgtcatgattgccttcctagtatragatctatcaagtttcagtagcacaattttaagaacaaaaaaatagggcctcagatacaggggaaaagttgtaaacctgataaacgattacttccactgacagtaaagccccacgcccacttctctcagactgaatcgcaagggtagatttagtaggtcagcttacgttgcattcttcaaacgtttctaccaacacaggtaaaacagtcatttctcttaaacttcaa

SEQ ID NO: 14221 - DNA, 1058 bp, Homo sapiens
gaaagactttcagtcagtatctgcagaatgtctgggctgatacatttctcagtaataaaatgtggacaagaggaccaatctaccttcaaaatatatctccagcagtagtacagcaacagtggttaaaacaaatctcattctgccattttcttcttttatgactttgaacatgaaatccgacctcatgctggagtttcctcatataaaatgagaatgatagtgcctgcctcacagggacactatatgggaagttaatatatgctatagatgataaacatgccaaacccatattatgtactcagcaaatggaagcaattattattattaataagtccgctggcttccattcgtctcacctaccatttctccggtcccagccaccatttcccctcacctaaccttccataatagattagccagactcctgttttcactcttgaaacatttaggtctgtttttcatacaccagccagtgtgaagtttttaaaacgaaaacggatcatgtcacttctccacttaaaacactgcactgctccttacagaacccagagcagaattctaattccttagcgcacggccaggcgccggtggctcacacgggaatcctagcactttgggaggctgaggcgggcggrtcacttgaggtcaggagttcgagaccagcctggccaacatggtgaaactccatctctactaacaatacaaaaattagccgggtatggtggcacgtgcctgtaatcccagctactcaggaaactgaggcaggagatttgtgtgaatccgagaggcagagattgtagtgagccgagatcgcaccagtgcactccagcctgggccacagagtgggactccgtctcgaaaaaaaacccaaaaagcaaaaaacacattccttagtggggaccaggcccaccccctctacctgctcaattcatcccacttaggctctgtggcctcgctttggtttcccaagtccaccacccttcttatcttggtctggaacattcttcccactttctctgcctcgccaactcttagtaactcccatccaaaatgacagt

SEQ ID NO: 14222 - DNA, 1058 bp, Homo sapiens
gaaagactttcagtcagtatctgcagaatgtctgggctgatacatttctcagtaataaaatgtggacaagaggaccaatctaccttcaaaatatatctccagcagtagtacagcaacagtggttaaaacaaatctcattctgccattttcttcttttatgactttgaacatgaaatccgacctcatgctggagtttcctcatataaaatgagaatgatagtgcctgcctcacagggacactatatgggaagttaatatatgctatagatgataaacatgccaaacccatattatgtactcagcaaatggaagcaattattattattaataagtccgctggcttccattcgtctcacctaccatttctccggtcccagccaccatttcccctcacctaaccttccataatagattagccagactcctgttttcactcttgaaacatttaggtctgtttttcatacaccagccagtgtgaagtttttaaaacgaaaacggatcatgtcacttctccacttaaaacactgcactgctccttacagaacccagagcagaattctaattccttagcgcacggccaggcgccggtggctcacacgggaatcctagcactttgggaggctgaggcgggcgggtcacttgaggtcaggagttcgagaccagcctggccaacatggtgaaactccatctctactaacaatacaaaaattagccgggtatggtggcacgtgcctgtaatcccagctactcaggaarctgaggcaggagatttgtgtgaatccgagaggcagagattgtagtgagccgagatcgcaccagtgcactccagcctgggccacagagtgggactccgtctcgaaaaaaaacccaaaaagcaaaaaacacattccttagtggggaccaggcccaccccctctacctgctcaattcatcccacttaggctctgtggcctcgctttggtttcccaagtccaccacccttcttatcttggtctggaacattcttcccactttctctgcctcgccaactcttagtaactcccatccaaaatgacagt

SEQ ID NO: 14223 - DNA, 1058 bp, Homo sapiens
gaaagactttcagtcagtatctgcagaatgtctgggctgatacatttctcagtaataaaatgtggacaagaggaccaatctaccttcaaaatatatctccagcagtagtacagcaacagtggttaaaacaaatctcattctgccattttcttcttttatgactttgaacatgaaatccgacctcatgctggagtttcctcatataaaatgagaatgatagtgcctgcctcacagggacactatatgggaagttaatatatgctatagatgataaacatgccaaacccatattatgtactcagcaaatggaagcaattattattattaataagtccgctggcttccattcgtctcacctaccatttctccggtcccagccaccatttcccctcacctaaccttccataatagattagccagactcctgttttcactcttgaaacatttaggtctgtttttcatacaccagccagtgtgaagtttttaaaacgaaaacggatcatgtcacttctccacttaaaacactgcactgctccttacagaacccagagcagaattctaattccttagcgcacggccaggcgccggtggctcacacgggaatcctagcactttgggaggctgaggcgggcgggtcacttgaggtcaggagttcgagaccagcctggccaacatggtgaaactccatctctactaacaatacaaaaattagccgggtatggtggcacgtgcctgtaatcccagctactcaggaaactgaggcaggagatttgtgtgaatccgagaggcagagattgtagtgagccgagatcgcaccagtgcactccagcctgggccacagagtgggactccgtctcgaaaaaaaacccaaaaagcaaaaaacacattccttagtgkggaccaggcccaccccctctacctgctcaattcatcccacttaggctctgtggcctcgctttggtttcccaagtccaccacccttcttatcttggtctggaacattcttcccactttctctgcctcgccaactcttagtaactcccatccaaaatgacagt

SEQ ID NO: 14224 - DNA, 1058 bp, Homo sapiens
gaaagactttcagtcagtatctgcagaatgtctgggctgatacatttctcagtaataaaatgtggacaagaggaccaatctaccttcaaaatatatctccagcagtagtacagcaacagtggttaaaacaaatctcattctgccattttcttcttttatgactttgaacatgaaatccgacctcatgctggagtttcctcatataaaatgagaatgatagtgcctgcctcacagggacactatatgggaagttaatatatgctatagatgataaacatgccaaacccatattatgtactcagcaaatggaagcaattattattattaataagtccgctggcttccattcgtctcacctaccatttctccggtcccagccaccatttcccctcacctaaccttccataatagattagccagactcctgttttcactcttgaaacatttaggtctgtttttcatacaccagccagtgtgaagtttttaaaacgaaaacggatcatgtcacttctccacttaaaacactgcactgctccttacagaacccagagcagaattctaattccttagcgcacggccaggcgccggtggctcacacgggaatcctagcactttgggaggctgaggcgggcgggtcacttgaggtcaggagttcgagaccagcctggccaacatggtgaaactccatctctactaacaatacaaaaattagccgggtatggtggcacgtgcctgtaatcccagctactcaggaaactgaggcaggagatttgtgtgaatccgagaggcagagattgtagtgagccgagatcgcaccagtgcactccagcctgggccacagagtgggactccgtctcgaaaaaaaacccaaaaagcaaaaaacacattccttagtggggaccaggcccaccccctctacctgctcaattcatcccacttaggctctgtggcctcsctttggtttcccaagtccaccacccttcttatcttggtctggaacattcttcccactttctctgcctcgccaactcttagtaactcccatccaaaatgacagt

SEQ ID NO: 14225 - DNA, 1058 bp, Homo sapiens
gaaagactttcagtcagtatctgcagaatgtctgggctgatacatttctcagtaataaaatgtggacaagaggaccaatctaccttcaaaatatatctccagcagtagtacagcaacagtggttaaaacaaatctcattctgccattttcttcttttatgactttgaacatgaaatccgacctcatgctggagtttcctcatataaaatgagaatgatagtgcctgcctcacagggacactatatgggaagttaatatatgctatagatgataaacatgccaaacccatattatgtactcagcaaatggaagcaattattattattaataagtccgctggcttccattcgtctcacctaccatttctccggtcccagccaccatttcccctcacctaaccttccataatagattagccagactcctgttttcactcttgaaacatttaggtctgtttttcatacaccagccagtgtgaagtttttaaaacgaaaacggatcatgtcacttctccacttaaaacactgcactgctccttacagaacccagagcagaattctaattccttagcgcacggccaggcgccggtggctcacacgggaatcctagcactttgggaggctgaggcgggcgggtcacttgaggtcaggagttcgagaccagcctggccaacatggtgaaactccatctctactaacaatacaaaaattagccgggtatggtggcacgtgcctgtaatcccagctactcaggaaactgaggcaggagatttgtgtgaatccgagaggcagagattgtagtgagccgagatcgcaccagtgcactccagcctgggccacagagtgggactccgtctcgaaaaaaaacccaaaaagcaaaaaacacattccttagtggggaccaggcccaccccctctacctgctcaattcatcccacttaggctctgtggcctcgctttggtttcccaagtccaccacccttcttatcttggtctggaacattcttcccactttctctgcctcgccaactcttagtaacycccatccaaaatgacagt

SEQ ID NO: 14226 - DNA, 577 bp, Homo sapiens
cgtttccaggtctttttcagtgcatggaatagaaatgctgccctactttttctccaaacctgagaatattgagcagagtccatagttaaaattaataaaattcagaaattaattcttattgaaaatgcgatgaygagagtaatgagattttgattttgaattgtataaaggagtagcccttatgaattataatacttgcatttactattcctcaaaggaaggaaaatcaccgttttacagccttccaagacaattttaacttaaacctctgttttcttgctgtttgtaataatgacctttctccttaaggtttgtaatcagtgagtaatagaatagaggaacaaagagtcatgttctaataattaatgcagtgtgtagaatccctttaagcctgttgctcccagttctcctaagagggaaatgtccctggcatctcttaaaagaattatgtgttccaatctggctagacatccaatgttctttcctatgagccctaatttttattttctaatacactagtattttctaagaaaatctaataaaaatcatgaaagagtaaataagaaatggaatgatc

SEQ ID NO: 14227 - DNA, 565 bp, Homo sapiens
gggcgcggtggctcacgcctgtaatcccagcactttgggaggccgaggcgggcggatcacgaggtcaggagatcgagaccatcccggctaaaacggtgaaaccccgtctctactaaaaatacaaaaaattagccgggcgtagtggcgggcgcctgtagtcccagstacttgggaggctgaggcaggagaatggcgtgaacccgggaggcggagcttgcagtgagccgagatcccgccactgcactccagcctgggtgacagagcgagactccgtctcaaaaaaaaaaaaaaaaaaaaaaaaaaaaaaaaaaagtgttcattttgtttttgtagaactcctattttagatttcaaccttactcccagaattctagagagagagctacagatgtggagtgctttactttggttatggagttggaatacggtaggaggaggtaaatgcaggtgtgtcccacttaaagaagtaaaaccaatgactaagaataaacttttggggggggcttctaataatatatgccagacactgtggacatagagacagttataaaaactggagtcttca

SEQ ID NO: 14228 - DNA, 568 bp, Homo sapiens
ctaagcattttgcattcattttcccagttaattttcaccatactgtaaaaagtcattgttattcattttataagcaaatcactcaagggctctttactactgtrttatactggagagagcttgcaggacattaatctcaacaggagttaaccaaattaacccttaaaatagcaatttttcaattatgttatgtaaatagagccaggtctaggccagacaggaaatgcaaatgagggcacacttctgggaatctgtgttatatgagtagtacatgactcatctggaaagaggataagcgtatttctgtggaacaatcccatgaatatacaactgtaaaagcataactgggactgaaaacatgagcttcactttcatcaaatggggaaaattttatgcagaaagtgtagaccctgatgagtgaaggtacaaactccattcgaggaggacagcacacacctggctcaagttgacaggtgcaagaatgtggatcttctaatagttcaagaaaggctgtaaatctggatgttttaaaatgccactctccagttattatatattggcaactaat

SEQ ID NO: 14229 - DNA, 568 bp, Homo sapiens
ctaagcattttgcattcattttcccagttaattttcaccatactgtaaaaagtcattgttattcattttataagcaaatcactcaagggctctttactactgtgttatactggagagagcttgcaggacattaatctcaacaggagttaaccaaattaacccttaaaatagcaatttttcaattatgttatgtaaatagagccaggtctaggccagacaggaaatgcaaatgagggcacacttcygggaatctgtgttatatgagtagtacatgactcatctggaaagaggataagcgtatttctgtggaacaatcccatgaatatacaactgtaaaagcataactgggactgaaaacatgagcttcactttcatcaaatggggaaaattttatgcagaaagtgtagaccctgatgagtgaaggtacaaactccattcgaggaggacagcacacacctggctcaagttgacaggtgcaagaatgtggatcttctaatagttcaagaaaggctgtaaatctggatgttttaaaatgccactctccagttattatatattggcaactaat

SEQ ID NO: 14230 - DNA, 597 bp, Homo sapiens
attgactcatagttccacatggctgagaaggcctcacaatcatggtggaaggcaaataaggagcaaagtcacrttttacatggtggcaggcaagagagcttgtgcagggaaactcccatttataaaaccatcagatcttatgagacttattcactaccacaagaacagtgtgggggaaaccccccccatgattcaattatctccacctggccccgcccttgatacctggggattattacaagtcaaggtgagatttgggtggggacacagccaaatcatatcactatctcttaagaaaattaaagaaatagtatcagaccattcaaggacagatatcatatgattctgtttatatagaatatccagaataggcaaaactagagagagaaagtgcattagtggttactagggggaaatggggagtgatcactaaggagtatagagggcttctttttggggtgatgaaaatattctagaattagatagtgggaagggttgcccaattttatgaatatacttaaagccactaaattgtacacttttaaaaggtgagctttatgatatgcaaattatatattaataaacaaatattttaaa

SEQ ID NO: 14231 - DNA, 524 bp, Homo sapiens
tgtataaggaagaaaccaatcatccctgaagcctatgatttcacaatgtgttgactaaacaaaattatcttattaagaagaacagtgaagagataggtttaacaaaagtgtcttctatagcatacaaaaacttaatgatgcctatattttaaccttgtcacctgcaaccaatatcttctttcacagatttacatataacttaaaatctcccaaatatatgtcattttgtttcatgtctctgtacgttttgatgctcctgcatttctgatccctgacactttgagatcttgtctaccaaaccaatgctgatttgtcttattagactccacttattcttctgaaacaacctttcttaacctctctgaactttcttttccaagaccagtagagtttacctgttaatttttatgtcatggmgatgtattggaattgtgctttttctaacacttcacctcacttttcctattaggtttcttaatgtggcttatctttaccaaattttaggtgcctttgaaacaaggttc

SEQ ID NO: 14232 - DNA, 1308 bp, Homo sapiens
gggcagaaacatagttgtcattaattagagacaacccaatctgaggaagagataaaatctctctacacttttaggttattttaattccctttctttttcctatctatctatatatctttttatttatttatttatttatttatttatttattttgagataggttctcactctgttgcccagtctggcgtgcagaggctagctgcaacctccacctactgggctcaatcaatcctcccacctcagcctcctgagtagctgggaccagaggcaggccatcatgcctggctaattttcatattttgggtagagacggggttttgctatgttgtccaagttggtcttgaactcctggactcaagcaatctgcctgycttggcctcccaaaggcctcccataagccaccatgcctgacttccctttctgcctaatgaaagcttccccacacttttcctggtgtcataagtataatgaacattttgtccctgagtcttgagagacacacagttccaggcaccttgtaaagttgcgttggctgctctggcacatttgtatgtggctgtaggcattaggcagctgggccaggcagtctagagccagagggtgcactgtctggctgtccatccatttccacacctgcacagacatgtgacccacctctctggaccctgcctatggggccgcacacaggccatgcacctgctggccaggcaccaggcacccttgtcataaatatctccacctgtccagcaatgaggtgggaacactcaattctttgtgaaaatctctgtatttacaataccagaagtgtgtgtattttgtgaaacaaaaactctctaaaaaacaaagcaagacaaaaaattgatgaagccaggcctcccattgcaggaagaatgttgagaagtgaagtgtggaggggtggcatgttctctttagcaccgacggttgctcagggaatgagcctcaaaatggagaaaaaccaaatgactgagtcccatccacccccagggctccagtgctctcctccatttcctcaacattgacctggcttatttctctggacgccttgtgcagggtgttgtgtgcctggaaaagcctctcataaccagcttgggagatagatgtgcagacacagaggggagaggctggggaagggtgggagaggcctgtttcccaacatcgcagctggcaggacccagatgcggagtccaggctgcggcaggacaggcgggtgcaagacggagaagggggacaagaaagagtaactcctcgggatgacggcattgaaggtcaaagtcatgcaacctaga

SEQ ID NO: 14233 - DNA, 528 bp, Homo sapiens
cagataaaactaaattttattatgttcagatgctttatctatcctggttatctctcttgtcctactctcccatttctcactcccaatatgcatttactctgcacttttgtatgctagaaatacattagtccattccctgattagtttagtttaggtgtttttgtttgtttatttgtttgtttgtttttgacggagtcttgctctgttgcccaggctagagtgcagtggcacaatcttggctcaccacaacctctgcctcctgggttcaagccattctcctgcctcagcctcctgagtagctgggaytacaggcatgtgccaccacaccctgctaatttttgtatttttagtagagacggggtttcaccatgttgaccaggctggtcatgaaatcctgacctcaagtggtcctcctgctcccacttcccaaagtgctgggattacaggcatgagccactgcgtctggcctagtttagtttttattgtgctgaaatcttgcatatgtttagccactcaatattgtctgtt

SEQ ID NO: 14234 - DNA, 528 bp, Homo sapiens
cagataaaactaaattttattatgttcagatgctttatctatcctggttatctctcttgtcctactctcccatttctcactcccaatatgcatttactctgcacttttgtatgctagaaatacattagtccattccctgattagtttagtttaggtgtttttgtttgtttatttgtttgtttgtttttgacggagtcttgctctgttgcccaggctagagtgcagtggcacaatcttggctcaccacaacctctgcctcctgggttcaagccattctcctgcctcagcctcctgagtagctgggattacaggcatgtgccaccacaccctgctaatttttgtatttttagtagagacggggtttcaccatgttgaccaggctggtcatgaaatcctgacctcaagtggtcctcctgctcccacttcccaaagtgctgggattacaggcatgagccactgygtctggcctagtttagtttttattgtgctgaaatcttgcatatgtttagccactcaatattgtctgtt

SEQ ID NO: 14235 - DNA, 536 bp, Homo sapiens
tgctgtaatgtatccaggtagagatgacaagtggcagtcataaacaggagtctaactctgggaaaatgtcagaactgaaaataatttgggatttgtgtttatttagtaggtatttaaaaccttgggaccgagcatgtgtacctaagaatccttatatggtcttaattcctcctccagatcagtctggctttgagtcctgattgtgactgatttctgcaaagcaattgctcttttccttgtggcctcttgtsacatcatgttaggaacgttttgttgccagatgcttgcatttaatttccaagacccaagtgtacattcattgttggaccactttgattcattgcagctcttaaattgagcctcctattttcaataaactaccagcctaacaactgcatgaattaacccacagtggaaaactgtgtgatagtgattcactttgcattcacatatacaaacattctttcctacttccatatttaatttaaacctcaagaagagggacttccctattatgagatgatctaaaccttcag

SEQ ID NO: 14236 - DNA, 591 bp, Homo sapiens
taaacctgaaaagatctaaatatagaagttttaaaatagtgacaggcaggttttttagagcagaagctgtaaaccatcaacctgagggctaggttgggcctgcagacaaattattttgtttggcctgtagggcttgttttctttctttctccctaccrccccccacacttttagccagtatttacaaactggagaatttaggaaaaaaatcattattggctgagtagaggcaatttctggaacctggcaatctttagagtttctctctctcacccgggctggaatgcagtagcacgatcacagctcacttcagccttgaactcctgggtccaagcagtgcccacttttccatcctgagtagctaggactgcaggcacatggcagcatgcttggctgatttatttttattttttgtagagacaaggtcttggggtgttgcccaggctgaacctggcaatcttatgaagaaacactttaaactctgaaggaaactttttaagtaatatagacacaatatttttgaaaagctcttaaattgctaaaaattaatgcaaagaatagaattgcttatagtagcccaagaggaaagca

SEQ ID NO: 14237 - DNA, 591 bp, Homo sapiens
taaacctgaaaagatctaaatatagaagttttaaaatagtgacaggcaggttttttagagcagaagctgtaaaccatcaacctgagggctaggttgggcctgcagacaaattattttgtttggcctgtagggcttgttttctttctttctccctaccgccccccacacttttagccagtatttacaaactggagaatttaggaaaaaaatcattattggctgagtagaggcaatttctggaacctggcaatctttagagtttctctctctcacccgggctggaatgcagtagcacgatcacagctcacttcagccttgaactcctgggtccaagcartgcccacttttccatcctgagtagctaggactgcaggcacatggcagcatgcttggctgatttatttttattttttgtagagacaaggtcttggggtgttgcccaggctgaacctggcaatcttatgaagaaacactttaaactctgaaggaaactttttaagtaatatagacacaatatttttgaaaagctcttaaattgctaaaaattaatgcaaagaatagaattgcttatagtagcccaagaggaaagca

SEQ ID NO: 14238 - DNA, 591 bp, Homo sapiens
taaacctgaaaagatctaaatatagaagttttaaaatagtgacaggcaggttttttagagcagaagctgtaaaccatcaacctgagggctaggttgggcctgcagacaaattattttgtttggcctgtagggcttgttttctttctttctccctaccgccccccacacttttagccagtatttacaaactggagaatttaggaaaaaaatcattattggctgagtagaggcaatttctggaacctggcaatctttagagtttctctctctcacccgggctggaatgcagtagcacgatcacagctcacttcagccttgaactcctgggtccaagcagtgcccacttttccatcctgagtagctaggactgcaggcacatggcagcatgcttggctgatttatttttattttttgtagagacaaggtcttggggtgttgcccaggctgaacctggcaatcttwtgaagaaacactttaaactctgaaggaaactttttaagtaatatagacacaatatttttgaaaagctcttaaattgctaaaaattaatgcaaagaatagaattgcttatagtagcccaagaggaaagca

SEQ ID NO: 14239 - DNA, 691 bp, Homo sapiens
tgatataaaatgattttctaaggataaataaatggataatggtaatgtcgtgataaattatatatgaatgtattgtaattattatttcaaaaaatattcggccaggtgcagtggctcacgcttctaatcccagcactttgggaggccgaggccagccaatcacctgaggtcaggagttcgagaccagcctggctgacatggtgaaaccccatctctactaaaaatacaaaaaaaaaaaaaatttgctgggcatagtggtgggcgcctgtaatcccagctactcaggaggctgaggcaggagaattgcttgaacccaggaggtaggggttgcagggagccgagatcacaccattgcmctccagtctggatgacaagaatgaaactccatctcaaaaaaaaaacatttctacctgaatggactactgaaagttttctaaatatatctgagtctctaatgtgatcttcaaaaccattttatcttgcattcacgtttaggataatttcaatcctactcaggaaaatcaatttgaacttgatgctttcctgaaatattagagtgtaacaacctcttcttcccctctaaaccaaaaagtacttattcatatattgcatttggcattgtattgtaatttaactttccaaacattttatatgtgtgtgtgtgtgtgtgtgtgtgtgtgtgtgtgtgtgt

SEQ ID NO: 14240 - DNA, 691 bp, Homo sapiens
tgatataaaatgattttctaaggataaataaatggataatggtaatgtcgtgataaattatatatgaatgtattgtaattattatttcaaaaaatattcggccaggtgcagtggctcacgcttctaatcccagcactttgggaggccgaggccagccaatcacctgaggtcaggagttcgagaccagcctggctgacatggtgaaaccccatctctactaaaaatacaaaaaaaaaaaaaatttgctgggcatagtggtgggcgcctgtaatcccagctactcaggaggctgaggcaggagaattgcttgaacccaggaggtaggggttgcagggagccgagatcacaccattgcactccagtctggatgacaagaatgaaactccatctcaaaaaaaaaacatttctacctgaatggactactgaaagttttctaaatatatctgagtctctaatgtgatcttcaaaaccattttatcttgcattcacgtttaggataatttcaatcctactcaggaaaatcaatttgaacttgatgctttcctgaaatattagagtgtaacaacctcttcttcccctctawaccaaaaagtacttattcatatattgcatttggcattgtattgtaatttaactttccaaacattttatatgtgtgtgtgtgtgtgtgtgtgtgtgtgtgtgtgtgtgt

SEQ ID NO: 14241 - DNA, 553 bp, Homo sapiens
tgtcacagcattacatctggcaggaaggcattctagtcaatgtagctgcccctgtttggcagagtagatagattaaatttggtgcatgtacgctatggagtattatgcaacagttataagcaacacattagatgtatagaaagaattatatgccttgaacttaaaaatatagtgcttagtttaaaaagtaagattaagaatataatagctaagatatttatatttgcataataaaaacacatgcaggctggtccaagtgcagtgatatttacaacaaattgatcacaagttaacagatttatttgttcctcttccactcctactatttcacttgactagccttaaaaaataaataaataaacaataacatcctattctgcaataaataaaatatacatattaaattcaagaagatcaacctgtcttatttcagggaaaaaaatgctgttatttttatcggtattgcrgcaaatctatagattttctttagtagaattaacattactatgttgagctttcttaatcaaaaacagtaaaacagcttttcatttgt

SEQ ID NO: 14242 - DNA, 505 bp, Homo sapiens
ttcttagtaacctgaaaactacaatgaccacttggtcctgaatccagaatccagrtatcctaatgccattgtcatatgacagtcaagtcatccaatttttcttctgacataaaaccagatctgaatttataatagtccaaactcaatacttatgatgatcgtactgggatttcttaagtaaagtggtcttttaatagatatattatttatttgattgaactgataaactgaaaatgtcatcaaggctttaaacatataaaaggtctaatcttagatctagaaggaatgttgttaggttatggaggtgagttgagctctttctttggaaaagaccgtgcttttatcattacagacataggaggatatctttctttaacgttgtccagaggaaaatatttaacagtgtctcttgttcaagttcaggtagtgagctttataaactttagaaacctatttttttaatcataccttagtctgtcttgctacgtcttatatttcatagctt

SEQ ID NO: 14243 - DNA, 596 bp, Homo sapiens
tcccacatatatataaactgagcttttcaaaaagagttcaactattttcagtttctatacatgtggatctttgtctgacgtaattcttgatttcgtgagatgaaacataggcaaaatacattaaagtttttctcctaaaatttctctcactgaggcaaaacttatctgaatcacttttaaacccatcttgccaataactaascccatatcatctgtactaatcaaaagcactgatgatgctgcatttctgatgggattcctatgctactctctgtgagattatctttccaacctcctgacatcccttctgcaagttttgatgatgatattacctgaagatatcaatgggaagtttttagaccaagttcatgtcagtgtccatgaggacaatctcattatgactgtcttccggccaacagtgtttcaacactatcagattcaagatgcctttctgtgaagagatgtgactgggtgcaccacagcgtgaatgaaatacattagttttccctgagactgcccgcttctcagtgttaaatcatcatggttgtgttcctgtctgttttaagtgcaaagaactttttaaaaactaccattcg

SEQ ID NO: 14244 - DNA, 634 bp, Homo sapiens
ctgtcggaagttttgtttggggacttggtgcaccacactgtatcatgtaacttcatgtcagtacacttttgcatctgtttgctttttcctgttaagtctgagctctcacacctgattgattttgattttccagtttgagggaccactccttgtccagatctcttgtgtctcatttatggccttccactctggtctttttgttgttgatccatacttcagtaaggtagagtgttgacagtatatacatcatgacagattattattattatttttatttatttatttatttatttttgagacagagtcttgctctgtcgcccaggctggagtgcaatggcactatctcagctcactgcaactgccacctcctgggttcaagtgattctcctgcctcaggattacaggcaggtgccaccatacccggctaattttgtatttttagtagcaatgaggtttctccacgttggtcaggctggcctcaaactcccaacctcaggtgatctgcctgtctgggcctcccartgtgctgggattacaggcatgagccactgtgcccggccagattttaaaatatgcattgaagcgaagagtaaaaggagatttcacaagtcattaaagtattaatatatatcca

SEQ ID NO: 14245 - DNA, 556 bp, Homo sapiens
tcaggatagtttctgtgagacttgctgcattaatcctacagcaggatattttacaggtggaatcgtatataattttaaatgttcctttcaaattaaagtgtataactgcaattccatcatggatggatgtggccaagaaaacagcaaaattaattctaagtcatgtccatctgcacagcactattgctttaaaatagtggttctcaaatgttcctgcaatatgcgtctgctcccaaacacttgcaaactagggtagaagagtgaatgcgatccaatgaataaaaaatctatctccagagaaatattacatccactatcctgttaaccttaagaatcgctggtcaggccgggcgcggtggctcacgcctgtaatcccagcactttgggaggccgaggcgtgcggatcacgaggtcaggatatcgagaccatcctggctaacacggtaaaaccccgtctctaytaaaaatacaaaaaaaaaaaaaaaaattagccaggcatggtggcgggcgcctgtagtcccagctactcaggcggctgaggcaggagaatggcttg

SEQ ID NO: 14246 - DNA, 470 bp, Homo sapiens
tttcgacatgctgcccaggctggtgtcaaattactgcactcaagtgatccacccgccttggcctcccaaagttctgggattacaggccatatgccactgtgcccagccccatatgtgttctgtggttgtcataagaaatatcacacacgtagaacacgtgttaatccatatactgagctaaacttcctgagtagagaacacattgtgattggctgtcacatgaaaaacagaatcatagattgacaagtttaaatataaatgttcccaaattattttcctattcactttgtgaagtgtttgaacaatcagattcaaaaccaaaccacrctagttcatgttcctaaggaataagaaggctgacttcatagaatttttaaaaggagaaatgccttttcattattgacaagtatagaaaatgccttgaattcataacataaactattaaacattaaataaaatgaatttgcaat

SEQ ID NO: 14247 - DNA, 560 bp, Homo sapiens
tgactgcaaagtccatgctccttccacacagtgtcagcctgcctcatttggtaaggttgattgtgaaacaaagatgtgatttattttaagcagtgaaagatatacagtttggaaggaaagtggaaggaatttggtcgtttctcttctctcctctctttattgtccttaccttcttcattctcttcatcttcacttttgccattctgagaataaataagaaagttcattcttgaggtagaaaatggtggcaaagtatgcagctgcctacttaaagaaatatgggggaagctccttgccattcacgtgccatagcagctgaaattcccactattagagagttgcttctttgggaactttgtgtattttgtctctaaaagttatctttgaatgtggtagtttatgatgttattgacaccttttcccaggatttttgtgcccaatgtaatcatcacagaacatmctacttttgaccggtaatgaatgagcataaaacgtttaaacaagcccattgtagacaaagaacagagcaagttctttgggaaagaaaatctgaaaggtgt

SEQ ID NO: 14248 - DNA, 502 bp, Homo sapiens
ccttgaatttagatatttgatgaagaggtaaaaatatgctgacaatccccttagggctcactggcacctcagttatctcagtgctcatttgaagattcttacttgaagatcagtgttttaaagtcttagagtttcttcaagcacagccttagcatctcctatccagagtccttctttatgcacacatcttttctgtaagacagttgtctgggtaaagcttttcgcatcttttccrtaaggatagattgcatatcttcatacacattaagagacatgggtggatttaaacttttcaccttttttattttttatttttttgagggagggtctgactcccaggctggagtgcattggcaacaatcatggctcactgtaggctcaaccttctaagctcaggcaatcctcccacctcagcctcccaagcaattggaaatacaggcatgtgccaccatgccgagctaacgttaaaataaataaataaatgaataaataaataaataaa

SEQ ID NO: 14249 - DNA, 1243 bp, Homo sapiens
gcagtggcatgattgtggctcaccacagtctcaaccctctgggctcaattgttctccctgcttcagtctcctgagtagctgggaccacaggtgcacaccacccacgcctggctaatttttgtagtttttgtagagacagggtttcgccatgttgcccaggctggtcrcaaattcctgggcttaagcaatccacccgccttggcctcccaaagtgctgggattacaggcatgagccacctcatccagcccatcttttgtcttactactttttcattacatatggttacttacaaattgctattttcttcttaataattttctgttcctgtttcataaaagccacctctttttgcatcatattgttatatcaaatgattctctaaaatgttctttaagtttctggaagatattatctggtaaattttctctggttttcagatgaggatccctttttgtcttctactattttttcaattgtctctttttcctgtttattcattctcaaatgagaagagacccattctggcttgccatggtcaatagaaagggtgtatgttttgctcatgacctcttttctggatgttagtgcactcattctctaagccctatactaaatcgccagttgatacacctaaccaagcttccatctaatcagcttccttgttgtgtggccctgctgaactgatgtgcactcatctcctgcatccgatcctgggatgctgagaagctgatcaaatggaatacacacgacaacccccggtatactgcacatcgagggctcctcttgtacctgtgctcaccctgagtgctctggaaactacttctccaagggagtgatgtaccagccttggtgtccctcctccaccctgcagttttgttttgttttgttttgtttttttgcctagttgttttctgagagttgcagttcttaattggcaggtggaagggagtggggagtactctggctctttcaaaaggcagcacctaccaagtagatggatggctgctgaatttaaatttctcaacagttggaggactcagatgttattttttcaatcctgatgtcccatttcaacccagttccattggccttggccttgtgtttaggtaaaaaatctccagatcccccaaaacagactgactgcagtcctggtttttggtgtgctaagttttgtgtttcattacaggacttcgagatgattttagcagaaagttgaagaagctgccccatgctctcctagcc

SEQ ID NO: 14250 - DNA, 1243 bp, Homo sapiens
gcagtggcatgattgtggctcaccacagtctcaaccctctgggctcaattgttctccctgcttcagtctcctgagtagctgggaccacaggtgcacaccacccacgcctggctaatttttgtagtttttgtagagacagggtttcgccatgttgcccaggctggtcacaaattcctgggcttaagcaatccrcccgccttggcctcccaaagtgctgggattacaggcatgagccacctcatccagcccatcttttgtcttactactttttcattacatatggttacttacaaattgctattttcttcttaataattttctgttcctgtttcataaaagccacctctttttgcatcatattgttatatcaaatgattctctaaaatgttctttaagtttctggaagatattatctggtaaattttctctggttttcagatgaggatccctttttgtcttctactattttttcaattgtctctttttcctgtttattcattctcaaatgagaagagacccattctggcttgccatggtcaatagaaagggtgtatgttttgctcatgacctcttttctggatgttagtgcactcattctctaagccctatactaaatcgccagttgatacacctaaccaagcttccatctaatcagcttccttgttgtgtggccctgctgaactgatgtgcactcatctcctgcatccgatcctgggatgctgagaagctgatcaaatggaatacacacgacaacccccggtatactgcacatcgagggctcctcttgtacctgtgctcaccctgagtgctctggaaactacttctccaagggagtgatgtaccagccttggtgtccctcctccaccctgcagttttgttttgttttgttttgtttttttgcctagttgttttctgagagttgcagttcttaattggcaggtggaagggagtggggagtactctggctctttcaaaaggcagcacctaccaagtagatggatggctgctgaatttaaatttctcaacagttggaggactcagatgttattttttcaatcctgatgtcccatttcaacccagttccattggccttggccttgtgtttaggtaaaaaatctccagatcccccaaaacagactgactgcagtcctggtttttggtgtgctaagttttgtgtttcattacaggacttcgagatgattttagcagaaagttgaagaagctgccccatgctctcctagcc

SEQ ID NO: 14251 - DNA, 556 bp, Homo sapiens
aaaatcaggccaatcaaaatctccagaccagaaacagttcagttctgatctccttttccaagctaccattttatgtttaatgtattaatttttccttttttttttgagacggagtttttgttcttgtcacccaggctggagtgcagtggtgcgatcttggctcactgcaacctctgcctyccgggttcaagcgattctcctgcctcagcctcccgagttgctgggagtacaggcgcacaccaccgtgcctggctaatttttgtatttttagtagagacagggtttcaccatgttgggcaagctggtctcgaactcctgacctcgtgatccacccgcctcggcctcccaaagtgctgggatgacaggcatgagccacagtgcccagcttttccttgtttttaatcctctcctccaaattagctccttatttatacatcattgtttatttcaagttatcaaaatgttcgccaatttgtttcgtactagtgtaactgcaattccactccagtcctctgtgttcaatttcctccttctgaagctgatacgttagtattta

SEQ ID NO: 14252 - DNA, 512 bp, Homo sapiens
tacagaggaagaaagagtctgaatcatgcatgagttttgtactgcctcaattcaaaagtttcatgtagggattgctattaaggtgttctggtgctactaaattctaaaattctatatttcaaaaaacgttgttcaatgggaagcgttttttaaactacacatttatattcaagttctatgcccaaaccaaaactaagttagaaatcaaattagccaatgctgtttattcatatgtttgctatagcaagggaaatatctatggtcccttttgctccttcagaggttcaaggaggatttgaaaggaaaatgagttttataggaaaaaaaagcacattctattaaggtgagatttttgaaaggggcatggggmagtcttatgattggcctttaagtatatttggctgtccttgtttggttgcaagggagcaggcactttgaggtttccagaaaggaagaggctattcaaactgtggcccgagatttcctacaactagtgagtcaattgagtgttc

SEQ ID NO: 14253 - DNA, 473 bp, Homo sapiens
catctatgctctcagtaacaagtttttaaggtattcacgcatctcattgtttgtctatttttacaaatatgtggtgtcattcaaaaatgacacataggacatcctgtctgtatatatttaatgcaaagagtaaaaaagtaaatgaaatactcatatggttccttttaagttttcaacatgaacaaaaacatttctcataaatttgttgtgagagcttttgaaaaggaatcgtacctcrttgatttttgaaatgtaatgagtttaaaagtaaaaataattctgtgctctacatttttcatttctattatttttaaaatatcaactagagtgtatcgattggggaacaccgttgcatgcaagcttgtgtgttttttatctgtgtactagaaaaaaattctagtaaatgttatgctaaaaacaactataattataaaagatagaagtggtaataagagtatatgcaagaaattatt

SEQ ID NO: 14254 - DNA, 529 bp, Homo sapiens
gtgctggaaaaagtatacagaggtttctgcttcgatgttttttgttttgtttttttctcttctggcaagtggggccccttcagggttctgctgttcattarggatcaaactgccaatatgggcttgctcagattaggcctttatacaactgtcccgataccagtgtttgcattcctcttcaactgaaaatttgtcagagaagaaaggcattaaacctgtcactgcagataaagatcagatgtttgatttcaaacagaagaagcaaacactctaccatggactccattaactcttgagtactttgctcaggataatgtggaggactagaccagacctgggaagtgggaaataaatccaaatttcaccaccattttagtagttacaggggatattggactttgagcaaagatatgggggaaaggaactaaattgcaaaacctttcccatgttcttcctttgtttctttttattacaaatgtgatttcacaaaacaagtaaacctagtatattttatctgaaaaataaatca

SEQ ID NO: 14255 - DNA, 725 bp, Homo sapiens
tattgtacttccttttaaacctttaaattcaagtgatgacatggatttccaaagtgtgttctgggaaacactgcttccgtgggggtagagacattggtgcacttcctgaacggcaagctctctgggaagagaaattgctgtttcctgcattaacactaagttacagaagcctcttcccccctctgaagtagctgcagaaaattattccccagctccaatttctaggtcagaatatactaactgttccgccaaacctgctccatctcatacattccttgtcttggtcaataacttctacccaattctccagccaagacatctcaatattctcctggactcctttcttgtaactaacaacatcacttccagctccctgttcacccccaaccaacaagaggttctaccattattaccctccttgacctctctcatgtccaacccctcttgtgccattatcacttttcctatgatgtattgcaacaggctcctattagcttctctgcctctagacttctcccgctgaaatccgttctctaagcttccaaaggaatgtgacaatggtgccaagttggcctaacaccacactgctgagtcacctgtcaagactgcccgccagctatagcagcagctatcaatggggaacattcccccacmccaggggacatttggcaatggggagaggtgttgctactggcatctggtgagaagattccagggactctgcc

SEQ ID NO: 14256 - DNA, 618 bp, Homo sapiens
tatwtatttatttaacattggcacattaatctattgaaacttcttggggagaattcgctccaaatggtctcatggagagactctcaacttgcaactgggccctccatgctatcctgacttacttctgtctttcactctgataccagagtgtagtcattccagctctggccaccccattcctttcaccaaattgctcctaactggaagatcttactctcctgttgtggggcaggaactgatgccagtagagagggatgtgtcctgaaccattaatgactgcctttttttttaaaaaaaagaatggagctgtcaggaagagacatgccctcaatatgaaacagacaacatgcattacaactgtagtggaaagtggccactgtgactctctatgtaggaggagggccagctacagcttcagccccaggatggggactgtggaggacaaaccaggaattcatttcctctgcatatttcagctattcgaacctgtgtgcgtgtgtgtgtgtgtttgtgtgtgtgtgtgtgtgtgtgtgtgtgttttaagccaatgctcatgctctgtatttaaatattaaaaatgattccaactgaaatgaaaaaacaaagtatgttaccatt

SEQ ID NO: 14257 - DNA, 618 bp, Homo sapiens
tatttatwtatttaacattggcacattaatctattgaaacttcttggggagaattcgctccaaatggtctcatggagagactctcaacttgcaactgggccctccatgctatcctgacttacttctgtctttcactctgataccagagtgtagtcattccagctctggccaccccattcctttcaccaaattgctcctaactggaagatcttactctcctgttgtggggcaggaactgatgccagtagagagggatgtgtcctgaaccattaatgactgcctttttttttaaaaaaaagaatggagctgtcaggaagagacatgccctcaatatgaaacagacaacatgcattacaactgtagtggaaagtggccactgtgactctctatgtaggaggagggccagctacagcttcagccccaggatggggactgtggaggacaaaccaggaattcatttcctctgcatatttcagctattcgaacctgtgtgcgtgtgtgtgtgtgtttgtgtgtgtgtgtgtgtgtgtgtgtgtgttttaagccaatgctcatgctctgtatttaaatattaaaaatgattccaactgaaatgaaaaaacaaagtatgttaccatt

SEQ ID NO: 14258 - DNA, 618 bp, Homo sapiens
tatttatttatttaacattggcacattaatctattgaaacttcttggggagaattcgctccaaatggtctcatggagagactctcaacttgcaactgggccctccatgctatcctgacttacttctgtctttcactctgataccagagtgtagtcattccagctctggccaccccattcctttcaccaaattgctcctaactggaagatcttactctcctgttgtggggcaggaactgatgccagtagagagggatgtgtcctgaaccattaatgactgccttttttttwaaaaaaaagaatggagctgtcaggaagagacatgccctcaatatgaaacagacaacatgcattacaactgtagtggaaagtggccactgtgactctctatgtaggaggagggccagctacagcttcagccccaggatggggactgtggaggacaaaccaggaattcatttcctctgcatatttcagctattcgaacctgtgtgcgtgtgtgtgtgtgtttgtgtgtgtgtgtgtgtgtgtgtgtgtgttttaagccaatgctcatgctctgtatttaaatattaaaaatgattccaactgaaatgaaaaaacaaagtatgttaccatt

SEQ ID NO: 14259 - DNA, 618 bp, Homo sapiens
tatttatttatttaacattggcacattaatctattgaaacttcttggggagaattcgctccaaatggtctcatggagagactctcaacttgcaactgggccctccatgctatcctgacttacttctgtctttcactctgataccagagtgtagtcattccagctctggccaccccattcctttcaccaaattgctcctaactggaagatcttactctcctgttgtggggcaggaactgatgccagtagagagggatgtgtcctgaaccattaatgactgcctttttttttaaaaaaaagaatggagctgtcaggaagrgacatgccctcaatatgaaacagacaacatgcattacaactgtagtggaaagtggccactgtgactctctatgtaggaggagggccagctacagcttcagccccaggatggggactgtggaggacaaaccaggaattcatttcctctgcatatttcagctattcgaacctgtgtgcgtgtgtgtgtgtgtttgtgtgtgtgtgtgtgtgtgtgtgtgtgttttaagccaatgctcatgctctgtatttaaatattaaaaatgattccaactgaaatgaaaaaacaaagtatgttaccatt

SEQ ID NO: 14260 - DNA, 618 bp, Homo sapiens
tatttatttatttaacattggcacattaatctattgaaacttcttggggagaattcgctccaaatggtctcatggagagactctcaacttgcaactgggccctccatgctatcctgacttacttctgtctttcactctgataccagagtgtagtcattccagctctggccaccccattcctttcaccaaattgctcctaactggaagatcttactctcctgttgtggggcaggaactgatgccagtagagagggatgtgtcctgaaccattaatgactgcctttttttttaaaaaaaagaatggagctgtcaggaagagacatgccctcaatatgaaacagacaacatgcattacaactgtagtggaaagtggccactgtgactctctrtgtaggaggagggccagctacagcttcagccccaggatggggactgtggaggacaaaccaggaattcatttcctctgcatatttcagctattcgaacctgtgtgcgtgtgtgtgtgtgtttgtgtgtgtgtgtgtgtgtgtgtgtgtgttttaagccaatgctcatgctctgtatttaaatattaaaaatgattccaactgaaatgaaaaaacaaagtatgttaccatt

SEQ ID NO: 14261 - DNA, 566 bp, Homo sapiens
ttttgaataaaagacacaaatttgtatctacatggaatacacacaatgatagccaaaagactatgaataaatttctggatgtaattttaataaacaatataaaattttacttctatattgaagaacaatctgttagaaaatgtaattaaaataacaattatgatacaacagaaagtacctagaaaaaaatcaaaataagatgtacatttcattttattaaaaagtacagctatttcttatgggacattaacaaagatataaataaatgtaaagstatgctatgtttatgaattgaatagaaagattcaatattataccaacaagaaaaaaagttgggtgaaatgccataccaggttacagcacttattagagatgttggtctatgtaggaataggcaaaagcagtcagcagatagaaaactggcatacgtactcacacatacattgaaacttgatgtttcagaggaggcatcacagatcagtgggaaacagttggctatgcaaaatatgactgaacaaaaacaaatctgaaaaactgaacaataagtttttaataatatatgtgat

SEQ ID NO: 14262 - DNA, 566 bp, Homo sapiens
ttttgaataaaagacacaaatttgtatctacatggaatacacacaatgatagccaaaagactatgaataaatttctggatgtaattttaataaacaatataaaattttacttctatattgaagaacaatctgttagaaaatgtaattaaaataacaattatgatacaacagaaagtacctagaaaaaaatcaaaataagatgtacatttcattttattaaaaagtacagctatttcttatgggacattaacaaagatataaataaatgtaaagctatgctatgtttatgaaytgaatagaaagattcaatattataccaacaagaaaaaaagttgggtgaaatgccataccaggttacagcacttattagagatgttggtctatgtaggaataggcaaaagcagtcagcagatagaaaactggcatacgtactcacacatacattgaaacttgatgtttcagaggaggcatcacagatcagtgggaaacagttggctatgcaaaatatgactgaacaaaaacaaatctgaaaaactgaacaataagtttttaataatatatgtgat

SEQ ID NO: 14263 - DNA, 566 bp, Homo sapiens
ttttgaataaaagacacaaatttgtatctacatggaatacacacaatgatagccaaaagactatgaataaatttctggatgtaattttaataaacaatataaaattttacttctatattgaagaacaatctgttagaaaatgtaattaaaataacaattatgatacaacagaaagtacctagaaaaaaatcaaaataagatgtacatttcattttattaaaaagtacagctatttcttatgggacattaacaaagatataaataaatgtaaagctatgctatgtttatgaattgaatagaaagattcaatattataccaacaagaaaaaaagttgggtgaaatgccataccaggttacagcacttattagagatgttggtctatgtaggaataggcaaaagcagtcagcagatagaaaamtggcatacgtactcacacatacattgaaacttgatgtttcagaggaggcatcacagatcagtgggaaacagttggctatgcaaaatatgactgaacaaaaacaaatctgaaaaactgaacaataagtttttaataatatatgtgat

SEQ ID NO: 14264 - DNA, 533 bp, Homo sapiens
ctctctccacaccttgactctatgtcccaatcattcattctctttccctcaaaaacaacgatgacagtaaaatacaataacaatacttaaaaaggaaatatttttcggagcatgcacttttttttttgagatggagtttcactcttatagtccaggctgacgtgcagtggcacgatctcagctcacagcaacctctgcctcccaggttcaagcaattctcctacctcagtctcccaagcagctgggattacaggcgcgtgccaccatgcctggctaatttttgtatgtttagtagagacggggtttctccatgttggttargctggtctcaaactccccacctcaggtgatctgcccattttgccctcccaaagtgctgggattacaggcttgagccactgtgcccggcccacattcacttttttataggtggctcccacagatcaaaaaacttccactcgactaagttaatttttgattgtggaattgtaggtaaaagtgactggagagcaaagcctaactaatgaccagtc

SEQ ID NO: 14265 - DNA, 533 bp, Homo sapiens
ctctctccacaccttgactctatgtcccaatcattcattctctttccctcaaaaacaacgatgacagtaaaatacaataacaatacttaaaaaggaaatatttttcggagcatgcacttttttttttgagatggagtttcactcttatagtccaggctgacgtgcagtggcacgatctcagctcacagcaacctctgcctcccaggttcaagcaattctcctacctcagtctcccaagcagctgggattacaggcgcgtgccaccatgcctggctaatttttgtatgtttagtagagacggggtttctccatgttggttaagctggtctcaaactccccacctcaggtgatctgcccattttgccctcccaaagtgctgggattacaggcttgagccactgtgcccggcccacattcacttttttataggtggctcccacagatcaaaaaacttcmactcgactaagttaatttttgattgtggaattgtaggtaaaagtgactggagagcaaagcctaactaatgaccagtc

SEQ ID NO: 14266 - DNA, 1243 bp, Homo sapiens
tgtctgtttcagctgaccactcaatttccaatatcctgctcattatctaaaacatggtgggcactcaataagttgtgctgaatgctgatgaaaaagcttatctagttacagataagaaccattccatgggtcaagaggaaacttttggaaggaatggatatgtttcttatcttgaatgtagtgatggcttcacagttatatatatgtatcagaacttaaattctacatgttagacacatgaagtttattgtatatcaattctacctcaataawgctgcttttaaaaatgtctaaatgtatgacaatattatgttgattgtcttatacacaagttcagggactattttataataatactttgtatagaaaccagcattattgaaatgctgtttggtaacctttggaaaagaagcagcacttctaattaagtatgaatttttcacatcttggctctgatatgcaggaaacttttaaagtaaaaaaaaaataatttaattaatctcatctgtttgaaataacgctattgaatgtaagatccaacactagatattatgatacagcagatcgtttccctttgaatgtgcatttactttttgaataaaatactcaataagtgtttttcccaaaagattgtgtgtgagttgaacctgattttaaatatcctggagatactaattctttaaaaatttctttcaagagttctttcatataatacaaaactgcattttgaaactctagtttcatttaaacaggagcagaatattttcaattatattgaagaaaacattgttgtacttttttgttggaaatacccagtatatgcagaagataataacattaaagacactataactttgtattaagaccttgctaaggtgtttgaaaagacagtagtactacaggtatgagaaatgaatcatagttgtgagggaaaagtattgattttatcattatgagtaagaataagtgactaaattattcaatgacagcaaatttagaacttttggttgaaattggtttatatttaaaatttgatcacttaattttgacattaatttttgtggcacaaggttttgctgatatcaaatactccaaagcaaatatgttctaaattatttcatgcaaataattcccacaaaataatataccccaataaacatacttatgaaggacataacttattatctcttcagatggaacactacctatccttctactcatttccagtttccaatctgaggga

SEQ ID NO: 14267 - DNA, 1243 bp, Homo sapiens
tgtctgtttcagctgaccactcaatttccaatatcctgctcattatctaaaacatggtgggcactcaataagttgtgctgaatgctgatgaaaaagcttatctagttacagataagaaccattccatgggtcaagaggaaacttttggaaggaatggatatgtttcttatcttgaatgtagtgatggcttcacagttatatatatgtatcagaacttaaattctacatgttagacacatgaagtttattgtatatcaattctacctcaataatgctgcttttaaaaatgtctaaatgtatgacaatattatgttgattgtcttatacacaagttcagggactattttataataatactttgtatagaaaccagcrttattgaaatgctgtttggtaacctttggaaaagaagcagcacttctaattaagtatgaatttttcacatcttggctctgatatgcaggaaacttttaaagtaaaaaaaaaataatttaattaatctcatctgtttgaaataacgctattgaatgtaagatccaacactagatattatgatacagcagatcgtttccctttgaatgtgcatttactttttgaataaaatactcaataagtgtttttcccaaaagattgtgtgtgagttgaacctgattttaaatatcctggagatactaattctttaaaaatttctttcaagagttctttcatataatacaaaactgcattttgaaactctagtttcatttaaacaggagcagaatattttcaattatattgaagaaaacattgttgtacttttttgttggaaatacccagtatatgcagaagataataacattaaagacactataactttgtattaagaccttgctaaggtgtttgaaaagacagtagtactacaggtatgagaaatgaatcatagttgtgagggaaaagtattgattttatcattatgagtaagaataagtgactaaattattcaatgacagcaaatttagaacttttggttgaaattggtttatatttaaaatttgatcacttaattttgacattaatttttgtggcacaaggttttgctgatatcaaatactccaaagcaaatatgttctaaattatttcatgcaaataattcccacaaaataatataccccaataaacatacttatgaaggacataacttattatctcttcagatggaacactacctatccttctactcatttccagtttccaatctgaggga

SEQ ID NO: 14268 - DNA, 1243 bp, Homo sapiens
tgtctgtttcagctgaccactcaatttccaatatcctgctcattatctaaaacatggtgggcactcaataagttgtgctgaatgctgatgaaaaagcttatctagttacagataagaaccattccatgggtcaagaggaaacttttggaaggaatggatatgtttcttatcttgaatgtagtgatggcttcacagttatatatatgtatcagaacttaaattctacatgttagacacatgaagtttattgtatatcaattctacctcaataatgctgcttttaaaaatgtctaaatgtatgacaatattatgttgattgtcttatacacaagttcagggactattttataataatactttgtatagaaaccagcattattgaaatgctgtttggtaacctttggaaaagaagcagcacttctaattaagtatgaatttttcacatcttggctctgatatgcaggaaacttttaaagtaaaaaaaaaataatttaattaatctcatctgtttgaaataacgctattgaatgtaagatccaacactagatattatgatacagcagatcrtttccctttgaatgtgcatttactttttgaataaaatactcaataagtgtttttcccaaaagattgtgtgtgagttgaacctgattttaaatatcctggagatactaattctttaaaaatttctttcaagagttctttcatataatacaaaactgcattttgaaactctagtttcatttaaacaggagcagaatattttcaattatattgaagaaaacattgttgtacttttttgttggaaatacccagtatatgcagaagataataacattaaagacactataactttgtattaagaccttgctaaggtgtttgaaaagacagtagtactacaggtatgagaaatgaatcatagttgtgagggaaaagtattgattttatcattatgagtaagaataagtgactaaattattcaatgacagcaaatttagaacttttggttgaaattggtttatatttaaaatttgatcacttaattttgacattaatttttgtggcacaaggttttgctgatatcaaatactccaaagcaaatatgttctaaattatttcatgcaaataattcccacaaaataatataccccaataaacatacttatgaaggacataacttattatctcttcagatggaacactacctatccttctactcatttccagtttccaatctgaggga

SEQ ID NO: 14269 - DNA, 1327 bp, Homo sapiens
atctatttgcttctatttcattatcaatcttctcctctgttttgtgatattaatacaatatttccagacatttagatttcattagaaacttacatttaaataggaacttctgggattttaaatgtcaaatcacatgctatgatatgtatgtgtgagtatgcttgtgtctctctttatatatagacayacacttttatataggttgtaggcattatgtcagccagattgtaaattatcagaatgtgaatccacacagtccatatagctcaaactggccaactcccatcaagtatattgtaaaatgaggtttatcccagttgcccttgcttaaatctacctcacacaatcttaggggatttgaaaggagtgcttgggtacagtactgtgcagtgcagttgcagtcaggctcccgcaattgagtgatggattcctcccatccccagcatttgctggctctgtgaccctggacagggcaagtgacttcactgaagttctttatctgcaaatgggcataaaggtgctcccccccgttttgaaggactaaacgcaaatgttggcatgaaacctttatcatactgccagctaagaacaggagcccaacaaaaaaggaactcgcatgcagtcagacatgtctgcacccaggagtgtttttggtgcaaacctattggttggctgtcaagcagaatgttgttgaatgtcaaggcagcagtgtttaggtaactaagctggtaacatacttcccttcttgttcatggtagctgaaatcagacactggctctcttttcctgtaaagggccacgtagaccttcagtctttggggatcatatgcagtctcagtggcatattctttgtctttaagtttttcacaattaaaaacgatgtaaaagccatttttagcttgtgtataaaaacaggctgcaggctggtttcgacccacaggccatagtctgccaacccaggatcaaattaatcttccaagatcagactgaaacgcagagtccaacgccgtcaatatcagttactttctgcagtttgcaaattatatgtcaggcattttactgaagacatgtaattttgctctaccatgtgctaaaatccagcatgtttattcattaaattaaataacgcatttcctctgtccatgcttagcacacatcgagcatcccaaaacttcacctattctaactgtgtgaaatgtggctaataataaaagcagtattgtagtcagtggaagtgttcaaaaagggtaattttgtataatagtagtagtgatatgaagaccttgacctttctgcacaaggaactgtacaaaatatgcaaagtaata

SEQ ID NO: 14270 - DNA, 1327 bp, Homo sapiens
atctatttgcttctatttcattatcaatcttctcctctgttttgtgatattaatacaatatttccagacatttagatttcattagaaacttacatttaaataggaacttctgggattttaaatgtcaaatcacatgctatgatatgtatgtgtgagtatgcttgtgtctctctttatatatagacacacacttttatatargttgtaggcattatgtcagccagattgtaaattatcagaatgtgaatccacacagtccatatagctcaaactggccaactcccatcaagtatattgtaaaatgaggtttatcccagttgcccttgcttaaatctacctcacacaatcttaggggatttgaaaggagtgcttgggtacagtactgtgcagtgcagttgcagtcaggctcccgcaattgagtgatggattcctcccatccccagcatttgctggctctgtgaccctggacagggcaagtgacttcactgaagttctttatctgcaaatgggcataaaggtgctcccccccgttttgaaggactaaacgcaaatgttggcatgaaacctttatcatactgccagctaagaacaggagcccaacaaaaaaggaactcgcatgcagtcagacatgtctgcacccaggagtgtttttggtgcaaacctattggttggctgtcaagcagaatgttgttgaatgtcaaggcagcagtgtttaggtaactaagctggtaacatacttcccttcttgttcatggtagctgaaatcagacactggctctcttttcctgtaaagggccacgtagaccttcagtctttggggatcatatgcagtctcagtggcatattctttgtctttaagtttttcacaattaaaaacgatgtaaaagccatttttagcttgtgtataaaaacaggctgcaggctggtttcgacccacaggccatagtctgccaacccaggatcaaattaatcttccaagatcagactgaaacgcagagtccaacgccgtcaatatcagttactttctgcagtttgcaaattatatgtcaggcattttactgaagacatgtaattttgctctaccatgtgctaaaatccagcatgtttattcattaaattaaataacgcatttcctctgtccatgcttagcacacatcgagcatcccaaaacttcacctattctaactgtgtgaaatgtggctaataataaaagcagtattgtagtcagtggaagtgttcaaaaagggtaattttgtataatagtagtagtgatatgaagaccttgacctttctgcacaaggaactgtacaaaatatgcaaagtaata

SEQ ID NO: 14271 - DNA, 1327 bp, Homo sapiens
atctatttgcttctatttcattatcaatcttctcctctgttttgtgatattaatacaatatttccagacatttagatttcattagaaacttacatttaaataggaacttctgggattttaaatgtcaaatcacatgctatgatatgtatgtgtgagtatgcttgtgtctctctttatatatagacacacacttttatataggttgtaggcattatgtcagccagattgtaaattatcagaatgtgaatccacacagtccatatagctcaaactggccaactcccatcaagtatattgtaaaatgaggtttatcccarttgcccttgcttaaatctacctcacacaatcttaggggatttgaaaggagtgcttgggtacagtactgtgcagtgcagttgcagtcaggctcccgcaattgagtgatggattcctcccatccccagcatttgctggctctgtgaccctggacagggcaagtgacttcactgaagttctttatctgcaaatgggcataaaggtgctcccccccgttttgaaggactaaacgcaaatgttggcatgaaacctttatcatactgccagctaagaacaggagcccaacaaaaaaggaactcgcatgcagtcagacatgtctgcacccaggagtgtttttggtgcaaacctattggttggctgtcaagcagaatgttgttgaatgtcaaggcagcagtgtttaggtaactaagctggtaacatacttcccttcttgttcatggtagctgaaatcagacactggctctcttttcctgtaaagggccacgtagaccttcagtctttggggatcatatgcagtctcagtggcatattctttgtctttaagtttttcacaattaaaaacgatgtaaaagccatttttagcttgtgtataaaaacaggctgcaggctggtttcgacccacaggccatagtctgccaacccaggatcaaattaatcttccaagatcagactgaaacgcagagtccaacgccgtcaatatcagttactttctgcagtttgcaaattatatgtcaggcattttactgaagacatgtaattttgctctaccatgtgctaaaatccagcatgtttattcattaaattaaataacgcatttcctctgtccatgcttagcacacatcgagcatcccaaaacttcacctattctaactgtgtgaaatgtggctaataataaaagcagtattgtagtcagtggaagtgttcaaaaagggtaattttgtataatagtagtagtgatatgaagaccttgacctttctgcacaaggaactgtacaaaatatgcaaagtaata

SEQ ID NO: 14272 - DNA, 1327 bp, Homo sapiens
atctatttgcttctatttcattatcaatcttctcctctgttttgtgatattaatacaatatttccagacatttagatttcattagaaacttacatttaaataggaacttctgggattttaaatgtcaaatcacatgctatgatatgtatgtgtgagtatgcttgtgtctctctttatatatagacacacacttttatataggttgtaggcattatgtcagccagattgtaaattatcagaatgtgaatccacacagtccatatagctcaaactggccaactcccatcaagtatattgtaaaatgaggtttatcccagttgcccttgcttaaatctacctcacacaatcttaggggatttgaaaggagtgcttgggtacagtactgtgcagtgcagttgcagtcaggctcccgcaattgagtgatggattcctcccatccccagcatttgctggctstgtgaccctggacagggcaagtgacttcactgaagttctttatctgcaaatgggcataaaggtgctcccccccgttttgaaggactaaacgcaaatgttggcatgaaacctttatcatactgccagctaagaacaggagcccaacaaaaaaggaactcgcatgcagtcagacatgtctgcacccaggagtgtttttggtgcaaacctattggttggctgtcaagcagaatgttgttgaatgtcaaggcagcagtgtttaggtaactaagctggtaacatacttcccttcttgttcatggtagctgaaatcagacactggctctcttttcctgtaaagggccacgtagaccttcagtctttggggatcatatgcagtctcagtggcatattctttgtctttaagtttttcacaattaaaaacgatgtaaaagccatttttagcttgtgtataaaaacaggctgcaggctggtttcgacccacaggccatagtctgccaacccaggatcaaattaatcttccaagatcagactgaaacgcagagtccaacgccgtcaatatcagttactttctgcagtttgcaaattatatgtcaggcattttactgaagacatgtaattttgctctaccatgtgctaaaatccagcatgtttattcattaaattaaataacgcatttcctctgtccatgcttagcacacatcgagcatcccaaaacttcacctattctaactgtgtgaaatgtggctaataataaaagcagtattgtagtcagtggaagtgttcaaaaagggtaattttgtataatagtagtagtgatatgaagaccttgacctttctgcacaaggaactgtacaaaatatgcaaagtaata

SEQ ID NO: 14273 - DNA, 508 bp, Homo sapiens
tgtatcctatttccaagagtaactgagaatgatcttctcctgcttaatcacagtttctgctgatgttgtgaggcaggagctgggagatcttggcaatctgaattctatagcccaaagtggggaaaaaaaaaaaaaaaaaaaaacaccagagcaccaaaggattatggaggatcatttctaacatggtatccaggmtagccaaccaaagaccagaggggtctctcctgtttataaacttcattatctttgctaaatgggtgaattattggtaacaatcttagtcattaataaaattcaagtcttatttgctctaaagaacagggatttaagtgagttatatattataattacactaattgatttcaaacaatggtgacaaactctacatcatgaagtcttccatgaaaactaagtggctatgtggttatattcccaccctgaaacaaattctctttgtgcagtttatataatgtttctattaagaatcatatatcaccacccaataact

SEQ ID NO: 14274 - DNA, 556 bp, Homo sapiens
ggcaggaggtgaaaggcacttcttacatggtggcagcaagaaaaaaaatgaaagagaagtcaaagcagaaacccctgataaacccatcagatctcttgagacttgttcactatttcgagaatagcatgggaaagaccagccctcatgattcaactacctcccccttgggtccctcccacagcacatggaaattctaggagatacaattcaagttgagatttgggtgggggcacagccaaactatatcacaaggcctagaagtcgggaccccaagagcccactcggtgctctaccaactgtagctgggctggtacctgaactaatactgggttcttataaaggttattttttctgtagaaggttgttcaatttggcattcctgtgagtaggatgwttggtggaggcttcgcttcagctatcttgctctacttcctggatctagaccatataccataaagcatgtagctcaaggggaaaaacgttagaaattaggatgatagcagaacatagttactgctggcttgatttaacaaggtattgaacaaaataaatgact

SEQ ID NO: 14275 - DNA, 527 bp, Homo sapiens
ttctttttatttcatttttatgtttgaagaagatatmtaaataatataaaaacatacactagtattcaaattttctgataattattttctaaatgaatttttgtaataatgtttctaaacatgatttcttaatcactactttttaatttttagatttttaattattatggatacataatagttgcatgtattcttgggggacatgtgttattttgatataaacatacaatgaaagacgaatatttcatgttctcactaatatgtttgagcaaaaaaaaaaaattgaactcatggaaacagacagtagaataatggttaccagaggctaggaagtgtggttaatctttttttttttttttgaaatgttttatttgttgccttccttctctaaaaagagctttgctttcttcttcttatttttatatcagtgtgaactcagatttcttatttatttaataactgccataggttgaagggaaaactctttgagctagtttttgtttttggttcttccctcttattccaca

SEQ ID NO: 14276 - DNA, 527 bp, Homo sapiens
ttctttttatttcatttttatgtttgaagaagatatatwaataatataaaaacatacactagtattcaaattttctgataattattttctaaatgaatttttgtaataatgtttctaaacatgatttcttaatcactactttttaatttttagatttttaattattatggatacataatagttgcatgtattcttgggggacatgtgttattttgatataaacatacaatgaaagacgaatatttcatgttctcactaatatgtttgagcaaaaaaaaaaaattgaactcatggaaacagacagtagaataatggttaccagaggctaggaagtgtggttaatctttttttttttttttgaaatgttttatttgttgccttccttctctaaaaagagctttgctttcttcttcttatttttatatcagtgtgaactcagatttcttatttatttaataactgccataggttgaagggaaaactctttgagctagtttttgtttttggttcttccctcttattccaca

SEQ ID NO: 14277 - DNA, 2354 bp, Homo sapiens
ggaagaacaaattgtgatatgttaacacagaaaatgcaaccatgaaatcttacaaatagcaaatggatataagagggctgtatgcaagaaatctggagaagcatgtagaagtgaatattaaagggcttataaatttgcattgtsagacaaatgcacaaaatagagggctcttttctgtcaaaatgtcattgatttgattaaaatagtttcaattaacaattattgaaaccttacaggtgaaatacccaattgtagaaaggtgtaagataaacaacttatttttctaggctactagtatgtgctaaaaaattagattgtcttaattataaccatgacaaaaattatttatctgactccagcctccacttctattgtagaaaaaaaaccctttcaaaagcatatatattatctaaagaaaggctgacacattaacccacccttaacatccactaatgcattgacatttgttttatcatattaatttccatcatggatgctgggcaatgaatgataagagtccactaaaaacatattaatatggaagatagaaaagatgttgaaaggggttctagattaaaatgctagaaaaatgtttgttacttaaaatttgacattttggctgacttttccacccttgcataaactctaagactaagatcataatttcttcattagattatgctagtttagcagagcagagagttgatcaagttattttaagtggtagaggtgtttattgtctggatgccttttggaataaaaaaatcaaggtctttagccaagtaggtcttataaaaacaaacaaactaggaaaatgaaccaagcagatcttagtggcagctggaactacaatagagtcgagcttcaatgatgtaagaattgatgctgatgatgatgctggtggggctggaggtattagtaaaaacctcacatcccctctgggatcctagcagcaggagagcttggcccctgaaatcttgctggtgggattcagttctccctcttggctactctttggattttggttgccttttcccactatagtgccctctgttaatgcctctgagcatctgcctgctcttatattctgcttcctcaggtttggctcagttgtgatcacacccctcatcacagctcctttacataataaactcagttagtatatctttttagctacctctcctgttactagtgccttgatactctgacctttgaaactcctatccattaagtcagaatctccatttctttcttggtggaacaatccatgataagtggccatccagtcagaactatttccattagatcaagttttggccaggcaggtatcacaactagcacatgagtgttaaaactattaggaaagcagttgtttattttttcaaatatgattcctaaaaaaaaaaaaatcccttaaatccctgatagtaggcataaaagtcacttttattaatagatgaattttcaatttattatcttattattattttttaaataaattttaattttaaatttttgtgggtacatagtagatgtatatacttatggggtacatgagaagttttgacacaggcatccaatgcataataataacatcatggagaatggggtatccataccctcaagcatttgtcctttgtgttacacacaatccaattatacttttagtaattttaaaatgtacatttgaattattgactatagtcatcttgttgtgctatcgaatattaggtctcattcattcttcctatttttgtctacccattagccatcccaaacctccccctcatctcccactacccttcccagcctctggtaatgatacttctactctctatgtctatgagttcaattgtttttatttttagatcccacacataagtgagaacatgtgatgtctgtcttactgtgcctggcttatttcacttaacataataacctccagttccatccatgttgttgcaaatgacgggatatcattctttttttatggctgaatagtattccattgtgtgtatgtacattttccttatccattcatcttttgatggatatttagtttgcttccaaatcttggctattgtgaacagcactgcaacaaacatgagagtgcacatgtctcttcaatatcctgatttcctatcttttgggtatacaccttccagtgtgatttctagattatatggcagctccatttatagtgtttttgaggaacctccaaactgttctccatggtggctgtactaatttacattcccaccaatggtgtacaagagttcccttttctccacatcctcgccagcatttgtatgaaacccttaaaagttaaaatcatggtccctgagaactcacag

SEQ ID NO: 14278 - DNA, 2354 bp, Homo sapiens
ggaagaacaaattgtgatatgttaacacagaaaatgcaaccatgaaatcttacaaatagcaaatggatataagagggctgtatgcaagaaatctggagaagcatgtagaagtgaatattaaagggcttataaatttgcattgtgagacaaatgcacaaaatagagggctcttttctgtcaaaatgtcattgatttgattaaaatagtttcaattaacaattattgaaaccttacaggtgaaatacccaattgtagaaaggtgtaagataaacaacttatttttctaggctactagtatgtgctaaaaaatkagattgtcttaattataaccatgacaaaaattatttatctgactccagcctccacttctattgtagaaaaaaaaccctttcaaaagcatatatattatctaaagaaaggctgacacattaacccacccttaacatccactaatgcattgacatttgttttatcatattaatttccatcatggatgctgggcaatgaatgataagagtccactaaaaacatattaatatggaagatagaaaagatgttgaaaggggttctagattaaaatgctagaaaaatgtttgttacttaaaatttgacattttggctgacttttccacccttgcataaactctaagactaagatcataatttcttcattagattatgctagtttagcagagcagagagttgatcaagttattttaagtggtagaggtgtttattgtctggatgccttttggaataaaaaaatcaaggtctttagccaagtaggtcttataaaaacaaacaaactaggaaaatgaaccaagcagatcttagtggcagctggaactacaatagagtcgagcttcaatgatgtaagaattgatgctgatgatgatgctggtggggctggaggtattagtaaaaacctcacatcccctctgggatcctagcagcaggagagcttggcccctgaaatcttgctggtgggattcagttctccctcttggctactctttggattttggttgccttttcccactatagtgccctctgttaatgcctctgagcatctgcctgctcttatattctgcttcctcaggtttggctcagttgtgatcacacccctcatcacagctcctttacataataaactcagttagtatatctttttagctacctctcctgttactagtgccttgatactctgacctttgaaactcctatccattaagtcagaatctccatttctttcttggtggaacaatccatgataagtggccatccagtcagaactatttccattagatcaagttttggccaggcaggtatcacaactagcacatgagtgttaaaactattaggaaagcagttgtttattttttcaaatatgattcctaaaaaaaaaaaaatcccttaaatccctgatagtaggcataaaagtcacttttattaatagatgaattttcaatttattatcttattattattttttaaataaattttaattttaaatttttgtgggtacatagtagatgtatatacttatggggtacatgagaagttttgacacaggcatccaatgcataataataacatcatggagaatggggtatccataccctcaagcatttgtcctttgtgttacacacaatccaattatacttttagtaattttaaaatgtacatttgaattattgactatagtcatcttgttgtgctatcgaatattaggtctcattcattcttcctatttttgtctacccattagccatcccaaacctccccctcatctcccactacccttcccagcctctggtaatgatacttctactctctatgtctatgagttcaattgtttttatttttagatcccacacataagtgagaacatgtgatgtctgtcttactgtgcctggcttatttcacttaacataataacctccagttccatccatgttgttgcaaatgacgggatatcattctttttttatggctgaatagtattccattgtgtgtatgtacattttccttatccattcatcttttgatggatatttagtttgcttccaaatcttggctattgtgaacagcactgcaacaaacatgagagtgcacatgtctcttcaatatcctgatttcctatcttttgggtatacaccttccagtgtgatttctagattatatggcagctccatttatagtgtttttgaggaacctccaaactgttctccatggtggctgtactaatttacattcccaccaatggtgtacaagagttcccttttctccacatcctcgccagcatttgtatgaaacccttaaaagttaaaatcatggtccctgagaactcacag

SEQ ID NO: 14279 - DNA, 651 bp, Homo sapiens
aaaagtttaaaatatcaccaatgatacagtattcaagttgaaagtttcacaaagtaaagggacaaaggtgacatycatttcagctttttctctttccttgaatttttgatttatatgactcaaaaggttaatcttagtaaagcacagggaaaagatagttatccaagtgacatttgcagacattctacaggtatgatatattaaagggtgcatttaggagtccaaggaatattggaaaataccacacatagacagttttaacattgctgccttcttgtcaaaagtacaaaatgatcaacatggaaaggcatcatttacagtcagaatttgactggaagggattgtaaaaaacaataatttcaattctgttatttttaacccaaagttattgggcagcaattccgtaactggtaacaattttccaaattataattaagtacacgtgaatgaaagaaatccaatggggtagcgggggaaaaggttgattaagatgttgtcttcaaggaacctaaagccttgtgaggcagacatatttaaacatgtaaatagtgcaaggcagagtaaagtaattgccatttagaagttcaaagtgctttgagagcccataggaagaagtaattaattctgacttgtacagtggggaaagctcca

SEQ ID NO: 14280 - DNA, 438 bp, Homo sapiens
tgataaaggatgcatagtgtattatgctaccttctggtacttatctgtccaatgccagcttctcacatatcaccaacacaagctkttgataaagatgagtttgttgtctgttgatgctttctcatgaagagctgatggatttttcaggaagtttctttaacgtaatgagctgttaagttatttgcctgaacgagagtcttctggaatagtaaaggtaaaggcaaatcccaagccacatgtggaggtagatggatttgttctcatatcatacaatgacatggttatttaattacaccttcatctctgttactggagaaggaactcttccacagcagggctgtcctgttagtcatttttgtttctccacaaatgactagtgtttctctgcctggaacatagtggtatcaggtgagtggaggtggaatggcaatggtagca

SEQ ID NO: 14281 - DNA, 528 bp, Homo sapiens
gctgttatttaaatataaatgttattatttttgaagaaataaatgtgtatacatctatctctttcagaagaattgtgaattgtttacaaatatattttctgaaatatcttttttttcttagtactgaggtctgatggtaaatgtttagtaactagctttgtataataaaaagccagatttatggtgttttcagattttcatggtgtaaaaattcccagtggccaatttcaarctactgacatgagatctcggaacatagcattaggaaaagatgcagaaatgggcttttttagaagccagtgcataatacttccaacacaacagtgacttagcagactgagcgtcactttactttaatgattaatcacaataattgtcaactgacattttttatttaatgacttataacatggttccaattataaaatgtggaaaatataagtaaaataaagacaaaattaacaataaatctaacacccccaaaatgattgttacacatatgtatatatcctttgagagcttttatta

SEQ ID NO: 14282 - DNA, 528 bp, Homo sapiens
gctgttatttaaatataaatgttattatttttgaagaaataaatgtgtatacatctatctctttcagaagaattgtgaattgtttacaaatatattttctgaaatatcttttttttcttagtactgaggtctgatggtaaatgtttagtaactagctttgtataataaaaagccagatttatggtgttttcagattttcatggtgtaaaaattcccagtggccaatttcaaactactgacatgagatctcggaacatagcattaggaaaagatgcagaaatgggcttttttagaagccagtgcataatacttccaacacaacagtgacttagcagactgagcgtcactttactttaatgattaatcacaataattgtcaactgacattttttatttaatgacttataacatggttccaattataaaatgtggaaaatrtaagtaaaataaagacaaaattaacaataaatctaacacccccaaaatgattgttacacatatgtatatatcctttgagagcttttatta

SEQ ID NO: 14283 - DNA, 529 bp, Homo sapiens
gagaggggaaggttatttcacttaatcctcaaaacaatactgtaaggtaggttctattataatcacttttagaaatgaggaaactacattttggagaggttgagaaattttctgaaggccatatatgcatccaatctttccttgtctctatggtggattaagtcaaagatctgggccaggcacagtggctcatgcctataatcccagcactttgggagtccaaggtgggaggatcayttgagcccagaagttcaagaccagcctgggcaatatagtgagactccatctctacaaaaaatttttttaaaaaagtagccaggcatggtggctacatgcctgtagtcccagctactcaggaggctgaggtggaaggatggcttcactccgggaggtcaaggatgcagtgagccatgatcacgtcactgcactccagcctgggcaacagaaaaaaccgaccctgtctcaaaaagcaaaaaacaaaaaaataaagaaaaatctgctcagcacccttggaatcttgaaggtaaca

SEQ ID NO: 14284 - DNA, 562 bp, Homo sapiens
gtggtgtgatcctggctccctgcaacctccacctcttgggctcaagcaggctttcaaccttagcctcccgagtagctgggactacatatgtgcaccgcccacccagataattttttttattttttgtagagacagagtcttgccctgttgaccaggctggtcttgaactcctgacctcaaggagatccacccacctcagcctcccaaatagctaggactacaggcacataccaccacacctggctaaattttttaaaaaattgtttaagtagagatgaggtctcactatgttgcctaggctggtctcaaactcctgggctcaagcagtcctccgccttggccaccccaaagtgctgagattacaggcatgygccaccacacccagccagttttcactatttttaaaaaatgtgtttccaataaaaatttcttagaaggaaaagtactgaactacagcaaaacaagtaagagggtaaattccttgattgtcatcatgttctaagcccagcatgtgctttaatatggggcttcccagtccaaataattaaatctaactgcaaca

SEQ ID NO: 14285 - DNA, 542 bp, Homo sapiens
acagtcttaagttagcaaagactgaaaggacatgttctctagtttagagtgtatgacattcaatcaagacctagaagacttatgccatcccccaagaatgtactaaaaatcatctgggattatagaaggaattcagggaaccctatctgcaagattatttacatgccagatccagtaatttatgatcttcttggtgtctgtaaagtcataaaagtcacaggattacaccatagtcatttgcttgaaattgcattcaagatatctgcattccattccttagatgctttccaaaataataaaatacctggcargattctgtgtggaatctcagtcttcctatgtgggatgatcacatgtagcatccttagtgccaaacctaataaaacaagcttattgtttttggttttggcttttttttttttttttttttttttggagcatggttgaaaaaacttatgatacccagaacaggtttaataaatttttctaaactggatattgattatcaaagccaattatatgcctctaatatattgatttgg

SEQ ID NO: 14286 - DNA, 1320 bp, Homo sapiens
ggcagctcacacctggattcatccatccatttataaattatacttaggcaccaaccaacttccagatgcccggcttgactctggggatacaatgtttagtaaaaataggcctgattcctgtctcacggagtgctcagtccagcgaaggatttgaacattgaccaagaatcacagagagatagagctgcagcttgtgttcatgctgggagagaagcacatagcactgcaggggcctgccgtcagggtctgacagcatcgggggaagcgtcctgaagcagtgacactggaacggaggtcagctaagccaaccagggagagagaagtttcccaacagagccatcataccagagctctgtgatgagaggcggtgtggaaggttgagaatgtgaggactgaaagctggaggggagagaataggaatacagtgcggaaatgaccggagaacaagcaggagcagcagggctttggccatgtggaagagctctgcccttatcccgaaagtcatgagaagccagcgggttccaggtgctggggagggaatgccccgtgaacagctcagacaggaagtggtttaggacaagacaggaaagcttcatctcatgaaaccatttcttcagaatcctgtctccttttctatatgcatgaaggatcatttcaaatatcatatacaatatttgtaacagaaacttacttcatcagctatgagaaaccgtggtgataagatgcatcatcattttatggaccactaagaaaaaaggcccaagatggggcgtctaataggaaactctctctacccccaccacataaagctgtgatgccctcaatgagagggtaaatgagaaatagagccaccatgcagaaagggggagcaaggaaacccatgcatctcaaccttgacactaaatgggggtgaaaaatccttccctgagaacaggagtcccaagccggtggtactcatgcaggtttgctttctgaatttgcactatcagtgtgatccaaaagaacatcaagcagagagtgtaatgtccaacagtctgaggctgggtggccctggatggctggcaaaaacagtactatcctctcccggagcacctgccttctgtccgggccaacagtaagaatatgataccatcatctgggagatgcctcctgacttcagmgatccaaaaatgtatatcttggaaccaatgaaagatggcaaaagctccatttcctacatcttaccccagagaattggttcaaatgacctgtctacagtctctccaaggtcttacctgccctgtcacgggaagttgtatacttgtttggtgctgagacact

SEQ ID NO: 14287 - DNA, 548 bp, Homo sapiens
ctgattattatattcyattgttcatattgtgatttgtttctatttcaaaagaagtaagtttcaagaagccataatcaaagggtaagttcctaccaggaaaaggaatattactgtcaatataaacacattccaccagttttttaattgactacagaattttgatgacataaagaagaacctattggactttgcaaaaactatgcctaatagtcagttgcagcaaccacacaattcttacctggctgctttatacaccgttcctggaagctatgaaagtcattgctttgggaaacattggtaagcaccattgtgaaatgcttcagaaaggggccacaggggattattaaaaaccttcagccacccaactgatttgtaggaaggcaatcctgtattagtcctctacaattacagaacattttctttaattgtacaagtgaaaagaatggaatggaaccagtctggtttagagaacaaaacgtaaaagatgaggatatgctattccaatcacaaaccctgtttgcagtgagacatggatctgttcatctctg

SEQ ID NO: 14288 - DNA, 549 bp, Homo sapiens
gaaacacagtaaagattatcaccatattgtactagatccacaatatttgagctaacgagtgagtgttatacacattttgtggtaatttgttacacagcaataaaaactaatacactgtacaactcccagtccacaacctgccgttcattttatatatatataataattatatatatttatatatataattatatataatatagataatatatatatactttaagttctgggatacatgtgcagaatctggaggtttgttacataggtatatatgtgccacggtggtttgctgcaygcatcagcccatcatctaggttttaagccccacatgcattaggtatttctcctaatgctgtccttccctttgtctcccaccccctgacaggccccagtatgtgatgttcccctccctgtgtccatgtgttctcattgttcaactcccacttatgagtgagaacatgtgctttttggttttctcttcctgtgttagtttactgagaatgatggtttctagcttcatccatttcccttcaaaggacaataactcat

SEQ ID NO: 14289 - DNA, 537 bp, Homo sapiens
tgttctaaaattgatttgcagtgatggtaacataactataaatttactaaaaacagtcaactatacacttatcataaataaattttatttcaataaatcattaaaaaacaaacaaacaaacaacagccaggatttctttgtgtcatacgctaccaaaagaaccctaataaagacacckcttttctgttgatcctgtataacttagtctgcagatgggagatgagagtttcaaatttgggatcagagttgtttttctatttgccaagctcagtgtgctgttcttatattttaaccttaactttttaaaaaaaaatcctgattcaacaggaataaaagaaaatgccacgttctaacaactaaatattggaagagttgcttaaaaactgtttcttgtgttcaaaaactacccttcaattactcctcataagattgcaacattaagaaaagcaagataataaactagaagctggtggtgggtatgtatgtactgtgagcaggagtcttcctcttcctactgcctcaaggaaaacttgttca

SEQ ID NO: 14290 - DNA, 537 bp, Homo sapiens
tgttctaaaattgatttgcagtgatggtaacataactataaatttactaaaaacagtcaactatacacttatcataaataaattttatttcaataaatcattaaaaaacaaacaaacaaacaacagccaggatttctttgtgtcatacgctaccaaaagaaccctaataaagacacctcttttctgttgaycctgtataacttagtctgcagatgggagatgagagtttcaaatttgggatcagagttgtttttctatttgccaagctcagtgtgctgttcttatattttaaccttaactttttaaaaaaaaatcctgattcaacaggaataaaagaaaatgccacgttctaacaactaaatattggaagagttgcttaaaaactgtttcttgtgttcaaaaactacccttcaattactcctcataagattgcaacattaagaaaagcaagataataaactagaagctggtggtgggtatgtatgtactgtgagcaggagtcttcctcttcctactgcctcaaggaaaacttgttca

SEQ ID NO: 14291 - DNA, 490 bp, Homo sapiens
gcaaaattatctaatgaatgtgtactttgtgtcagrcaagaatatgaagtctggagacacagtggtagacatagttcctgacaggaactttctgaagaaatgctttttaaaattaagatttgaatgatggaaatttgtgttccatagaaagacatagaaaaaataagttacagatagaggtgtaaagcacatgtacaggagctctgagcttgaggtatttggaaatttgttttaaaaaaggctataataaagaatttaaaggtatcaaagagtttgttattttaaatagaagactgtgatattatttgaatttccagcctatttggagcaagaaattgtgtgaatcaagtgagacagcagagttgggagccaagtcttagaatatttacttaaatatttttaatatgttatgcaaggcatgaaataaagacaattaaataggaccacataaaataattctaaatatattgcaactaatttaaagttaagt

SEQ ID NO: 14292 - DNA, 528 bp, Homo sapiens
tcctatttgataaacaggattttagaaatctggtaatatttcaaggaaaacagaaaacctttttttgsctgcatcgtattccacggtgtgtatgtgccacattttctttatccagtctatcactgataggattcatttgtcaatagagtattttatagcagctctaaaaatttgaaattaacaaccaagaatttaaagctaggtaaatatggctttacatgaaagatcatatctatcattcattcatatatttacagacatctactaagctctttctatgtgctaagacctaaggatgtagaatagtaagcaggatgaagttcctgctcacaaacaggttaaagttgacatctagaaacaattatataggcatttaggattcacaatgttaggtcaagaaaaaataatgttaatattacttttgggaagaaataaaattccatgaagaagtaataaaagctaagatgaaattttaacaggaagtagaaataaatcactggaagcaggggagactataccagagagatg

SEQ ID NO: 14293 - DNA, 638 bp, Homo sapiens
ctgagtggttttctttgttcaggaagtctatgataattgcaatcatcatgtccacttggcacagtattgcaggtcatagccaaaacaaaaagtcaagaaaaaaaatgatacactttgtggcctactgatayaattgaatattacactaaaattaaaaaaaaagcactgaactactgatatagcattaacatgaataaatctcactgataatactgagcaagagaagccaggaaaaatgagaatatacattattattttgttaatattatgttcaggagcaagcaattctactccataatagcagacaccaaaatagtatttgaatttcaaggaaggggttaactaggagagaataaaaatgaatctcttgcattgatagtaacgtgctgtatagttgagggttacatggctgaaattacatgtaaaattaatactctatcaaacttgtattatgtttatctgctcacttgagtttttgtattgatgtctcatagcagcatacatctccaaacattttttgtttgttttatagtaataatggcatagtttcccattgtaaaaacatagaggaggtaagaatatgggagtgaggaggaaaacagctagggccatgaatagtagtctcgtgtcaaaatgag

SEQ ID NO: 14294 - DNA, 638 bp, Homo sapiens
ctgagtggttttctttgttcaggaagtctatgataattgcaatcatcatgtccacttggcacagtattgcaggtcatagccaaaacaaaaagtcaagaaaaaaaatgatacactttgtggcctactgatacaattgaatattacactaaaattwaaaaaaaagcactgaactactgatatagcattaacatgaataaatctcactgataatactgagcaagagaagccaggaaaaatgagaatatacattattattttgttaatattatgttcaggagcaagcaattctactccataatagcagacaccaaaatagtatttgaatttcaaggaaggggttaactaggagagaataaaaatgaatctcttgcattgatagtaacgtgctgtatagttgagggttacatggctgaaattacatgtaaaattaatactctatcaaacttgtattatgtttatctgctcacttgagtttttgtattgatgtctcatagcagcatacatctccaaacattttttgtttgttttatagtaataatggcatagtttcccattgtaaaaacatagaggaggtaagaatatgggagtgaggaggaaaacagctagggccatgaatagtagtctcgtgtcaaaatgag

SEQ ID NO: 14295 - DNA, 557 bp, Homo sapiens
tacaatttaaataagagtatatcactcccttataattatgccaacattacatgaagcagaataaatggaacataataaattatttcacatagaaggagtattcctggatgaaaattctgatagagatatttgaatttaaaatctaagagtatttactaaaaaactaagrttttagatatattactaagtaacattactaaggttttagtaagattactaagaaaggaaggtgatcgggtcaagggaatgatagctatatccatttcttagaacttttttattaggttggtgcaaaagtaattgctgtttggccattacaatggtttggccattacgtttaatggccaaaactgcaattatgtttgcaacaacctaatagtaaactcaatcgagtttactaaaatcaaatttattggatttgaattgcaaaatgataacagtctacattccagtagtattaaaatttaccttgcatcattctttaccattcctgtttttcttttgtatttctttcaaatctaccagctcacacaattccaatatcttctggcatacaa

SEQ ID NO: 14296 - DNA, 548 bp, Homo sapiens
gttcatataagccataggctaatttcaccagcaaaatgcaaaatcactaattgcaaagtcaaatgttcttccctttacctcagtaaaatatgtataggatgtgctagttttaaaagtgaagttttcattaaaaatactgacagtctctttggatttgcttgtcagatctcatttaaaatggaaatatattatttaatattatctactaagaatctttagtaaccctcatctaacaccactgtaaaactattgtttctatgctgtatattttaaaaagtacacttcagaatattttgttaatataatttagaagtcttaatgctgcaatagcaaagctctgaaatgttaatacatatagtttcaaytaaatatcaatagtaaaaacaaaatgtgtcatagtcagatattaacaagactttatatgtaaatattgtatacattacataataaaatactgcatgaatatgctcttgtctgttcatattatttgaagaacaaaaccaactttataacttttcaaaactgtttgtgacaatttatgcctactt

SEQ ID NO: 14297 - DNA, 535 bp, Homo sapiens
catttacacttttagtttcaatgtttttattgaaacaaagagtagtcagaaaaccttttgtttccaggttaattcacaaacaaacttttgaacaacagggttacaaatataaaatatgcagtataggtttatataaaatatatttatattagttgtttaaattgtgtgtatatatatataaaactatatatataggaatatatatatgtattccaatgtctttataatatgaagacacatatgttttctatcacctctgaagaaaagttaggaaagtccagaggaatgagatatattcccaccctttaatcttcatattagtagatgggtttgggtagttaagagtttgtagaacataaacctacgctccccacctgctcctgcaggcgaaagtgtacttagctctcaggcacagtcttscctttatggtaaaaagggtgttttataccgtgttgatgactaatatttcaagtacattttgcagactcattttcccagcattctgttgtttcagctgtaccattcatgccacaat

SEQ ID NO: 14298 - DNA, 630 bp, Homo sapiens
ttcaaaccatagcatatgctaaggactctttactattatcccgaaaacactggaaaggaagctccatgtggacagggagttctgtttgttttgttccacactgattccctcaagatctaagagcagtgctctgcactatttatatgctcaaattccagtggtttgtctccagagctcaccctatttaccaccatactgtgagtcataactgatacactagtgctctaccctctgtgaaaagctgcactgtgggggcagctctagaatctgcctatagcatttatcactggggtgactttggcaagttattcacctgttggatgcttttgtttcctctctataaagtgggcatgacrgcagcacgacctcatacactggtgaggattaatatcaattgcataacaaaccacaaaaaaaatgatttaaacaataacagtcatttatttttgctctcaaatctgcaatttggacagggctcatcagggaaaactcatttctgctccacacagtatcaggagggacagcccagtggagggcaggatgatccacatgcaagacagacagctctctctcagggcacgtagttggtgccagttgctagctggaaggggctcaggttcttccccacat

SEQ ID NO: 14299 - DNA, 630 bp, Homo sapiens
ttcaaaccatagcatatgctaaggactctttactattatcccgaaaacactggaaaggaagctccatgtggacagggagttctgtttgttttgttccacactgattccctcaagatctaagagcagtgctctgcactatttatatgctcaaattccagtggtttgtctccagagctcaccctatttaccaccatactgtgagtcataactgatacactagtgctctaccctctgtgaaaagctgcactgtgggggcagctctagaatctgcctatagcatttatcactggggtgactttggcaagttattcacctgttggatgcttttgtttcctctctataaagtgggcatgacagcagcacgacctcatacactggtgaggattaatatcaattgcataacaaaccacaaaaaaaatgatttaaacaataacagtcatttatttttgctctcaaatctgcaatttggacagggctcatcagggaaaactcatttctgctccacacagtatcaggagggacagcccagtggagggcaggatgatccacatgcaagacagacagctcwctctcagggcacgtagttggtgccagttgctagctggaaggggctcaggttcttccccacat

SEQ ID NO: 14300 - DNA, 928 bp, Homo sapiens
ccttcgcccaggcctgctagcctccagcctggagtccttgggctgttgggaactgaaggactcgtcacacttttcccggaggcattccagatgacaggagtgctcaggttccccacctggagcttgctagtccaggctttgattaagggagatgtgaaaacaaagtaatgaatttatgtactgctgaatcaatatggtgtggagggaccctaccttacagaatgtagggtccaaagaggtgacaaaagaatctcagatctaatccagcctctgctttccaggtgaggacagttaattttcaaaaatctgcaatggactgagagcagggatcccgtcaccacctgctctgagctccactgtagtcccggcctagccttctagcaccttcccagggggggcgccatcggcagtcttgagtagatcccacttcagggctggctcacagcttttcttgatttccagacgtgaagcaaagccaaaggtgagccactttcttgacacatccaaaagaaattttgaggaatgtcaaaaggagtgactggcggtccttcctgggtggtaagaagctatgtatttcttttttttctttttcttttttttttttttttttgagactgggtctcactctgttgcccaggctagagtgcagtagtgcgatctaagctcactgcaacctccgcctcctgggttcaagcaattctcctgctcagtctcctgaatagctaggattacaggtgcatgccatcacatccaactaattttttatatttttggtagagacggggtttcatcacattggccaggctggtcttgaaatcctgacctcgtgatccgccccygctcggcctcccaaagtgctgggattacagagaagctatgtattcctacgcatgtattctcactgcctttcagctaactgacaaggcgg

SEQ ID NO: 14301 - DNA, 491 bp, Homo sapiens
tatatttgagaaggtaattaagttaaacctaatttcagtcagttgtygcaacgctggaattggaatccacgatttgtgcctgtttactacctccagtttgctgttcttttccccataatatcttacacaatttttaaaaatgtaagcactgtatttgcatttgatattatgatattgtttgttttaaacactgaaaacatcatatggctattaggtctctctcttaatttaatgaaaaattttcctcaaatcacatcattcctaatacatgtgaaaacgttgagaagggtggtggttcctttccagtgttaaaaggctatttcctttttagtgtaccaaaaatggtttcacttatagtaaagtataactaataaggtaatctgtcattgtagatttgtttctgcttaaagctgtaggatatttgttacacctgtacttaaagtaaaattcaaactccttatcctgtcctacaaggctccacctgatttggg

SEQ ID NO: 14302 - DNA, 491 bp, Homo sapiens
tatatttgagaaggtaattaagttaaacctaatttcagtcagttgttgcaacgctggaattggaatccacgatttgtgcctgtttactacctccagtttgctgttcttttccccataatatcttacacaatttttaaaaatgtaagcactgtatttgcatttgatattatgatattgtttgttttaaacactgaaaacatcatatggctrttaggtctctctcttaatttaatgaaaaattttcctcaaatcacatcattcctaatacatgtgaaaacgttgagaagggtggtggttcctttccagtgttaaaaggctatttcctttttagtgtaccaaaaatggtttcacttatagtaaagtataactaataaggtaatctgtcattgtagatttgtttctgcttaaagctgtaggatatttgttacacctgtacttaaagtaaaattcaaactccttatcctgtcctacaaggctccacctgatttggg

SEQ ID NO: 14303 - DNA, 555 bp, Homo sapiens
tatccccgctcccagacatgagaaaaaagggcttcactgccctcctgttggattttatgacgaatttcacgtcctcgccggtttatgctggcaccacgttatctcgcttaattctgcatattgtacgtagaataatagagggttccgtctatgaagaagggtaactcctgggtcacagtgaattagtgaccaggcaggattccagaggcctttccttcccacttccaccttgaattccaacttaaaatgcaagccatgtacagagaatgaacagagggccagaaatgtgctacgyttgcctgtgtataacgtagggctaggtgctgtctcccatgatttcatttactcaaaggaaatcagatttgagggagataatgtaatattttgtcttgtttcagagccaccaactattacagaagaagaatttgtaagtatcatttcaaggggctatttttttctttggcctttaaaaaaatagcaaatattagatcatagaagaaagctgtgtgttttctttcctcctttttgccagagttttggtttagtaacaattgt

SEQ ID NO: 14304 - DNA, 555 bp, Homo sapiens
tatccccgctcccagacatgagaaaaaagggcttcactgccctcctgttggattttatgacgaatttcacgtcctcgccggtttatgctggcaccacgttatctcgcttaattctgcatattgtacgtagaataatagagggttccgtctatgaagaagggtaactcctgggtcacagtgaattagtgaccaggcaggattccagaggcctttccttcccacttccaccttgaattccaacttaaaatgcaagccatgtacagagaatgaacagagggccagaaatgtgctacgtttgcctgtgtataacgtagggctaggtgctgtctcccatgatttcatttactcaaaggaaatcagatttgagggagataatgtaatattttgtcttgtttcagagccaccaactattacagaagaagaatttgtaagtatcatttcaaggggctatttttttctttggcctttaaaaaamtagcaaatattagatcatagaagaaagctgtgtgttttctttcctcctttttgccagagttttggtttagtaacaattgt

SEQ ID NO: 14305 - DNA, 497 bp, Homo sapiens
tataatgtattayatattatatatatagcattatatataatgtattatatattatatatatagcattatatataatgtattatatattatatatatatagcattatatataatgtattatattatatatagtattatataatgtattatatattatatatagtattatatacaatatattatatatagtattatatataatgtattatatatagtattatatataatgtattttatatataatattatatgtatttgtgtatatatatatttgtacagacaagatttggctatgttttctgggctcatctcaaattcctggcatcaagcaaaccccccacctcaatttcccaaattgctgagattagaggtaccagccacaatacttggctttgagcacatttctttatttgaggtaaatctttcccttgaaaatatttgatttccaacaagtcaatttcctgatgatttttttccaggaatttatttttcactgtt

SEQ ID NO: 14306 - DNA, 527 bp, Homo sapiens
cagaagttaggataagttatgctgggacaagaaagtcttactcaaggttggcctctcacaacactaagctgctggattattgctgtttctttggactctgagttcataattagagagaaagggacaataagaggaatagaaacttaattatagattatggtggaagagggagataatcactaaaaggatgatatataggaactgtaatttattggacatctatgtgactagccttgtgacaggttttgtggatgaagaaagagacgaacagggtggcggggtctctgtcctggatttgtttctgtggctttcttttgattcatttgataaacatttaatgggtacctaccatgtgttgtctgctaggcttgaaagttyagagtctcgtaggaaatcctcttaccctcatgggctcagtctggagagaatttgagcttacataatagggtgtgcacaggtaggtggtagtctcttctgtggcttgctaccctgcttagtcatgtggtcaggtggctttgcccctgagg

SEQ ID NO: 14307 - DNA, 509 bp, Homo sapiens
aaattttaaaaattcttttcatgtatcaggtattgttctaagcatgtcatgcctatgagataggtgctaatcctgtcacactttaaaaatgaagaactgaagcagagaaagcaagtaacttgcccaagatcacacagctagttaaagccactccagaatttaacaatatgatgtttaaactttgcaaactcttctgcttcacactaggtgtcacagggctttaaaaataaggttcctttaataatggtaaatgatatcataaattattggaaatgagaaatagacacagactccaaaataaacaatctgataccattgtgatacagaataatacactcttttatttttgctttcttcttctctacctgaccagtcaatgaagtaaaaacctgctggcaaattaaacttggctatgcataggtttctgagacacctctctaggatcacagcatttggtacttactgcttattcaggcactagttgtactatgcctattytaaggtcaaca

SEQ ID NO: 14308 - DNA, 503 bp, Homo sapiens
gagatacctgtggtttatacctgaggttggcaagctttcactgtaaagagccagataggaaatattttatgttgtaagggccatatgggctctgtagcaactgcttaacgctgccattgtctcatgaaagtactcataggcagtatgcaaacaaataagcatagctgtgttccaataaacatcaccaaaacatgtggcaagccagatttggctgatggactacagtttgcaacccctaccttagattagaatgtttgatgcaattatgtaacaaaaacagaacaagagtcatgggctcaagacckatttctgacactaggtgtgtagtagagaaacatttttcctagctagcaaaatttatcatctgtaaaatgaaaggattaaacttacttttcctaaacttgctctctgctctaaaattacgagtttattctgtgttcatttacctcttctttcatatataagaaaaacttggcttgtgtttttttaaaaaggcaatacaa

SEQ ID NO: 14309 - DNA, 558 bp, Homo sapiens
atgatgtgaaatgtgtatgtgataatatggagcaaatataaatatccggaaataataattattaaacatattttgaatatctgggtaatcttcccctgtaacagatcattctcattagctacaggataaatttaaataaacctaattactctaatttgatcattacacattgtatgcttgtatcagaatatcatatgtaccccataaatatgaacaactattacatatccataaacattaaaagaagttttaaaaktaaaaaatattttttaaaaattaaaaattcaataaaccttcagtactgcaaaggggtgtaagggattagaaatgctataaccccagaagaaaccccaagacttccaatggcagaaacacaatgaattcagagggaaattgtcactcagtgtgttgtaggttagattctcccaaaacagactttaatgagatgagatctgaatgcaggaacttattgggttgtgatctccggaatgcctccagttaaaaagagagagagagagaggagaatccagcaaatggagaaattaaactactgatgca

SEQ ID NO: 14310 - DNA, 558 bp, Homo sapiens
atgatgtgaaatgtgtatgtgataatatggagcaaatataaatatccggaaataataattattaaacatattttgaatatctgggtaatcttcccctgtaacagatcattctcattagctacaggataaatttaaataaacctaattactctaatttgatcattacacattgtatgcttgtatcagaatatcatatgtaccccataaatatgaacaactattacatatccataaacattaaaagaagttttaaaattaaaaaatattttttaaaaattaaaaattcaataaaccttcagtactgcaaaggggtgtaagggattagaaatgctataaccccagaagaaaccccaagacttccaatggcagaaacacaatgaattcagwgggaaattgtcactcagtgtgttgtaggttagattctcccaaaacagactttaatgagatgagatctgaatgcaggaacttattgggttgtgatctccggaatgcctccagttaaaaagagagagagagagaggagaatccagcaaatggagaaattaaactactgatgca

SEQ ID NO: 14311 - DNA, 756 bp, Homo sapiens
ttggtagtgaaagcatgaatgattttatctggagataagtcagagcacaataacaatagctaccactatcagagcatccacaatatacctggtattgtggtaatcacattacatatattatttaatctgctctttacagcacctcttcaagatagatattaccatctgagacgttaaatamcctgcccaaggatacatggtcagtgaatggaggagtcaggatttgaatcgggaattatgtgtctccttgacagagtctttttgcattatacctcacaatcaagactgatattagagatgtcccattctatcgtagcttgcatagtattttatgtacaatatgtatgtaaaaatacaatatgtatttcctaacacatattaaaacagtggatttggaagagatggacttggcatgagcctataaggatagggaaagttagaaggacagtgatggctcttggagataggagaggccagtgaaagctgcagaagaggagtgtagattccaaggagccagttaatgcattgggaaaagcggaattcaggaagatattgattgaagaataagctgttcttatcagttgataaagagagtttgtaacacacttacaaacctgtctgaacacaaagccatctttccaccagctgattctttttctccctttgctttgttgtaaatttcattttctgtatactctgtcacctatgttgctgtagtgactgatctgctcacaacttgtaaaaatagaaggaaaa

SEQ ID NO: 14312 - DNA, 574 bp, Homo sapiens
tcctgccggttgtacttcctccttccctcttcctcctgatatggtctagtgtcacctgagtcttaggcaagtaagctgaggtcagggaaggataaaggctcctctgacctgggacagtyccagaagtcactctggagttgatttgtgggcctgagcctgccttctcctgtgtccctggctgctgtgcgcaattcatttaatttcatggagggcatattctttactaaatatagactacagatcagagaaactaattaaccgctttgacatttctgggacagaaatctttcccactgggtaagctttaattatttaatagaataattcattttgtcaaaaattgaagtaggacaatatttactcaaaaaagattaatagggtaatatagaatatttaaacatatcatctatatctgtgtgcctgtgtgttaaagtactaatcatatatattctttaagtgtactgaaattttaatattagaattttgtaccctacaatcataagttcttttggcatttgagaaaataaggttgattctgggtctacggtttttcttcttttttttaatcctttga

SEQ ID NO: 14313 - DNA, 574 bp, Homo sapiens
tcctgccggttgtacttcctccttccctcttcctcctgatatggtctagtgtcacctgagtcttaggcaagtaagctgaggtcagggaaggataaaggctcctctgacctgggacagtcccagaagtcactctggagttgatttgtgggcctgagcctgccttctcctgtgtccctggctgctgtgcgcaattcatttaatttcatggagggcatattctttactaaatatagactacagatcagagaaactaattaaccgctttgacatttctgggacagaaatctttcccactgggtaagctttaattatttaatagaataattcattttgtcaaaaaytgaagtaggacaatatttactcaaaaaagattaatagggtaatatagaatatttaaacatatcatctatatctgtgtgcctgtgtgttaaagtactaatcatatatattctttaagtgtactgaaattttaatattagaattttgtaccctacaatcataagttcttttggcatttgagaaaataaggttgattctgggtctacggtttttcttcttttttttaatcctttga

SEQ ID NO: 14314 - DNA, 545 bp, Homo sapiens
aaatgagaggtgtcttatttttacatggaatatcataatgcaggtaaataaatgaattagattcatgtgtgtttaagtgattaaatcagtgagaaaaaccaaggcacagagtaataaggacagcataataccatttataaaatgtctaaaacacacaatttaatgttgtatgttgctttattatacatgtatgtaatgaaggtgggtgagtggaaactaccaccgattcctcccactttcagaaatacataataccccatttacaaaatatgttttgtatatttatattttttagtagcttttatcaaattgttggaatactttgatccaaaagacaaacagattcagccagctgtttagggcaacagattttctatcccaatttgtctgtaacattgtggagaaggccctggtgctggtgaacactgatgtgacttacttgaagccttgatttgaagcccttgatactatgccaggstggagcttgttcctccaacctctgctgagatccctagagcaattcagagcctggaaaaaataggcaa

SEQ ID NO: 14315 - DNA, 967 bp, Homo sapiens
agacgcggcagaggcaaggggcaaggtgtgcttgttggtgccgttgaaccaggggctgtggctctgtctgaagccaggcacactcccatttgacaagttccgagcctgaaccgccccaggggctgctggcaagtccagcctcacaggcgcccccgcggtgcgggcgggggtgcgggacctgccttgacagctgagccctgtgctctgtggcctgtttcctgacgggccttgggccgggctcccggagggcagtgctcggggctgcaggcagcccttgaatccttcttcccctctggacagactgcctgagtttcgctgaaaagaaactggagctaaaaaacaaaaaagtcaatggcaatcatttcccacccactcttcttaaatgtcagtggtttaatttttatcacaactggttttctgtgaggtcgtgcgctttaaactcctgtctgcctgttgaggtggacacctcgcctttccacacccggagagctgcttcaacagccactctgtggatgacaaagtacagtgcctgaggccatcaggacacgatattaaccaggggcgggggcagtaccccatcaggacatgttcttatgaacatgaagctgtggggctgggtaagaactcggagctaactgagaaactgctcaagaagggaaatcaatgcagaaaaatggctgaggaatggtccccccaacttcagctacatcttccgtgactgagacatgggctgagtgcttgsgaacagcctgaggaccagcagcccacagaggaaggggccgtggcagggaaggcactcacccgccctcttggcgctgagggagccgtcgcggtggatgatgacatcactgctgcccagcatcaggaggctctggcccgacaggatgctgcccagcaggtcaggcactggctcctcctccaagtctggctctggcaccgcggcagggaggcgcctcctgtgggcaca

SEQ ID NO: 14316 - DNA, 339 bp, Homo sapiens
aagaatgtgtttgttcctctgttcatgatcttagataggactggcaggagtaagtcccttcccttgcattggacatctgtgcttgcctggcacctgtacctgggaaatggaatgtgtgttttccttttatggaaccacacttctcctgtttttrgtccagggggtttgagagaggctgactccatccctatccataagagaacctccctggacctggcctagacagccagtttttcctgtttctttgactatagtaatttgttcagggatgggcatgactcatcaagcaaagaagacttgagacttgtgcttaggggactccttttttgggaaagagct

SEQ ID NO: 14317 - DNA, 339 bp, Homo sapiens
aagaatgtgtttgttcctctgttcatgatcttagataggactggcaggagtaagtcccttcccttgcattggacatctgtgcttgcctggcacctgtacctgggaaatggaatgtgtgttttccttttatggaaccacacttctcctgtttttagtccagggggtttgagagaggctgactccatccctatccataagrgaacctccctggacctggcctagacagccagtttttcctgtttctttgactatagtaatttgttcagggatgggcatgactcatcaagcaaagaagacttgagacttgtgcttaggggactccttttttgggaaagagct

SEQ ID NO: 14318 - DNA, 544 bp, Homo sapiens
aggcttgtgggatacctccggcaaacattagcacaacaatcgccatcttttttgcaactctcaggtctgtgtgtaatgaccatctctctcatttctcattggtgtactgttgttctaatttactcaccaggacttgcatttacgttctaactgagcttgttggacactgaaatggaggaagaatcacaagccattttcaaayctgtaagtatttcctatctttataagtaagcctcaattcatttttttctttgcttccatcaggacagtttcaagacaactctgtgaggtaagataattttttttaatgaaacattgcttctataagtaaatttaaattctggcttccttctggggcgatctctttctccaatgtttggttcttgaatttcagggaaacccacagtgaaataggtagtagtaccactaactcactctgattttttaaaatttgttacagcagcaaattattctatagtataaatattagaatggaatttacattgaatgttggtatatttctgcatttctcattacatttaaa

SEQ ID NO: 14319 - DNA, 500 bp, Homo sapiens
gagaaaccctgagtaagcttctctgtgttgttgttttgcctgagagccttttgggcaagagaagtctttgtggaagcccctgtgtaaaagagataaagagctgaatcagataaatcaggggtaaacatctcccggccccagttagaccccgattccrtttccttcccggcttagtgggacctgtaggtctcttgggaacacactctgcaagcctattagtattctagagtaggaatcactacattctttggctcttagctccagcagcaaaattaataagtgtctcatggacattatgttgagtgaaagaagccagacataagagagaacatgcaatgtgattccatttatatgaagttcagaaataagcaaaactaatcaatgtggatggaagtcagatagcagttgtttctgataatgattgggtgagagcatgagagaactttcttgggacactggaaacgttctgcattttcatctgggtggtggtgatacaggtg

SEQ ID NO: 14320 - DNA, 528 bp, Homo sapiens
ttttatgagacaaggtcttactctgttacccaggctggagtgcagtggctcaatcatgcctcactgcagcctcaacttcccaggctcaagtaatcctccctcctcagcctcccaagtagctgagactacaggtgcttaccaccacacctggctagttttttatattttatagagacagggtcttgccgtgttgcccagactggtcttgaactcctgggctcaagcaaacctcccaccttggcctcctaaagtgctgggattacaggcatgaaccaccacgcccagccaagaattttattaattccaagttcttgtgcacacacacacacacgcatacacacacacgcgcgtgcacacacacacaaagcagtagaaataagarcatgtgacctttcttttccaactattttaataaatgtatcctgccaatcagaaaagcagggggcagcttgctgctctgtgaccagttaccatacccaagggaagcccatggctctcaaagtgccaagtctcagtggctgtgtggca

SEQ ID NO: 14321 - DNA, 629 bp, Homo sapiens
aaggttggcctaacaaattatgctgcagcatattgtactggcctgctgctggcctgcagtcttctcaataggtttggcatggacaacatctatgacggccaaatggaggtgactggtgatgaatacaatgtggaaaacattgatggtcagccaggtgcctttacctgctatttggatgcaggccttgccagaactatcactggcaataaagtttttggcacactgaagggaactgtggatagaagcttgtctatccctcacagtaccaaacgattccctggttatgattctgaaagcaatgcagaagtacaccagaagcgcatcatgggccagaatgttgcagattacatgcgctacttaatggaacaagatgaagatgcttacaagaaacagttctctcaatacataaaaaaaacagcataactctagacacgatggaggagacgtataagaaagctcatgctgctatacgagagaatccagtctatgaaaagaggcccaagaaagaagttaaaaagaagaggtggaacsatcccaaaatgtccctcactcagaagaaagatcaggtagctcaaaagaaggcaagcttcctcagttaggagcaggctgctgagagctaaaccaaacaa

SEQ ID NO: 14322 - DNA, 534 bp, Homo sapiens
gttcagtgtatactgctcgggtgatggttacaccaaaatctcacaaatcaccactaaagaacttactcatgtaaccaaataccacctgtaccccaataacttctggaaaaataaaaaagagcatagagaaaaccaacatttgggaatgatgctagaagtcgttggcagcacagagtagaggggtagagccactgacactttttctggcttaggtctgctaatccttccaatctgtttagcaatggagtgacctagctcagtcaacttctttttaaaacccaataaagctactcaggtctttaaagattgaactcatgattawtgagaggacaaagtggtaaaatgaagagaaagcagtgcatgcgaatatgtcacactggatgctcacacatacactggagatacacacagaaacacaagtacacgtataggattatatatgcatatttatatatgcaaacgtatatattgtaacataaagacgggttgaatgatagatgttataaatgcattagagtatatagagtgtataga

SEQ ID NO: 14323 - DNA, 863 bp, Homo sapiens
ataggaaataaattaactctaccaggcttagaaatgtattgtcccttattcttatatgataataatgacttttgcaattctaagaaagataaaattgtatgtacaaagagaaaataatatttccacattacaaattaccaagtagaaaggaaaccaaacttctttttttcaatgaatcactttttcaggtatatatatatccaatgccacattttatttttttatgatttccagaacaaggatgtatttaaaagggaaagagaagcagtaactctcaagaaaatgaataaatctgagggtaatatcatagtttatgtcttccaaatatttaatcaaaatatttgcttaaaaaaatctaatttccacctggagatttttcaaacagaatattcctgagtgtcagagggtaagagttctactkgtgtttaatataacattggacagaaaaattcaaagaaagaaaaatatttcacttctttcaaaaaaacacatttaaaatacataatttttgcaactcttgaaaagatatttgtaaaataaacaaaggataacagaaataaaaccttcactatcatatatatatatatatatatatatatatatatatatattttaaaaggctgaaattttttttctggctctttagtgcaattcatctgcccatgtaccacagatctaaaagcaaactaccaatagcagtatatattcacaatatcttatgtgtatttcctacattcaaaaatattttgtagctgggcatggtgttgtgagcctgcagtctcagctattcgggaggatcagttgagcctaggagctcgagttcagcctgaataagatagagagataccatctctaaaataata

SEQ ID NO: 14324 - DNA, 863 bp, Homo sapiens
ataggaaataaattaactctaccaggcttagaaatgtattgtcccttattcttatatgataataatgacttttgcaattctaagaaagataaaattgtatgtacaaagagaaaataatatttccacattacaaattaccaagtagaaaggaaaccaaacttctttttttcaatgaatcactttttcaggtatatatatatccaatgccacattttatttttttatgatttccagaacaaggatgtatttaaaagggaaagagaagcagtaactctcaagaaaatgaataaatctgagggtaatatcatagtttatgtcttccaaatatttaatcaaaatatttgcttaaaaaaatctaatttccacctggagatttttcaaacagaatattcctgagtgtcagagggtaagagttctacttgtgtttaatataacattggacagaaaaattcaaagaaagaaaaatatttcacttctttcaaaaaaacacatttaaaatacataatttttgcaactcttgaaaagatatttgtaaaataaacaaaggataacagaaataaaaccttcactatcatatatatatatatatatatatatatatatatatatattttaaaaggctgaaattttttttctrgctctttagtgcaattcatctgcccatgtaccacagatctaaaagcaaactaccaatagcagtatatattcacaatatcttatgtgtatttcctacattcaaaaatattttgtagctgggcatggtgttgtgagcctgcagtctcagctattcgggaggatcagttgagcctaggagctcgagttcagcctgaataagatagagagataccatctctaaaataata

SEQ ID NO: 14325 - DNA, 863 bp, Homo sapiens
ataggaaataaattaactctaccaggcttagaaatgtattgtcccttattcttatatgataataatgacttttgcaattctaagaaagataaaattgtatgtacaaagagaaaataatatttccacattacaaattaccaagtagaaaggaaaccaaacttctttttttcaatgaatcactttttcaggtatatatatatccaatgccacattttatttttttatgatttccagaacaaggatgtatttaaaagggaaagagaagcagtaactctcaagaaaatgaataaatctgagggtaatatcatagtttatgtcttccaaatatttaatcaaaatatttgcttaaaaaaatctaatttccacctggagatttttcaaacagaatattcctgagtgtcagagggtaagagttctacttgtgtttaatataacattggacagaaaaattcaaagaaagaaaaatatttcacttctttcaaaaaaacacatttaaaatacataatttttgcaactcttgaaaagatatttgtaaaataaacaaaggataacagaaataaaaccttcactatcatatatatatatatatatatatatatatatatatatattttaaaaggctgaaattttttttctggctctttagtgcaattcatctgcccatgtaccacagatctaaaagcaaactaccaatagcagtatatattcacaatatcttatgtgtatttcctacattcaaaaatattttgtagctgggcatggtgwtgtgagcctgcagtctcagctattcgggaggatcagttgagcctaggagctcgagttcagcctgaataagatagagagataccatctctaaaataata

SEQ ID NO: 14326 - DNA, 527 bp, Homo sapiens
ctttgaatacctggaacaaaccccacttggtttaagtagcagactttcaatcatctctctggttattttgcatcagtaatcataagtgagataaaactgtatatttcttttaaaatcaggtttattttcagttacagtaaattcagagggtagattttgttattgttgtaccaattattctgtacctatgtatatgaagggttataattcctcattccatttatgtcagttttggccatagtacgtgctttgaccatatgacaattgggacacaggctactcattgaatgaaatctaaggaccaccagcctttccctctgtcatgagatgaacatgtccttgatagrtgatgctccttcaacttgagtttcaaaatgaaaaaaaaaatatggaacatataagcaggcaagtatccaaggacatgaaatataaatgagaaataaatctttgtccttgcaactcaataagatatgagggcatttattactgtagcataactttcttgagattattcctaggcatttaat

SEQ ID NO: 14327 - DNA, 2662 bp, Homo sapiens
tcttacgacacatactgtttttctacgtactttttcattgaacatgttatttttcatgcgatgattcttcttccatacaggtcagctaaccttttctgtaacgggccaaataggaaatatttcaggctgtgtttcaactactcaaatgctgctgttgtagtataaaaagggccatagatgccacataaaagatcaagcatggctgtgttccgataaaagtttatctatgggcactgtaatttgaattttgtataattttcatataatgtcatgtattattcttcttttaattttttttcaaccattggaaagtataaaacccacagcttgcaagccacacacaatggcagccagctgttgtcagctgacccttgtccacaacatcccctcgaatggcagcattgtattttagtgcactgtacattcttaatgtaggcaatttcccaatgctgaacaggtagcttacttcctttttactttttgctcttttaaagtctaccataatgaatgtctctgtgtacaattgctggattaaaatgtattcccattcccaatgattttgctttgtattttcagaatgcctaaaaggcaactgcccacatgcctagaactcattggagatgaaggggtgtcacacacacaggaatagggggccataaacagagggcatgttaatcagcaggtccctgacgctgccaggaaaatgctggtaaaggggcagacgcagaagctgccaggatagaggaagaagcaaaactctgtgtcctcattgccattctttggcaaaaatagcagaatttctagaaggggaatcagttttttgccaggccctggtcttcagcttatgtctgtcccatcgggttacagtagaatcataagggaaatcattcacggggccttgctcatgtgactgctccgtgaaggtgaagccccagcggtcatcctcagacagacccatcacgctgggcaggggagggcttcggtctcctctgctgcttgcgtgcaggatccagagctcctgccaataragtgacaagccctggtcacctgccccaggctcccttcactcatggtgttttatgctttggggtctccatgttctttcctgctggaggcctttgtcagggcctcctcttctatcaaacgctactaataacatccaaccggaaaatggaaaggattggagtctgtctccatcctttatatccacaggcttcttcactcacctggaattgcatcggctcctgggtggccagctgtgcagatacaaggagacctgtgcaggcagccttcctgtgtgctggaggattcctagtgccccaacccaggacaaggcccatcagctcaaataaaagcaatttttaagacattttctggaattatgaagacctgatgaagattacatgctgtcatcagagagtttcttaccaaaaaaggaggactgatttttcagtcaaccagctacataagccaatacaagggttcaatgaatgtttgtggagtgcttcatcatttacttcgcatgcatgaatactagacttgctccagctgcagtctcctcaccttccctgttttccatacatgagcctgtgttggccagaacaacaaggcagggacctgacctctgtccacacctcttctgccctggtcccagtgcccggagctcctgcaggcagcatctcattcatcattagaatgaccctggattgatttcctggggcttcaatagtgaaacatcacaagaggtgtgcctgaaacaacagaaagctactgtctcacagttctgggggctggaattccaagatcaaggtgtcagcagggttggttccccctgagggctacgagtgaaaatcggttccagggctttctcctggcttctcatggttttctggaaatcttttgtcatttctccacttgtggactcatctccttaatctctcccttcatcttcacatcatgttctccctgtatgggtgtctgtgtccacagtctccaatttcagaaggtcaccatctatattgaattagagacctactctttttcactataacctcattttaactaattacatctgcaatgcacttgtttccaaataattcagtctgaggtcctgggggacttcaacatatgaacaggatttcaacatatgaatttgagggaaaagaactcaacctcagcaaactttatgcagcagactttgctatctatactttaaacaggatgacgatgtcctgagaaaattaataatttactgtggccacctagctcagaagtctgacttcaaaaccgaaactttgtctggtaaaccttgctacttctgaacagagagcaaccacgctccctgactatgttcgagtcagctttgagggtttgctgtggacacagtctcacaggcacttgaggtgagtaagttctgatgtctgttgccagcccttctccctcgggcttgtctctcattcatgagaacacactcatttattagctgtctttgctccaataaagacaaagctaaaatgtgtatcccagagagctgatttcaggggctttcagttttctgccaaattcaattctggtgaaatctctcctccattttcttagcagggaggtaaggggcccacttagatgctttttgtgggctgcatttttaaatgaatgcagctgg

SEQ ID NO: 14328 - DNA, 2662 bp, Homo sapiens
tcttacgacacatactgtttttctacgtactttttcattgaacatgttatttttcatgcgatgattcttcttccatacaggtcagctaaccttttctgtaacgggccaaataggaaatatttcaggctgtgtttcaactactcaaatgctgctgttgtagtataaaaagggccatagatgccacataaaagatcaagcatggctgtgttccgataaaagtttatctatgggcactgtaatttgaattttgtataattttcatataatgtcatgtattattcttcttttaattttttttcaaccattggaaagtataaaacccacagcttgcaagccacacacaatggcagccagctgttgtcagctgacccttgtccacaacatcccctcgaatggcagcattgtattttagtgcactgtacattcttaatgtaggcaatttcccaatgctgaacaggtagcttacttcctttttactttttgctcttttaaagtctaccataatgaatgtctctgtgtacaattgctggattaaaatgtattcccattcccaatgattttgctttgtattttcagaatgcctaaaaggcaactgcccacatgcctagaactcattggagatgaaggggtgtcacacacacaggaatagggggccataaacagagggcatgttaatcagcaggtccctgacgctgccaggaaaatgctggtaaaggggcagacgcagaagctgccaggatagaggaagaagcaaaactctgtgtcctcattgccattctttggcaaaaatagcagaatttctagaaggggaatcagttttttgccaggccctggtcttcagcttatgtctgtcccatcgggttacagtagaatcataagggaaatcattcacggggccttgctcatgtgactgctccgtgaaggtgaagccccagcggtcatcctcagacagacccatcacgctgggcaggggagggcttcggtctcctctgctgcttgcgtgcaggatccagagctcctgccaataaagtgacaagccctggtcacctgccccaggctcccttcactcatggtgttttatgctttggggtctccatgttctttcctgctggaggcctttgtcagggcctcctcttctatcaaacgctactaataacatccaaccggaaaatggaaaggattggagtctgtctccatcctttatatccacaggmttcttcactcacctggaattgcatcggctcctgggtggccagctgtgcagatacaaggagacctgtgcaggcagccttcctgtgtgctggaggattcctagtgccccaacccaggacaaggcccatcagctcaaataaaagcaatttttaagacattttctggaattatgaagacctgatgaagattacatgctgtcatcagagagtttcttaccaaaaaaggaggactgatttttcagtcaaccagctacataagccaatacaagggttcaatgaatgtttgtggagtgcttcatcatttacttcgcatgcatgaatactagacttgctccagctgcagtctcctcaccttccctgttttccatacatgagcctgtgttggccagaacaacaaggcagggacctgacctctgtccacacctcttctgccctggtcccagtgcccggagctcctgcaggcagcatctcattcatcattagaatgaccctggattgatttcctggggcttcaatagtgaaacatcacaagaggtgtgcctgaaacaacagaaagctactgtctcacagttctgggggctggaattccaagatcaaggtgtcagcagggttggttccccctgagggctacgagtgaaaatcggttccagggctttctcctggcttctcatggttttctggaaatcttttgtcatttctccacttgtggactcatctccttaatctctcccttcatcttcacatcatgttctccctgtatgggtgtctgtgtccacagtctccaatttcagaaggtcaccatctatattgaattagagacctactctttttcactataacctcattttaactaattacatctgcaatgcacttgtttccaaataattcagtctgaggtcctgggggacttcaacatatgaacaggatttcaacatatgaatttgagggaaaagaactcaacctcagcaaactttatgcagcagactttgctatctatactttaaacaggatgacgatgtcctgagaaaattaataatttactgtggccacctagctcagaagtctgacttcaaaaccgaaactttgtctggtaaaccttgctacttctgaacagagagcaaccacgctccctgactatgttcgagtcagctttgagggtttgctgtggacacagtctcacaggcacttgaggtgagtaagttctgatgtctgttgccagcccttctccctcgggcttgtctctcattcatgagaacacactcatttattagctgtctttgctccaataaagacaaagctaaaatgtgtatcccagagagctgatttcaggggctttcagttttctgccaaattcaattctggtgaaatctctcctccattttcttagcagggaggtaaggggcccacttagatgctttttgtgggctgcatttttaaatgaatgcagctgg

SEQ ID NO: 14329 - DNA, 555 bp, Homo sapiens
gccagtttgaagagactaattcttagaaaaagctgactccagcattatctgtctttagctgagctgttatgaaaagaatataagagtaacaaaaaaaatggtatgtgcttttattaaaacaaaacataacaacaacataatgctgttgcagaaacttggagatgctgcaaatgtaggtctgttctgcttgttggctttacctctctctcgttcctyccttcttcctcctcattcttcatctttcttcctcattctaagcagaacatttacaaaattcaggctttctgtagggtgaagagctgagcttcagttcttctctggggcagaatattagcaaggacagtgagcttagttttgactgattctggcatcttcacaaagcaaaaaccaaagtattgacgtaagaaaactggattgggagttgggaaaggttatgacttaatgataaaggaattaaagagacacattggcattatttttttctcctgacacctgcacaatgccaaaagataaatcagaacagaaaacattaaaattggaaaggaacttagagac

SEQ ID NO: 14330 - DNA, 545 bp, Homo sapiens
ctcatagttctggaagctggaaagtctaatattaaggcagattcggtgcctggggagcactcactttctggcttacaagcaaaactttcttcctgtgtcctcacatggtggaagggactactgagcttttgagggcctcttttataagggcactaactgtctcccaaaggccccatctcttaatgccattactttaggggataggatttcaatatattaattkcagaggaacaaaaacattcagaccatagcatatgggattcacatcttaatgacagtgattccagaacctgacacctgcactgctgcctacatgggtggacccggcacctatgcaccaggccagtgacaaagcaaggctgtcactgcccctgcacaggaacagcttttgcagagccctgatgactctgctcatctacacccaggcacataaatttcactttggtaacaaaataggcaaattcacaagaatcggcacagactcgtgggagggctcctgtaccacttgtctgcttcttaaacttctctttcagtggtatgaattt

SEQ ID NO: 14331 - DNA, 545 bp, Homo sapiens
ctcatagttctggaagctggaaagtctaatattaaggcagattcggtgcctggggagcactcactttctggcttacaagcaaaactttcttcctgtgtcctcacatggtggaagggactactgagcttttgagggcctcttttataagggcactaactgtctcccaaaggccccatctcttaatgccattactttaggggataggatttcaatatattaattgcagaggaacaaaaacattcagaccatagcatatgggattcacatcttaatgacagtgattccagaacctgacacctgcactgctgcctacatgggtggacccggcacctatgcaccaggccagtgacaaagcaaggctgtcactgcccctgcacaggaacagcttttgcagagccctgatgactctgctcatctacamccaggcacataaatttcactttggtaacaaaataggcaaattcacaagaatcggcacagactcgtgggagggctcctgtaccacttgtctgcttcttaaacttctctttcagtggtatgaattt

SEQ ID NO: 14332 - DNA, 548 bp, Homo sapiens
gtcacccaggctggattgcagtgatgtaatcttggctcactgcagcctcgacctcttgggttcaaacaagccttccatctcagcccccagagtagctgggactacatgtgagtgccaycacacccggctaatttgtttgtagagatggggttttgccatgttgcccagtttgttctcaaaactcctgacctcaagtgatctgctcacctctacctcccaaagtgctgggattacagccactaagcccggccaacacaaagcaattttgatgcatgcaatttgtgcaatcttttatgacaatgctgcaataaggtgatttcttagtccttatctcacttgactatcagcagcatttgaaaatccatcatgcccttctgggatcctctttctacctcactggctgctctctgctcatctccagtgctggttccaccacatggagcccatctctaagctttggagtggcttcaggtccagtgtgctgacaattttctttccatccacacacattccccagatgttatcatatagtcctctagctttaaatg

SEQ ID NO: 14333 - DNA, 547 bp, Homo sapiens
aaagtcttggtagagacagagaaaaagttactattgccatgagctaatcaagaatagcagatctcctctttcttggatagtacatttttattagtattattatatatcattttgctattcatatatttaggtaataagattaaatacacaagacataataaaacaatcactatgctataaaatagaacttcatcatcctcattttaatatctgctaagatgagttttcttaacctttgttgattctttttgcaaaaaccaaatgtcagactttgttattactgaaagatgatgaatataatataaaagtgaaaaaaataattttttaaaaggtgaataacatctaatttgcttgaaattattattttgttgattttgtgaacartactgaagtcctagaagacttgaaagtctccaataaattatttatataacaaaaggtgacaattcaacccatccaagagaaatttgacgttgggggttgagaatcaaatgaaaaatctgagtcaagtattttcaggaaaatagcttcttaatatacaattctt

SEQ ID NO: 14334 - DNA, 584 bp, Homo sapiens
tatttctcaaagtctttcagtacaaggtctttggtgctcctggaaaaaattctcaaccctaaaacaaataccaacatataaaatagtattaaatttttaattactagaaattttaaacaccgaaacatttatttttattatacaattataaggatatagcatattaattaaaatgagtgaaacccagtttataaagaagttaagtcttgaaggctgatagatgtctctgatgtttggaaatgagcagattagtctacactccttgcaacatggataaattgtttaaacacacacacacacacacacacacacacacacacacacaaaacaaaagcagcacttataatgcctattatgagggacaaggggaattggattatttgctaaggttttgcccatgaaaatacattagaaagtgtaggtaayaaactgtgtactgaaacaatttgcttacctgtaaattctataattataaatttaatatgttaagttcatctgaaataaatgaagatctctacaagtattctacaaagaaattgaattggtagtttaatcttcagtttcctaggttttgtttggatgtt

SEQ ID NO: 14335 - DNA, 655 bp, Homo sapiens
taggtagaggagacttgttttcccctctccttccgtttatcatattgaacttacactccttctgatagcttattgaataaataagtgacaaaaaataaaccagacatgtggattgtcttttttcattatgtattttttagaattaagaggtggcataaggtaatacaagtggcgttgaagatacgaaagatgagtttaagtcaggctctgccacttaggggccatgtagcttaagttagtcacctcacttctctgaactttggtgtgctcatctgctaattaaagtcaatcagatctgtttggcatcatctgttacaatgtgttgacttaagaataacacaagtaatgtgtgtttaaattatactgtgtacacaagtgtcagagaagtgaatgattcccttttcaacattgtatggtayaacaatgcacacatttagaaaactctcaggccatcaacaatcaatttgccccagtttctaacattcaaaagttttcactccccatcctcttaaagactatctgttgattatcttcaaaactacttatcttagtcatgggtgtggaagaagaaggctgttgggatatcatctttattctctcttcacataagcttatcctaaataaaattgaggatactacttcatctcaggctagg

SEQ ID NO: 14336 - DNA, 568 bp, Homo sapiens
tgctgatgtacctggaataattatatctacttgtttattcaattttaaatttgattagaaagtgcctaatattcccctttcaaacttgcagggttatatcctaagttctttcagagaagtagtagataaaggacagtgaactagccttaagtaattcacctggttaggtttgttgagtgtagagggccaagggatgtcctttcacctacgcaactcctgttcacaggaactaggctacttgctgcttatagaaattgaccagtggaaaagaaatctatattcaaaatgctktacatctttattttgtgtcttcttgactcctttttgtgacccttaatgctcgtatttaccctattttgaattgcgtgatcaagaacagatctttacaaactttggtgtgtatacaaatcccttgatgattttgctgaaacgaattctaattcagtaggtcttgatgtgtcccgagagtctgcatttctaacaagctcccagatattgctggcgatgctggtccatgtattatactttgagtagcaaggagctagcattcccttaccgttcttttttt

SEQ ID NO: 14337 - DNA, 593 bp, Homo sapiens
cactatcatgagactagcacagggaagatctgcayccatgattgaattacctcccattgggtccctcccacagcatgtgggaatttaagatgagatttgggtggggacacagccaaacaatattggaggatgaggtggaggattgcttgagctcaggagtttgaggccagcctgagcaacatagtgagaacttgtctctactaaaaatataataaaataaaataaactagtcatggtgttacatacttgtggtcccagctcctcaggaagctgaagaaggaggattgcttgagcccagaagtttgaggttgcagtgagctgtgatagcaccactgcactccagcctgggtgacagagcaaaatcctgtttcaaataaaaaaaaaaaaaagagagagagaggaatttcaattattttttactgctaagatgaaaatacaaaaatgccatatggtagagtaactggggtggggttgttctgcttagggtagctaaggtctcaggttaacctcctgatactattccatttgagttagcacccaaatgaagagaaggcggccatgcagaataaacagattttataccatttggaata

SEQ ID NO: 14338 - DNA, 593 bp, Homo sapiens
cactatcatgagactagcacagggaagatctgcatccatgattgaattacctcccattgggtccctcccacagcatgtgggaatttaagatgagatttgggtggggacacagccaaacaatattggaggatgaggtggaggattgcttgagctcaggagtttgaggccagcctgagcaacatagtgagaacttgtctctactaaaaatataataaaataaaataaactagtcatggtgktacatacttgtggtcccagctcctcaggaagctgaagaaggaggattgcttgagcccagaagtttgaggttgcagtgagctgtgatagcaccactgcactccagcctgggtgacagagcaaaatcctgtttcaaataaaaaaaaaaaaaagagagagagaggaatttcaattattttttactgctaagatgaaaatacaaaaatgccatatggtagagtaactggggtggggttgttctgcttagggtagctaaggtctcaggttaacctcctgatactattccatttgagttagcacccaaatgaagagaaggcggccatgcagaataaacagattttataccatttggaata

SEQ ID NO: 14339 - DNA, 574 bp, Homo sapiens
tacagcggaaggccctgggacatggaagaacccctaaataaaggaacctggggttctgaatgactgtatagaatgcttccttcctcatttatcaagactacctgcattttactgcaggtgaactggaataaacttttattgtgtttgtcaacaaaatgttggaatggccttgctacagtggctaagatcgctcaaacaaatattcatggcctcatctgaaagcaagagatgatggtaaatatgatctcaggttggccaaccacttctcattgaaagctgtttcaatactttggaaacaggagtgcagcttttaggtgctcagttagctgactctacacaaacacctttcacagtgcctgactttactgaatgaataaatgaatggcccacatttaagtggatgccytcctctgggaagctctgtgcacgttgatgtagctattaaaaattgactacaggactttttacaaacatgttaagctatttatatacgttattttattaatactggtgataatccagttaattaaatttcattttattgcattcatttatttttaaaattgtgtcttcc

SEQ ID NO: 14340 - DNA, 551 bp, Homo sapiens
tgaaaaattctgaccatgtaagaaaaaaataataattaacaatgccatcctgtggctaaaactgccatttccgttctaagtaatctgagcctacaaaatgtttatgttgtgctacagcccacagcaatcttttcaggcccttacatcttaaataaagaggacatttttttttctgcttagattcaagctctactatattggtagaaatttctctaacatttctgataagtcacttctaccatcattaacttccttctgccaagaattctctgtgttagtgagattcaaaacaggtaatattttaagtgtttgcaaaacatgatgtgcaacacaattctccaacataatcataatcatcatcaaaagtgtataaagctttgagtcataagrttggtatgatgcgtagatctgccatttacttattctatgaccttgaacaagtcattccaaacttcaagtcatatacttcagcaaaccctatgttgttaactcagtatattaatatttcctcatctctttgtgaacataaaacaggaaaatggatgtgatgg

SEQ ID NO: 14341 - DNA, 549 bp, Homo sapiens
ggggttcacactgcatagcatcttatcagcaaagaaacacatttcaactataagtgaaatatttgtcatttgttcaaacacctgaatcctgcagtacagagattaacagattataaagtaagtcatcattgtctggctagccttattaatgtgatgggaggaaaggtaggaggtagtttttaaaatcaggacacttttctgagaaccacaaagtattctaggaacacaaagttgagtgtcttcagaggccaagcaggtagtatacatgggtgaagactacagggagtggcgaggcctrcaacattcaaatgccagttaaaaataacagcaccaataccaagccaaccaaacaaatcaccttccagtgtccagtttggctttcacctgccagcttgctcttcctgctgatgtctaagctctaacttgcttttctttgggaaaaataaagatgtaaggaatgagcaagttaagggaatccttgtggttcctttctttttgttctcccttatatcctaaactaaggattaactgcacgtccccttccatcat

SEQ ID NO: 14342 - DNA, 547 bp, Homo sapiens
gaggaatttacttctttcacacatgagatagtaggggaattagcccttagtgtcatatttttaaaattgggtgtttgttttttcttgagatgggatctcactctgtcacccagtctggagtgcagtggcatgagctcagcttgctgcagccttgactgttagagctcaagcgattcttccaccttagcctcctgagtagctgggatcacagatgtgcgccaccatgcccagctaattttttaaaattatttgtagagatgaggtctcactacattgcccaggctggtcttgaatttctggattcaagtgatcctcttgcctctgcctgccaaagtgctgggattataaacatgaaccaccatgcttkgccagcatcgatattttaaaaaatcatttagttaaaattttgtttgtaatgtaggaaggttaattttagtatttctgaggcaggaagataaataagatatttttaaaaagtatttcaatagactatttttgaaagcagttttaggtttaaagcaaaactgactggaaggtacagggagtt

SEQ ID NO: 14343 - DNA, 547 bp, Homo sapiens
gaggaatttacttctttcacacatgagatagtaggggaattagcccttagtgtcatatttttaaaattgggtgtttgttttttcttgagatgggatctcactctgtcacccagtctggagtgcagtggcatgagctcagcttgctgcagccttgactgttagagctcaagcgattcttccaccttagcctcctgagtagctgggatcacagatgtgcgccaccatgcccagctaattttttaaaattatttgtagagatgaggtctcactacattgcccaggctggtcttgaatttctggattcaagtgatcctcttgcctctgcctgccaaagtgctgggattataaacatgaaccaccatgcttggccagcatcgatattttaaaaaatcatttagttaaaattttgtttktaatgtaggaaggttaattttagtatttctgaggcaggaagataaataagatatttttaaaaagtatttcaatagactatttttgaaagcagttttaggtttaaagcaaaactgactggaaggtacagggagtt

SEQ ID NO: 14344 - DNA, 1501 bp, Homo sapiens
cctgttgtcagtggaggctgtggtgaagtttttctggagatggtgatgtcaggtggacctgttcttgtgctcaagtggtggctgtggtgggtggcatgtgcctgtctttgaacttcagggaggcatatgctggcactggtgttcactgaagtgtaatttacacatagtaaactctacctttttttagttagtatataatcttctgggtcttcacaaacataatcagcttctcagattggcttatttctatcccctgatcctcttattgcccctcctgctgctgttcttccattactcttctgaaccccacccaacattcctgtgaatatctgaaatacatggataggtgctcttataagtttcatagtattatacctaatatgaaaagaaattgctctctggcagatatagaaagatgccaactcctttcttaaaatttgattactaggcttgaatttgtgggagagtcttttggatttgctgcaaactacagcatttctttttaatgtttatgctgtgatctctggagctgttgtattttatgtaatttagtaacctgcacactgcaatgcagacatggaagccatagagccatgtgatccttatatactgtgaatcctacagctcatctgttatggggagaaggaggatctttttctgttttcttgtgatagtgttatttttctactttctcctgtgaccttttttttctctttacagagagtttcagaatttctccccagcaatcctctgaggggctctcttaaccctctcacctactctgcgcctcagtaaatttctgttttacagccatgttacatatatgaccccaaagagaagagaggagtgaaataaaaaatagtatgttggcatttaaatttaaaagggaaatataaatgtgccatataatgaatactttgtgcatttatcttaagataaacttgtggaattgctggatctaacagtattatggtcacaaagacatagcccccaaattgttctcctgaaagtcttcactcttaaataccaatcagtgtatgagaaaaaaaatttcacaactttcttgcatttctttgcttttatgtttgtaacttccatgtttaatacagttctgattttcagtaactacagaataaacatttgctaagctgacttgaactaaagatatctttgccaaagatatgctatttaaggtagatatgcttaattaaaagaatagataayttcaaaatgaaatggatattattttcctgctagtcactatactatactatgaagaaaaattgcttaagataaaaattaagaatcccaaattgtgctgacatagaaaatacaatttacaataaaatgctatctataaaatgttaaagtgatgattcccacataagaataagagtttggcaccgttttactaaaataattgctcagcctctgccggtacacttttctatttatgatgacaggtgtcaattcccattcatttctcatacatgtactttgg

SEQ ID NO: 14345 - DNA, 1501 bp, Homo sapiens
cctgttgtcagtggaggctgtggtgaagtttttctggagatggtgatgtcaggtggacctgttcttgtgctcaagtggtggctgtggtgggtggcatgtgcctgtctttgaacttcagggaggcatatgctggcactggtgttcactgaagtgtaatttacacatagtaaactctacctttttttagttagtatataatcttctgggtcttcacaaacataatcagcttctcagattggcttatttctatcccctgatcctcttattgcccctcctgctgctgttcttccattactcttctgaaccccacccaacattcctgtgaatatctgaaatacatggataggtgctcttataagtttcatagtattatacctaatatgaaaagaaattgctctctggcagatatagaaagatgccaactcctttcttaaaatttgattactaggcttgaatttgtgggagagtcttttggatttgctgcaaactacagcatttctttttaatgtttatgctgtgatctctggagctgttgtattttatgtaatttagtaacctgcacactgcaatgcagacatggaagccatagagccatgtgatccttatatactgtgaatcctacagctcatctgttatggggagaaggaggatctttttctgttttcttgtgatagtgttatttttctactttctcctgtgaccttttttttctctttacagagagtttcagaatttctccccagcaatcctctgaggggctctcttaaccctctcacctactctgcgcctcagtaaatttctgttttacagccatgttacatatatgaccccaaagagaagagaggagtgaaataaaaaatagtatgttggcatttaaatttaaaagggaaatataaatgtgccatataatgaatactttgtgcatttatcttaagataaacttgtggaattgctggatctaacagtattatggtcacaaagacatagcccccaaattgttctcctgaaagtcttcactcttaaataccaatcagtgtatgagaaaaaaaatttcacaactttcttgcatttctttgcttttatgtttgtaacttccatgtttaatacagttctgattttcagtaactacagaataaacatttgctaagctgacttgaactaaagatatctttgccaaagatatgctatttaaggtagatatgcttaattaaaagaatagataatttcaaaatgaaatggatattattttcctgctagtcactatactatactatgaagaaaaattgcttaagataaaaattaagaatcccaaattgtgctgacatagaaaatacaatttasaataaaatgctatctataaaatgttaaagtgatgattcccacataagaataagagtttggcaccgttttactaaaataattgctcagcctctgccggtacacttttctatttatgatgacaggtgtcaattcccattcatttctcatacatgtactttgg

SEQ ID NO: 14346 - DNA, 1501 bp, Homo sapiens
cctgttgtcagtggaggctgtggtgaagtttttctggagatggtgatgtcaggtggacctgttcttgtgctcaagtggtggctgtggtgggtggcatgtgcctgtctttgaacttcagggaggcatatgctggcactggtgttcactgaagtgtaatttacacatagtaaactctacctttttttagttagtatataatcttctgggtcttcacaaacataatcagcttctcagattggcttatttctatcccctgatcctcttattgcccctcctgctgctgttcttccattactcttctgaaccccacccaacattcctgtgaatatctgaaatacatggataggtgctcttataagtttcatagtattatacctaatatgaaaagaaattgctctctggcagatatagaaagatgccaactcctttcttaaaatttgattactaggcttgaatttgtgggagagtcttttggatttgctgcaaactacagcatttctttttaatgtttatgctgtgatctctggagctgttgtattttatgtaatttagtaacctgcacactgcaatgcagacatggaagccatagagccatgtgatccttatatactgtgaatcctacagctcatctgttatggggagaaggaggatctttttctgttttcttgtgatagtgttatttttctactttctcctgtgaccttttttttctctttacagagagtttcagaatttctccccagcaatcctctgaggggctctcttaaccctctcacctactctgcgcctcagtaaatttctgttttacagccatgttacatatatgaccccaaagagaagagaggagtgaaataaaaaatagtatgttggcatttaaatttaaaagggaaatataaatgtgccatataatgaatactttgtgcatttatcttaagataaacttgtggaattgctggatctaacagtattatggtcacaaagacatagcccccaaattgttctcctgaaagtcttcactcttaaataccaatcagtgtatgagaaaaaaaatttcacaactttcttgcatttctttgcttttatgtttgtaacttccatgtttaatacagttctgattttcagtaactacagaataaacatttgctaagctgacttgaactaaagatatctttgccaaagatatgctatttaaggtagatatgcttaattaaaagaatagataatttcaaaatgaaatggatattattttcctgctagtcactatactatactatgaagaaaaattgcttaagataaaaattaagaatcccaaattgtgctgacatagaaaatacaatttacaataaaatgctatstataaaatgttaaagtgatgattcccacataagaataagagtttggcaccgttttactaaaataattgctcagcctctgccggtacacttttctatttatgatgacaggtgtcaattcccattcatttctcatacatgtactttgg

SEQ ID NO: 14347 - DNA, 1501 bp, Homo sapiens
cctgttgtcagtggaggctgtggtgaagtttttctggagatggtgatgtcaggtggacctgttcttgtgctcaagtggtggctgtggtgggtggcatgtgcctgtctttgaacttcagggaggcatatgctggcactggtgttcactgaagtgtaatttacacatagtaaactctacctttttttagttagtatataatcttctgggtcttcacaaacataatcagcttctcagattggcttatttctatcccctgatcctcttattgcccctcctgctgctgttcttccattactcttctgaaccccacccaacattcctgtgaatatctgaaatacatggataggtgctcttataagtttcatagtattatacctaatatgaaaagaaattgctctctggcagatatagaaagatgccaactcctttcttaaaatttgattactaggcttgaatttgtgggagagtcttttggatttgctgcaaactacagcatttctttttaatgtttatgctgtgatctctggagctgttgtattttatgtaatttagtaacctgcacactgcaatgcagacatggaagccatagagccatgtgatccttatatactgtgaatcctacagctcatctgttatggggagaaggaggatctttttctgttttcttgtgatagtgttatttttctactttctcctgtgaccttttttttctctttacagagagtttcagaatttctccccagcaatcctctgaggggctctcttaaccctctcacctactctgcgcctcagtaaatttctgttttacagccatgttacatatatgaccccaaagagaagagaggagtgaaataaaaaatagtatgttggcatttaaatttaaaagggaaatataaatgtgccatataatgaatactttgtgcatttatcttaagataaacttgtggaattgctggatctaacagtattatggtcacaaagacatagcccccaaattgttctcctgaaagtcttcactcttaaataccaatcagtgtatgagaaaaaaaatttcacaactttcttgcatttctttgcttttatgtttgtaacttccatgtttaatacagttctgattttcagtaactacagaataaacatttgctaagctgacttgaactaaagatatctttgccaaagatatgctatttaaggtagatatgcttaattaaaagaatagataatttcaaaatgaaatggatattattttcctgctagtcactatactatactatgaagaaaaattgcttaagataaaaattaagaatcccaaattgtgctgacatagaaaatacaatttacaataaaatgctatctataaaatgttaaagtgatgattcccacataagaataagagtttggcaccrttttactaaaataattgctcagcctctgccggtacacttttctatttatgatgacaggtgtcaattcccattcatttctcatacatgtactttgg

SEQ ID NO: 14348 - DNA, 597 bp, Homo sapiens
caccatgattatgaggcttcctcagccacgtggaactgttaagtccaattaaacctttttcttttgtaaattgcccactctcgggtatgtctttatcagcagcgtgaaaatggactaatacaactactatgtagcaggccatgggttaggtggtatcagacagtgggccttccatactttgtaaaatgaaagaaaaaaaaaaggatgtcttatgaattttttacaacaaccaaatctactaatgtgtgttacaactagagaagcttaatattaaatataatggagtaaaccctgaaggcaagcatgaaaggcttttagaatcctccatctatttctccttaaaggcataacggtttcagtgttcacacattggcatacrtacttttgtttcttgcaagctcagcgtcactatcttaaatgttaatttttaaaaatattatgtagaattgtatacataaagccatggattctcacagttgacctaaggaatttcaaagggtaattttctccataatcaagtttcaccttacaagctaattttcatatctacacttgggtaagatacgagttgactatatttatgaaatattggggata

SEQ ID NO: 14349 - DNA, 565 bp, Homo sapiens
gaatttttgctttgggatgcttttccttctgtaggtgtatcaccaccactgacatccatttaacaatctatgcattagactccaagtcttttagctcttctgctaaggagatttcagcctaaaagggatggcaaaacagttcatcaatcatatttttttctaggtcctttggaatcggctaagtttacaattcaaggggcattggaatacttttccactggctwgcctcacttaccaaaatgcctacagaagttatgccggagagaacagaccttaatttttaggtttatcctccccaaatttacaatcagaaatttgcaattgtatggtgaaaataaatgttcagtgactaagtctcttttcaaggccctgatataagtagctttgagtctaaatccaatttccaaatagatgttggagcatcttaagtggtgacaatagttatggtgtaatgaaactggaagagtatctgggagcagaactctgacaccaatgtcttgttgcctatgggaggaaggataagcccagaaaggatgactcaggttttgaatcctgataaggagct

SEQ ID NO: 14350 - DNA, 527 bp, Homo sapiens
accaggtcattgtcttcaagggttttagaatctatgtattcagtatgtgcctacttgtctctagattgcgttttcacagaaacttccacactttttttttaactaggatagaagtggatgctcacctagatattgaaggagagtcctagaactaacattttagcatagagaatagcccagtagaaacccactcataaaagcaattggtcaaaaaagmctcaaacttcttttttgctgccagcagctagggtgagacaagtgatactcatgtggctgtgccatcctctcgtttcacctaactaagaagttgaaagaactctacaaggaaaactacaaaacactgctgaaagaaatcgtagatgatacaaaaaaatggaaacacatcccttgctcatggatgggtagaatcaatattgtgaaaatgatcataatgccaaaagcaatctataaatttaacgcaatttccctcaaaataccaccatcattcacagaactagaaaaaacaatcgtaaaattcatatggaacc

SEQ ID NO: 14351 - DNA, 977 bp, Homo sapiens
  misc_feature (1)...(977): n = A,T,C or G
cttgaatatatattttattaaaacaagaaatcatttctttaaaatataaaaatatttaagtagtaattggctatgttgacatttctacttatgagagatgtccatttggaataaaacataaataaaacccttttacatggaggcatcaaaaatatattcttaaaaattaatagcttttaagtactaatataaaccttctctcacttgtaagttttctgacattgaatgctgcttccggttttcaatgatgcctcactcctgcaggctgcgttgaataaacatagaaattgatcccccaacattggtattaaagctctcaagccatgtggttccttaggagattgaaataggcccagttgtcccacagaactgatgttcatagtgtcttattagaaatttacagcccccactccctccccaagtcttaaaacttaaaaaagttacatttttcttctctgagttcctttctcaggaaaccaaccatcaggtctcccagacagtatcaaagaactaaaactcaccaggtcaccacatctggacaatgaaatgccagactccttatccatcatgattgcttaaacaacyacctcctttctgttgaccagctctgcttccttacccctccctaattcctgttttacatttcttcactgctataaaaacccctaatttnnnnnnnnnnnnnnnnnnnnnnnnnnnnnnnnnnnnnnnnnnnnnnnnnnnnnnnnnnnnnnnnnnnnnnnnnnnnnnnnnnnnnnnnnnnnnnnnnnnnagaaacaagacttagaccaaaacccctggtgttccagcaataaaattagacacatggctttcagtgttctttaaagttggtgtttaaaagcctgaacaggatgaagggctgtgtcatagcacagactgtcttacagtagcttatactatcaccaataatttgttatcagcaatgtccgaggtaataaaatttgccagcctttctt

SEQ ID NO: 14352 - DNA, 977 bp, Homo sapiens
  misc_feature (1)...(977): n = A,T,C or G
cttgaatatatattttattaaaacaagaaatcatttctttaaaatataaaaatatttaagtagtaattggctatgttgacatttctacttatgagagatgtccatttggaataaaacataaataaaacccttttacatggaggcatcaaaaatatattcttaaaaattaatagcttttaagtactaatataaaccttctctcacttgtaagttttctgacattgaatgctgcttccggttttcaatgatgcctcactcctgcaggctgcgttgaataaacatagaaattgatcccccaacattggtattaaagctctcaagccatgtggttccttaggagattgaaataggcccagttgtcccacagaactgatgttcatagtgtcttattagaaatttacagcccccactccctccccaagtcttaaaacttaaaaaagttacatttttcttctctgagttcctttctcaggaaaccaaccatcaggtctcccagacagtatcaaagaactaaaactcaccaggtcaccacatctggacaatgaaatgccagactccttatccatcatgattgcttaaacaactacctccttyctgttgaccagctctgcttccttacccctccctaattcctgttttacatttcttcactgctataaaaacccctaatttnnnnnnnnnnnnnnnnnnnnnnnnnnnnnnnnnnnnnnnnnnnnnnnnnnnnnnnnnnnnnnnnnnnnnnnnnnnnnnnnnnnnnnnnnnnnnnnnnnnnagaaacaagacttagaccaaaacccctggtgttccagcaataaaattagacacatggctttcagtgttctttaaagttggtgtttaaaagcctgaacaggatgaagggctgtgtcatagcacagactgtcttacagtagcttatactatcaccaataatttgttatcagcaatgtccgaggtaataaaatttgccagcctttctt

SEQ ID NO: 14353 - DNA, 977 bp, Homo sapiens
  misc_feature (1)...(977): n = A,T,C or G
cttgaatatatattttattaaaacaagaaatcatttctttaaaatataaaaatatttaagtagtaattggctatgttgacatttctacttatgagagatgtccatttggaataaaacataaataaaacccttttacatggaggcatcaaaaatatattcttaaaaattaatagcttttaagtactaatataaaccttctctcacttgtaagttttctgacattgaatgctgcttccggttttcaatgatgcctcactcctgcaggctgcgttgaataaacatagaaattgatcccccaacattggtattaaagctctcaagccatgtggttccttaggagattgaaataggcccagttgtcccacagaactgatgttcatagtgtcttattagaaatttacagcccccactccctccccaagtcttaaaacttaaaaaagttacatttttcttctctgagttcctttctcaggaaaccaaccatcaggtctcccagacagtatcaaagaactaaaactcaccaggtcaccacatctggacaatgaaatgccagactccttatccatcatgattgcttaaacaactacctcctttctgttgaccagctctgcttccttacccctccctaattcctgttttacatttcttcactgctataaaaacccctaatttnnnnnnnnnnnnnnnnnnnnnnnnnnnnnnnnnnnnnnnnnnnnnnnnnnnnnnnnnnnnnnnnnnnnnnnnnnnnnnnnnnnnnnnnnnnnnnnnnnnnagaaacaagacttagaccaaaacccctggtgttccrgcaataaaattagacacatggctttcagtgttctttaaagttggtgtttaaaagcctgaacaggatgaagggctgtgtcatagcacagactgtcttacagtagcttatactatcaccaataatttgttatcagcaatgtccgaggtaataaaatttgccagcctttctt

SEQ ID NO: 14354 - DNA, 977 bp, Homo sapiens
  misc_feature (1)...(977): n = A,T,C or G
cttgaatatatattttattaaaacaagaaatcatttctttaaaatataaaaatatttaagtagtaattggctatgttgacatttctacttatgagagatgtccatttggaataaaacataaataaaacccttttacatggaggcatcaaaaatatattcttaaaaattaatagcttttaagtactaatataaaccttctctcacttgtaagttttctgacattgaatgctgcttccggttttcaatgatgcctcactcctgcaggctgcgttgaataaacatagaaattgatcccccaacattggtattaaagctctcaagccatgtggttccttaggagattgaaataggcccagttgtcccacagaactgatgttcatagtgtcttattagaaatttacagcccccactccctccccaagtcttaaaacttaaaaaagttacatttttcttctctgagttcctttctcaggaaaccaaccatcaggtctcccagacagtatcaaagaactaaaactcaccaggtcaccacatctggacaatgaaatgccagactccttatccatcatgattgcttaaacaactacctcctttctgttgaccagctctgcttccttacccctccctaattcctgttttacatttcttcactgctataaaaacccctaatttnnnnnnnnnnnnnnnnnnnnnnnnnnnnnnnnnnnnnnnnnnnnnnnnnnnnnnnnnnnnnnnnnnnnnnnnnnnnnnnnnnnnnnnnnnnnnnnnnnnnagaaacaagacttagaccaaaacccctggtgttccagcaataaaattagacacatggctttcagtgttctttaaagttggtgtttaaaagcctgaacaggatgaagggctgtgtcatagcacagactgtcttacagtagcttatactatcaccaayaatttgttatcagcaatgtccgaggtaataaaatttgccagcctttctt

SEQ ID NO: 14355 - DNA, 497 bp, Homo sapiens
caagaaacaaatcataatatcagaggtattctgtagtaagctaaagtataggactttaaaggaaaataatttttcatctgttacctgtgtctytgagatagcctgagaaaatccaattatttcctcagattaattctccattgtcaattacatgaattagaaatatattaaatcctttcaaagtcaaattaaaattattaaaaaatatagagtgattcataaatgaataaaaattatcaaagttatacttgtttgaattctagacttacagtgacagggagtttaataatgaaaatctcctaattgttaattggtttgtgtttaaccctctggatcttaattctgaatcctgcaatagctctctatctcactcagagaagaacatttccaacaaattgaatcattcctctacttgctgaatcttttacagtatctgtaaattgtataaatttcaggacaagtggggcaattccagaaatggttttcttctgcttctg

SEQ ID NO: 14356 - DNA, 497 bp, Homo sapiens
caagaaacaaatcataatatcagaggtattctgtagtaagctaaagtataggactttaaaggaaaataatttttcatctgttacctgtgtctctgagatagcctgagaaaatccaattatttcctcagattaattctccattgtcaattacatgaattagaaatatattaaatcctttcaaagtcaaattaaaattattaaaaaatatagagtgattcataaatgaataaaaattatcaaagttatacttgtttgrattctagacttacagtgacagggagtttaataatgaaaatctcctaattgttaattggtttgtgtttaaccctctggatcttaattctgaatcctgcaatagctctctatctcactcagagaagaacatttccaacaaattgaatcattcctctacttgctgaatcttttacagtatctgtaaattgtataaatttcaggacaagtggggcaattccagaaatggttttcttctgcttctg

SEQ ID NO: 14357 - DNA, 497 bp, Homo sapiens
caagaaacaaatcataatatcagaggtattctgtagtaagctaaagtataggactttaaaggaaaataatttttcatctgttacctgtgtctctgagatagcctgagaaaatccaattatttcctcagattaattctccattgtcaattacatgaattagaaatatattaaatcctttcaaagtcaaattaaaattattaaaaaatatagagtgattcataaatgaataaaaattatcaaagttatacttgtttgaattctagacttacastgacagggagtttaataatgaaaatctcctaattgttaattggtttgtgtttaaccctctggatcttaattctgaatcctgcaatagctctctatctcactcagagaagaacatttccaacaaattgaatcattcctctacttgctgaatcttttacagtatctgtaaattgtataaatttcaggacaagtggggcaattccagaaatggttttcttctgcttctg

SEQ ID NO: 14358 - DNA, 524 bp, Homo sapiens
ttttaagctattctaagagaaagttaaaggcatgaaagccaaaatgttatccaagtagacagaaaagcaagacatcaggtgcctgataacattgcttctcagagcataacaagagagaaaagcctcatcttcaagcccttctaccttggtgtcacctttgccttaggctacaggcttgcctttgtgtacctttccactcaccatgtaccatctcaacaagtcaattgtacctgaaggccttcattttaacttggtgttcaccatcttccactctacaaaaaagcaggataaaatatcaaactacatgaagtaccttttctgtagttcttgatagagaaatagatgtgagattaagtccaatcaatcatcctaattcctataaaatccttagctgtaaatgctcccttgagcacctaatgacctgaaatgattcttactgtctacatgaaccattctcctcctaaygctgacaggcaacaccattcccataaggataacaaaagttatgttaactgacagtgaac

SEQ ID NO: 14359 - DNA, 991 bp, Homo sapiens
atcagtttcttttatgaggcaaacataaccttgatattagtgttccaaaaatatagcatttaaaatgtcaacaagccaagcttgcatgtggataataataaaagtgttccgagtaaacaaaattctaagcaaatgattaacaatttcacagcataatagattgcattttattctggttatataacaaagattcagcactaggaaacctagtaatttatcaactaatccgtaaaaatgtaataattttacatatacatagatactgaaagtaaagtcgataaaagttaatatttgtgattagaaaacattgtggttaaatagtaatgtattgaagcaggaagtagaattgcaaactgatagtctatatgcaacgattattagagtggtactccaagtggtgtgttcctcatattggtaaagaagctagaaaaattaagttaaatattgagaaattaaaagaataaacacaatgtgattccgaaatacacttatgagaayggctataattgaaaagactaaacacaaaaatattggcaggaatgtagagcaatgagaactctcatatattgctgttgtgggtgtaaactgggacagtcactttgaaaaccagttttgtaatatttcctgacactagatgtttacatagaccttcacacagaaaagttatgtatccttataaatatttatataaatatattggagagaaatgggtatatgtgtccacctaaagacatatgaccaaaatatgtttataaaattctttgtacaataagtaccagcttattcataatagccccaaactcaaaacaatgcaaatgcccatcaacagtagaatggatagatacaccgcagcatatttgcttaatggagaaccacacagctacaaaatacaactgctacctacaacaacattgatgaatctgactgtcatgagtgaataaaaccagatgcaaaatactatgattccatgtatatgaaggcaaaaaaataa

SEQ ID NO: 14360 - DNA, 546 bp, Homo sapiens
tggcctttatttccaaggactttagggactttcataatgttaaacctattggtgttttagtctttattttacagcatctcttatctctytcttccataactttatttttaaaaattactttcccaccctgacaatttattttggtttatcttaatgctttcttcttcctttgcttgcattttaaatgttgatgttttccagcattctctctattaaccttttcagcatattcttaagtaatctcaaatcattcttgtcttgattttaacctatatactgatagatccaacctacatctctagctctgttgtttctctaaagcttcagattctaatatagataagtttggtagacatttccacttaaataactcatgagcactggaaatacaacatgcccaaagcattttcaccttcctatccaatcatagttctcttaatggcatcaccatctcctgagttcctcaaggcaaaaatctggcagccttccttggccttctaggtaggcagcactgttcagtggttagaaatgtgaactctggactgg

SEQ ID NO: 14361 - DNA, 546 bp, Homo sapiens
tggcctttatttccaaggactttagggactttcataatgttaaacctattggtgttttagtctttattttacagcatctcttatctctttcttccataactttatttttaaaaattactttcccaccctgacaatttmttttggtttatcttaatgctttcttcttcctttgcttgcattttaaatgttgatgttttccagcattctctctattaaccttttcagcatattcttaagtaatctcaaatcattcttgtcttgattttaacctatatactgatagatccaacctacatctctagctctgttgtttctctaaagcttcagattctaatatagataagtttggtagacatttccacttaaataactcatgagcactggaaatacaacatgcccaaagcattttcaccttcctatccaatcatagttctcttaatggcatcaccatctcctgagttcctcaaggcaaaaatctggcagccttccttggccttctaggtaggcagcactgttcagtggttagaaatgtgaactctggactgg

SEQ ID NO: 14362 - DNA, 505 bp, Homo sapiens
cctaatgattggagcagagctgacacgccaagggcgttttcttgcggttattttaaggaagccacctgaaatctaagacactgtccatgtgatcagtggcttcagttcgaatgttcctcggggtcagatcctggcccggagcctttaacatgtgaccacggggttgtgttgagcccacaattatccaatttaaagcaaygtaaaagacgtagaaccaaactactgagggtggcacattcagtcctgggagagggacagagaaaacaggtggggcattcacggtggtccctggagcttcagccactccagagggttctggaaggctccattgcccactctcctctttccacacccccacctccacaacctgtactcctctctgccaggagccttgtcctaggcttcagggtgggagaagtctccggtcctgccccattcccacggcctcaccccactgacctcctcactacctttcccctctccaaatccgaaaaggctctcccat

SEQ ID NO: 14363 - DNA, 535 bp, Homo sapiens
aatagaggcatcttagacagaaaggggaaacagaagtaccaaggaagtttggctgaaatttggggaagatactgacaaattgagtataactgactatatatattttgatatttggttaaacttttgatgggttggtacaatttcattctttgcttccctactcctgcaaaacaactttttatatagcatgttctgatgtcttacaccatttgagcttcacaacacccatagttgaggtgatcattgctgttttatggataagggatctgagggtcagagaggggctggcttctgctcggggtcgtggctgagttgtcggagaagctgggactagctgtggctctctcctctctagcatcctgcctctagttgttcagctttggaccaactaggttttcacttcascgtgacacatcggtgtggtgagtttcagagcaaggatttacaaaaggggatactgttatactggacccctgttaatgtcaacagggacagcaccaggcttgacaagccaaaaaagagacccagaaccagc

SEQ ID NO: 14364 - DNA, 535 bp, Homo sapiens
aatagaggcatcttagacagaaaggggaaacagaagtaccaaggaagtttggctgaaatttggggaagatactgacaaattgagtataactgactatatatattttgatatttggttaaacttttgatgggttggtacaatttcattctttgcttccctactcctgcaaaacaactttttatatagcatgttctgatgtcttacaccatttgagcttcacaacacccatagttgaggtgatcattgctgttttatggataagggatctgagggtcagagaggggctggcttctgctcggggtcgtggctgagttgtcggagaagctgggactagctgtggctctctcctctctagcatcctgcctctagttgttcagctttggaccaactaggttttcacttcagcgtgacacatcggtgtggtgagtttcagagcaaggatttacaaaaggggatactgttatactggacccctgttaatgtcaacagggacagcrccaggcttgacaagccaaaaaagagacccagaaccagc

SEQ ID NO: 14365 - DNA, 1647 bp, Homo sapiens
ttttaaaaaagtgtcactgaatattttacacatttgatagaatgatttgaattttatttttcaccaaaagaagtttgaagcatagaaaattcttggatctgatacttatttctatcatgaaaatgtaagttaaatttgactatgtctttatagtctcaattgttcaagttggctatttatgaattactaaagttaaactttgaaagtatggtattacttacttcattttggattaagtaaaataaataccctgtgattgataaaactgctttaaatttttttcttccattcctgtcaatatgcctcctttactctggtttttctactatgagtgttattaaaacagatcatttaagcagttaagatagatgttwtattgtctgtgtgtcgttttgtaaggatatttggatggctttggaagagaataggcaaattttcataaatttcttttctacactttagatttttttttttttttgaggcagagtcttactctgtctctcagtctggagtgcagtgttgtgaccttgggtcactacagcctcaatttcccgggcccaggtgatcctcttacctcagcttctccagtagctgggaccacaggtacatgccaccatgcctggctaactttttgtatttttggtagagatggggtttcactatgttgtccaggctggtctgaagctcctaggctcaagaaatccaccttcctcggcctcccaaactgttgggattacaagtgtgagtcaacatgccggtctgattacttcttaaattctatgcacatttggccttcctgtgtcttctggtggctttgcacaatagtctcatatcccatgatagttataagaataaagccttaatttaggaactttccagataatatcaccataagattgtaggagcaaggtaaagccctgccataaaatcttttttttaactgagaactacagtacttttgctctaatttaagcattattaaacattcctgggcattagttcttacaaggaagtgaacattttccaatacacttaggggtagtaaaattggataattatctgccatttttcactgtatctatttcctttttttgtgacttcatatacttctttttgagtgagtggatcatattgccctttctcattgatgttgacttgatccatgatatgttttgaatgatggaaaagatgtcagtggatatgacgtaactagaagcttgaaagacactcatatagtgtgggtagctcatatttgcccttgtgatttgccacaagaagaacatgttcctagtagctgatgatccagggagaatgtggagatatttggagtgtacctgaccgcaacccaaagcctggagccaagttcagctgagcccaggagagttatagccaacacacagaacagtgttttgaaatccacagatatgtataaagtcacatgtattttggtatgtatgcacatagcattattgcagcaatagataactaatatagtatgtttctgaaattttcaaaaaaatctttaatttctggcatttcttggtttcctatgactatcattttaaatatttcttccagaagtcctctatcagcagggtaacacgcaggtatcattatagatcttccacatgagttcacgttactgtg

SEQ ID NO: 14366 - DNA, 529 bp, Homo sapiens
gcctcataattggcctttctaggtggctattattttgtccaattatcagtgggcttgcttctcttaacacaaagtgccatctgcaaagacacatgtgacttcagtacctactakaacttcaggttttgacatcggcaccactttctatatttcacatgcccctttctctttggtacactactcttatcacaaaatatttttggaagacacatttatattggtctgtaggcctacaaggcagttgagggatcattgaaaacattctttctacttcagtatgacgttttgcaaaatatagtaagaatgaatagaaaaatctaataaaaagcacagacatcagaagcatgtatatttttattattagattcaatagaaatattgcatttctatacatataagagcaaatgggatcaaataaaataatttaaaaactatgctttgtatattgaaggtgtgcatgtaggtgagtaatcgagtatttttagtacatgtaaatctgtatggtatacaatgtcaagtaaattaaaag

SEQ ID NO: 14367 - DNA, 530 bp, Homo sapiens
tcgagactgtttctcaagataccccatgaaaataaataacattatttgaatttatacctttcacaacagttgagatccacgttagttttaacatcagataaatttagcagtcttagctatataatgtgacttgcacatgaatttaagagattagaaaaacaaaaggcaaaaaatagcctaacacagaaatgaacgcacacactcgcgcacacacacacacatacagacacrcacacgctagagagagacatcttttaaagcaaaaattggttttatattcctaattcattatcagttgtttatctagacgttacttaatttagatatactatatacgtatgacactatggtcctcatgctcttgaagtagtgtttcttaaattgagtgtgcataggaactccctggagagtacaagtaaaattcctaggtccccaccctcagaaatgttgattatgtaaatctcaggatgggtctgaggtattttaaatgttatgtttggaacctgcttgagataaatttaggcaaatta

SEQ ID NO: 14368 - DNA, 530 bp, Homo sapiens
tcgagactgtttctcaagataccccatgaaaataaataacattatttgaatttatacctttcacaacagttgagatccacgttagttttaacatcagataaatttagcagtcttagctatataatgtgacttgcacatgaatttaagagattagaaaaacaaaaggcaaaaaatagcctaacacagaaatgaacgcacacactcgcgcacacacacacacatacagacacgcacacgctagagagagacatcttttaaagcaaaaattggttttatattcctaatycattatcagttgtttatctagacgttacttaatttagatatactatatacgtatgacactatggtcctcatgctcttgaagtagtgtttcttaaattgagtgtgcataggaactccctggagagtacaagtaaaattcctaggtccccaccctcagaaatgttgattatgtaaatctcaggatgggtctgaggtattttaaatgttatgtttggaacctgcttgagataaatttaggcaaatta

SEQ ID NO: 14369 - DNA, 574 bp, Homo sapiens
cagaaataaatgcaaatgtattatactttttctcactgtaaaaattatatgaagaaaagacacagaaataagcttgagccaatgagttaatgctcctacaaaaagggaattagtgtgaatgatgaatgcatattttrataaaaagacaaattgccataggtcctgaaaatatcagagatgaaataaagcgttaagtcagaatgctttattctgtcatcatggaaatcatattgttctactaaacaagaacattacagtaagtgagacagttgacatctttcacaggattttagttcctttgaatcagatctacgcttaacacttttaaataactccttaagaaaaaagtgaatttattaaagctgtattttgttcgtttagatatttccttggaataacagttgagaacatatcttgaaagttcaaaagactcagatgcaccacctcaaatttgtgacagcaacgaaagtgtgcatgaaattggctcacactacatattacagatgatcagtgcattgaatacacataacttggccagtgtggctaaaagacttggaactgcactggttaacaa

SEQ ID NO: 14370 - DNA, 574 bp, Homo sapiens
cagaaataaatgcaaatgtattatactttttctcactgtaaaaattatatgaagaaaagacacagaaataagcttgagccaatgagttaatgctcctacaaaaagggaattagtgtgaatgatgaatgcatattttaataaaaagacaaattgccataggtcctgaaaatatcagagatgaaataaagcgttaagtcagaatgctttattctgtcatcatggaaatcatattgttctactaaacaagaacattacagyaagtgagacagttgacatctttcacaggattttagttcctttgaatcagatctacgcttaacacttttaaataactccttaagaaaaaagtgaatttattaaagctgtattttgttcgtttagatatttccttggaataacagttgagaacatatcttgaaagttcaaaagactcagatgcaccacctcaaatttgtgacagcaacgaaagtgtgcatgaaattggctcacactacatattacagatgatcagtgcattgaatacacataacttggccagtgtggctaaaagacttggaactgcactggttaacaa

SEQ ID NO: 14371 - DNA, 574 bp, Homo sapiens
cagaaataaatgcaaatgtattatactttttctcactgtaaaaattatatgaagaaaagacacagaaataagcttgagccaatgagttaatgctcctacaaaaagggaattagtgtgaatgatgaatgcatattttaataaaaagacaaattgccataggtcctgaaaatatcagagatgaaataaagcgttaagtcagaatgctttattctgtcatcatggaaatcatattgttctactaaacaagaacattacagtaagtgagacagttgacatctttcacaggattttagttcctttgaatcagatctasgcttaacacttttaaataactccttaagaaaaaagtgaatttattaaagctgtattttgttcgtttagatatttccttggaataacagttgagaacatatcttgaaagttcaaaagactcagatgcaccacctcaaatttgtgacagcaacgaaagtgtgcatgaaattggctcacactacatattacagatgatcagtgcattgaatacacataacttggccagtgtggctaaaagacttggaactgcactggttaacaa

SEQ ID NO: 14372 - DNA, 574 bp, Homo sapiens
cagaaataaatgcaaatgtattatactttttctcactgtaaaaattatatgaagaaaagacacagaaataagcttgagccaatgagttaatgctcctacaaaaagggaattagtgtgaatgatgaatgcatattttaataaaaagacaaattgccataggtcctgaaaatatcagagatgaaataaagcgttaagtcagaatgctttattctgtcatcatggaaatcatattgttctactaaacaagaacattacagtaagtgagacagttgacatctttcacaggattttagttcctttgaatcagatctacgcttaacacttttaaataactccttaagaaaaaagtgaatttattaaagctgtattttgttcgtttagatatttccttggaataacakttgagaacatatcttgaaagttcaaaagactcagatgcaccacctcaaatttgtgacagcaacgaaagtgtgcatgaaattggctcacactacatattacagatgatcagtgcattgaatacacataacttggccagtgtggctaaaagacttggaactgcactggttaacaa

SEQ ID NO: 14373 - DNA, 612 bp, Homo sapiens
cgcttgaacctgggaggtggaggttgcagtgagctgagatcacgccaccacactccagcctaggtgacagagtgagactctgtctcaaaacaaacaaacaagacaaaaaaacacacaaagtatatgattcagtggcttttaggaaattggctatagccttttgctccttcctcagccctggcttccaacctcactacttgaccactgttcttccagaaccttggaagtttaatgtgacaggaacaccttaatccaggtgctcttggggaagggtgatcrtttgggaacctttttgccgttgctgtctccaagttctgccagtgcaggaatccacgtctcagaagacaaagctcacatcagtgttgctggttggcaagacgcgagcagcctccaggctatggaacattgtttcgatgattgtcatcttctattttctgtttcatttgaaaaagaagcatgtcaccgagcagaaaacattctcaatgaaaatggaatagcacagagacagtggcacaggttgaaatgtggggcatgtgtgtgatggagtgagtcactctctctgggatggataagttgtggccctggttggggatgttgcattggtttcagaag

SEQ ID NO: 14374 - DNA, 659 bp, Homo sapiens
tactcggacatcagacatctgccaagacacagttagcacttgctggatgataacccagtatactggtttttaaatttaatgaacacattgccaaactcttctgtatctgtcattcatttgatacaagttgaataaccaaaattatcctttcagggtattttaaatgtgaaagacctgaatccaaattcagatatcactgataattaaaatcagatttcccagaacctcagatgaatgaaaatatttagtcagactcttttacaaatatacaagtatctttttattaaaacatatcttgaaagcattatgactccaacagttctacaaattatagcaaattgctttttgtttaaaaagcaattatttcattccccagtataaagaattgtgcttggaggagcagtcacagatcaaggagataaaggcaaggtaaagttgtttgttaatgttttattaatccaagttattagcactactaaaataagatgtrataggcagaataatggccccacaaagatgtcctgtgtcctaatccctggaacctgtgaatatattagatggcaaagggcaattaaagcggaacagaattaaggctgctaatcagctgaccctgaaatagactgtcttagatcaagcaggtaggtccaaatgttttcaca

SEQ ID NO: 14375 - DNA, 521 bp, Homo sapiens
aagttggactaaacctcagctagctgaggcttaggcatgtccttgaggctgtcttggggtaggcttacatgaaaatgctctaaaatgcagaaacacatagacggagggtatgaatggtaactggggtaatgaacagagagatgatttgccaagatgcagaggcagatggtggataaaaaccaaagctgaragtcaagaaccagattacacctgatccaacggaagcagaaagggccaatgaagagagcctgggtatactgctgtgaaccctgtggagggttacggctcacttctatgggctgctaggctgtctgactggcccggagacaaaggttgtaaggaagcatgaaccattcctgtacccatccccagcaaagccaacagcagaagcctggaaaggattctaaagttttggcttgtgcagaccccagaaatggagcaagatggtgtctgcaatggttctgaaatctttctcttgctaggcagtgaaggatgatgctgaggattctgagtatgctgac

SEQ ID NO: 14376 - DNA, 555 bp, Homo sapiens
tacgacccagggaaatttactaaggtggcatccactgggtacctcatgtgtgtggcacccccagcaaccctaggaaataagagctgttgttttctgtgttggacacattagggaatcaaagcccagaggggttaccttgtccctagaccatgctgcttctccaacaatacagcccaactgtgctgaaatatctagcaggtcctggtggmggggatggaggccctctcgggtcactttgctactctccaccagggccctcggccaccccctccttgctgcggatgccccaggtttgttttctttggctccctcattaatgagttccacagcacaatgctaagtctagttatgcagccttaattggtttagttacaacaagataattccttttttcttctcttggaggcctttctgtttaaagacattttagctggaagatgctaattatcaatgaggagaaaatgacacctgaagagttcattttccatcttggtctttggtttttcctttgaactctctttacacggccctctttcccacttcatcacttctccc

SEQ ID NO: 14377 - DNA, 555 bp, Homo sapiens
tacgacccagggaaatttactaaggtggcatccactgggtacctcatgtgtgtggcacccccagcaaccctaggaaataagagctgttgttttctgtgttggacacattagggaatcaaagcccagaggggttaccttgtccctagaccatgctgcttctccaacaatacagcccaactgtgctgaaatatctagcaggtcctggtggaggggatggaggccctctcgggtcactttgctactctccaccagggccctcggccaccccctccttgctgcggatgccccaggtttgttttctttggctccctcattaatgagttccacagcacaatgctaagtctagttatgcagccttaattggtttagttacaacaagataattccttttttcttctcttggaggcctttctgtttaaagacattttagctggaagatgctaatyatcaatgaggagaaaatgacacctgaagagttcattttccatcttggtctttggtttttcctttgaactctctttacacggccctctttcccacttcatcacttctccc

SEQ ID NO: 14378 - DNA, 532 bp, Homo sapiens
tacacagcattaacatgggtcagtctgcctgtgctggcaagatgggagctattaaatttgtcaaagattccagttgtgatgaatataacagccccatttttaaatcctttgatttatattatctttagaattaataatcactcatccaatgaaatgatcttggtctgggcctctagccaattctgtcattgaaggcgataagacctaatagctataagccttatatcaatcagcttcagacccaagggaagtatgttgcccaaatgagccactcccttctaattccttgccrtcatgactgatgctagcaagcatcttcattacattgctgctgttatggtctgcagaacagatttacgtgctacagttaagactacaaaacaagatctcatggtactttttcaaccggtggtgaattaaatttagataattttaaaaatctatacaaatattacatgacctaatgcaaacttacgcaaacataaccatctataggtagaaagagtagaataaaaagcatacaagaatttta

SEQ ID NO: 14379 - DNA, 532 bp, Homo sapiens
tacacagcattaacatgggtcagtctgcctgtgctggcaagatgggagctattaaatttgtcaaagattccagttgtgatgaatataacagccccatttttaaatcctttgatttatattatctttagaattaataatcactcatccaatgaaatgatcttggtctgggcctctagccaattctgtcattgaaggcgataagacctaatagctataagccttatatcaatcagcttcagacccaagggaagtatgttgcccaaatgagccactcccttctaattccttgccgtcatgactgatgctagcaagcatcttcattacattgctgctgttatggtctgcagaacagatttacgtgctacagttaagactacaaaacaagatctcatggtactttttcaaccggtgktgaattaaatttagataattttaaaaatctatacaaatattacatgacctaatgcaaacttacgcaaacataaccatctataggtagaaagagtagaataaaaagcatacaagaatttta

SEQ ID NO: 14380 - DNA, 538 bp, Homo sapiens
aggccaggagtttgagaccagcctggtcaacatagcgagaccctcatctctacaaaaaatacaaaagttagccaggcctggtggcacatgcctgtaatcctagcgacttgtgaggctgaggcaggaggattgcttgagcccacgagtttgaggctgctgtgaactatgatcatgccagtgaactccagcctgggcaacagagtgagaccctgtccctgccctcccattgcccccagctcccaccaaaaaaaagaatactgaagtgcttaaaagtacttatatttgtaagtgtaattgaaagtattcaaagatgtttaattagcttgctttataaaatgagaccaaatattattcaagggatccttaactgtgattgctaaaatttgscagaagtttttattttacaagtaaaataggatttataagatgaacacaaaagcctaaatatgaattgcatttttaaatatagaacttgaataaatctaacattgctgtctaaaaaccagaccaaacccctgaatgatcttttctatgcata

SEQ ID NO: 14381 - DNA, 538 bp, Homo sapiens
aggccaggagtttgagaccagcctggtcaacatagcgagaccctcatctctacaaaaaatacaaaagttagccaggcctggtggcacatgcctgtaatcctagcgacttgtgaggctgaggcaggaggattgcttgagcccacgagtttgaggctgctgtgaactatgatcatgccagtgaactccagcctgggcaacagagtgagaccctgtccctgccctcccattgcccccagctcccaccaaaaaaaagaatactgaagtgcttaaaagtacttatatttgtaagtgtaattgaaagtattcaaagatgtttaattagcttgctttataaaatgagaccaaatattattcaagggatccttaactgtgattgctaaaatttgccagaagtttttattttacaagtaaaataggatttataagatgaacacaaaagcctaaatatgaattgcatttttaaatatagarcttgaataaatctaacattgctgtctaaaaaccagaccaaacccctgaatgatcttttctatgcata

SEQ ID NO: 14382 - DNA, 538 bp, Homo sapiens
aggccaggagtttgagaccagcctggtcaacatagcgagaccctcatctctacaaaaaatacaaaagttagccaggcctggtggcacatgcctgtaatcctagcgacttgtgaggctgaggcaggaggattgcttgagcccacgagtttgaggctgctgtgaactatgatcatgccagtgaactccagcctgggcaacagagtgagaccctgtccctgccctcccattgcccccagctcccaccaaaaaaaagaatactgaagtgcttaaaagtacttatatttgtaagtgtaattgaaagtattcaaagatgtttaattagcttgctttataaaatgagaccaaatattattcaagggatccttaactgtgattgctaaaatttgccagaagtttttattttacaagtaaaataggatttataagatgaacacaaaagcctaaatatgaattgcatttttaaatatagaacttgaataaatctaacattgctgtctaaaaaccagaccaaacccctgaatgatcttttstatgcata

SEQ ID NO: 14383 - DNA, 522 bp, Homo sapiens
ccatcccacagggtgctgaatgtttccagtgctcatttaaaaatgctcccatcagagttacccaaagagcttttcccacaattgttgagactgtagaaaggttaggtgaatggcataagcactgctagaagtagttggttggagggaccttctggcagtgccttgcctaaggggcactgggtcacagggtcactccatgaacatgccatctttcctataacatatgtcaggctatttgcttcagctgtgactccttctgttgcagtaggcagtaaatccaatccaaagaggcttaagcaaaaagagacttcatcggctcgtataactgaaaagctcagaggtggggctgacttcctgtgctgctaaatgtggacctcaaatgctgctatacagccacggtttctctctatacatctgttggcttttgtttcatgaaygtcttctctccatgagtgctggctcattcataggcgggctgtccccatcaaactcacaagatggctgcagaggctccagaacttg

SEQ ID NO: 14384 - DNA, 517 bp, Homo sapiens
tgcayaggatttaaataaggagaaagagagaattctaggaaaaggaaatggtagatactggcatgaggtcaggaacctgaaaggtatctttctattttagtaggtagtgctgtttagttacagcatggagaaaagtgtaaaagtgcattaagaaaaggtagcggagggctaactactaagctaaggaatttggaaactagcttgtgagccactaaacgttttagggcagaaaggtgatgtgctaaaagcacagatttgaaaggtgaatgggtgagaatgagagagatttcaggtgaggactccggcaagaggcttatttttgtttgggatgggctttccacattttcacattcctagagtttgacaggaacacaaattaaagtcctccgtgcacggtaaagccaggtaagaagccaacttctgttttagaataacatattggccatgcagttacgtttatttttacaatggaagtgactgattttttttattgctatttcacttttcaccacaaagc

SEQ ID NO: 14385 - DNA, 1391 bp, Homo sapiens
tacaaaatcctggattccatagtgactacatatgtgtgcaagctcaggcatttaaacactttgattttcactgtacacccaagttaatttacaccactgttgtgagaattaaaagtcacacaagaaaaaactgtgaaaagttaaaagtggtatacaacatcttatttgtatcaccactattttttttctgttcaggacaggtatgagttactctccagatagcacgatgaagcgtaaatacctagaacactgctacttaacttcctgagtggagtyaagatttacattagcttgtattgaacggaaataattcaattctgtaatttatgtaattctaagaaaaaacactagaaagtgttctgtcagtcaggtaatttcctagcaattaaaaaatagaaagtgagagaaaatttcaaaaacaaaacatccttccctatagtgttagctttcaacaaatattatagaactgaatgtttgtttgttgtttttgtttttgtttttttgagatggagtctcgctctgtcgcccaggctggagtgcaatggtgtgatctcggctcactgcaacctccgcctgctggattcaagtgattctcctgcctcagcctcccgagtagctgggactacaggtgcccaccaccatgcccaactaatttttgtattattagtagacacagggtttcaccatgttcactaggctggtctcgatctcttgacctcgtgatccgcccgctttggcctcccaaagtgctgggattgcaggtgtgagacatcaccccaggccagaactgaatgtttaacatacatttgctgagtgctatttgaaatacaaattatatcttcaaatacagtgcaatcaagtaaaaagcataataattcaggcaaagttcactaaaagagttaacctgcatcataaagataagataaaaaatatattttcctcagatatagccacaccccttccattattaaagcccgtaactacgaaagttatgatctgcttttaagtctgtatgggtgtttttggcaacagaaaacaactgcttaagtctttcataggagaatgtgaaattgctgctctgttttgtcatctagtcatgacgagtctttatatcaaaacagcaaacacatccaaactatcatttgacagatttcttccatcaggaaagaaaagaacaactattcttggttttaaaaggagaaagtataatgaaactattttctttaatagattaaaagacaatagagtacagagaggcaaagagatattcaaactcacaaactcaagaaaggcatttgctttccccacagtctcactcacctcaatctaaaaatgtgcacattcatagtcttccaattctagatttgttttctgtgggtgccaacattcca

SEQ ID NO: 14386 - DNA, 1391 bp, Homo sapiens
tacaaaatcctggattccatagtgactacatatgtgtgcaagctcaggcatttaaacactttgattttcactgtacacccaagttaatttacaccactgttgtgagaattaaaagtcacacaagaaaaaactgtgaaaagttaaaagtggtatacaacatcttatttgtatcaccactattttttttctgttcaggacaggtatgagttactctccagatagcacgatgaagcgtaaatacctagaacactgctacttaacttcctgagtggagtcaagatttacattagcttgtattgaacggaaataattcaattctgtaatttatgtaattctaagaaaaaacactagaaagtgttctgtcagtcaggtaatttcctagcaattaaaaaatagaaagtgagagaaaatttcaaaaacaaaacatccttccctatagtgttagctttcaacaaatattatagaactgaatgtttgtttgttgtttttgtttttgtttttttgagatggagtctcgctctgtcgcccaggctggagtgcaatggtgtgatctcggctcactgcaacctccgcctgctggattcaagtgattctcctgcctcagcctcccgagtagctgggactacaggtgcccaccaccatgcccaactaatttttgtattattagtagacacagggtttcaccatgttcactaggctggtctcgatctcttgacctcgtgatccgcccgctttggcctcccaaagtgctgggattgcaggtgtgagacatcaccccaggccagaactgaatgtttaacatacatttgctgagtgctatttgaaatacaaattatatcttcaaatacagtgcaatcaagtaaaaagcataataattcaggcaaagttcactaaaagagttaacctgcatcataaagataagataaaaaatatattttcctcagatatagccacaccccttccattattaaagcccgtaactacgaaagttatgatctgcttttaagtctgtatgggtgtttttggcaacagaaaacaactgcttaagtctttcataggagaatgtgaaattgctgctctgttttgtcatctagtcatgacgagtctttatatcaaaacagcaaacacatccaaactatcatttgacagatttcttccatcaggaaagaaaagaacaactattcttggttttaaaaggagaaagtataatgaaactattttctttaatagattaaaagacaatagagtacagagagscaaagagatattcaaactcacaaactcaagaaaggcatttgctttccccacagtctcactcacctcaatctaaaaatgtgcacattcatagtcttccaattctagatttgttttctgtgggtgccaacattcca

SEQ ID NO: 14387 - DNA, 552 bp, Homo sapiens
gttatctgtacatcaagctaacaatggatttttaaacagaaatcagaacaatcttttagaggtaatggatacatgtacacttctttaatggcagtgatggttttgtggaatatatttcaagactyatggaattgtacattttaaattgattggttctttgtgaaattgattatacttcaaaaacccttaaagaaatttaaatactaacacacctgggaatttgagcactttatactgatcaacataaaatataaataaaccattcatattgcaaaacgtattatggagtcataatgaggaattctggaaggctagaataattatatgtaacggtgtattatgattcacaccgctcatgtgtatgaatacatgttacatacgattatatgtaacagtgtattacgaagctagagtttaatttattgaagccatttctacttttatttttatttctaaagaatataaaacatttttaaactccaaatttaatatgttatctaagtgaaacaaagtcaaatgcaaaaatgtcaatatctgccttgtgaaaggcag

SEQ ID NO: 14388 - DNA, 1139 bp, Homo sapiens
  misc_feature (1)...(1139): n = A,T,C or G
ggcccatcctttaccctataaccccaaaactgcctccacttttctgatcctccccaccctcaaaccatatacactctgatggaatgtgccctgcagtgaagtcccagactttcttcttcattatgaaggaagagaaaaaacaaaacttcgtctgttctcattccaaaaaatcccttaagtttgttatctgcgaagtactctgatctttgagaaaatatgtcctaaaaataccaggtagtcctgattatattaatttttcaaccttaccaactattggtgccaattaagatggtcaattccagccccaggaaaacataaacatgtctaagaattatcagaaagggaaatctatttacagcagactaaagttaatgtctttgtgattcaaccttaaactgtattataccaaatacagtattttatctgacaaagagtgtttttaaacttaataagagaacagagcttactgaatctttcccaatatcttataatataaaaaatggatttggggccgggcatggtggctcacgcctgtaatcccagcactctgggagagcaaggcaagcagattgtttgaggtcaagagttcgagaccagcccagtcaacatggtaaaaccccatctctactaaaaatacaaaaattatctgggcgtggtggcgtgcacctataatcccagctactggggcggggggtgttgaagcacaagaattgcatgaaccaggaggtagagtttgcagtgagccgagannnnnnnnnnnnnnnnnnnnnnnnnnnnnnnnnnnnnnnnnnnnnnnnnnnnnnnnnnnnnnnnnnnnnnnnnnnnnnnnnnnnnnnnnnnnnnnnnnnnatgctgattgcagcaattttccatacaaaaattcacgtaagaaaataaaaactgcctgtaatcttaccacccaaagaaaaccacttttaacatttagatgtagtccccttctgtaattttctacatgtatgtatatataccaaatcagaatcctatttttatacctaatttkctcaaagattgtaacagtaacttctggaggtagaggtggcatttttattccaatttaagtgatgggaaaactggaataccaagatacacatctaattaatggcagagctaggactaga

SEQ ID NO: 14389 - DNA, 352 bp, Homo sapiens
cagtgggtaggcaaattcccttccccctctatctcctactttcagtagttcagagatgagactgggtgcggtggctcacgcctgtaatcccagcactttgggaggccgagttgggcatatggcttgaggtcaggagttcaagaccagtgtggccaacatagtgaaacccagtctctactaaaaatataaaaattagctgggcgtagtggtgtgcacttgtaatcccagctacttgggaggctgaggcagaagaatcacttgaacctgggagagagaggttgtagtgagtggaaatagtgcctctgtactctagccygggcaacagagtgagactccatctcaaaaaaaaaaa

SEQ ID NO: 14390 - DNA, 523 bp, Homo sapiens
tgtccaggtggtacatgttgyatctcctttgctacccctcatttttctaattaattggtccattttcaaagcaaaagctggcaggcacttgctcctttagggtctttctaaacctgccaaaaacagccacgttaaaaaacctattttatgactaggttttccaaagttacagcctctctcattccaaccagcttggcgagaaggaggccaaaacacagattaagccattttctcctcgttatcgccccattaagcttgcaaagatgctgaggaagcccagcgcttcatctacctgttctggccagggaaccagcaagaatttagcaccttcctctgaaaggagccatttatccaatgaatcagggagaggctcctcctttcctggctggaagaggaaaccctacaagtaaaatgcagtaaaaccttggcagctcagaacctgtggggaatgaatcattctggcaagggaagtttttcaggtttcttagggtgacttccttagccttcaaaattcaaaataatt

SEQ ID NO: 14391 - DNA, 631 bp, Homo sapiens
tctttttttgacaccaaaacaataatgctttaagagtagaccccaaattttctggacatttgatcctcaagctgtgcygaacaagaaaagccctagatgcccctagaaactcaagaactttcttctagatacttacctgtccctcctggacaaagggataaaaaatgtctctgaccaaagaagctttgagaagactacttgcagagaattaccaacttacccatcagatttgagttcatgaaaggtgttggggacaagccttcatgggctcctaatcgactgtcattcaagtgatcactgtaatgagggctgtctgtaaaaccctagggggagaaaaagatcagagtattaaagagattatttggcagtcccgctaattgagcataatgacactcacctaattaatatacagacttacacatggtcatttctgaccaagtttcttgttcattatttgaaaagctaacagcagaagtgcttcttttattccttttaagattttaagtcaaaaaacattttctttattgatcgtaaagaaaagtgggtttctataaataaacactaaccatgagcacgaatgttttcaaagtatcatcagctcttctgatgggatggggagctataagaattc

SEQ ID NO: 14392 - DNA, 623 bp, Homo sapiens
taaaggatgctggtcaaataacacctacctgctataagaacattctagactacaatgctatgaatgatagaataaagggttgtttccagttttcaagtgtagggttgggtatgattaacttctttgttaatcccttaagatttagggataacttcatagaaataggtcttccctcaatctaayttttagtcttttggttttgttatttatttatttagagacagggtctcactttgtctccaggctggaatgtagtggcacaatctccactcactgcagccttgaactccatggcccaagggatcctcccatctcagcgtccccaagtagctgggactataggcatgcaccaccatgcctggctaattttcgtattttttgtagagagggggatttcaccatgttacccaggttgatcttgaactcctgagttcaagcaatcctctcagcttgacctcccaaagtgctgggattacaggcatgacccaccgtgcccggccctggttttgttttaattcaacaagtaatacaaatttatttagaataattagaaagggaaaaatcaccaataactccattatcccaagatatcaccactattgacatttttgagttctaggttt

SEQ ID NO: 14393 - DNA, 623 bp, Homo sapiens
taaaggatgctggtcaaataacacctacctgctataagaacattctagactacaatgctatgaatgatagaataaagggttgtttccagttttcaagtgtagggttgggtatgattaacttctttgttaatcccttaagatttagggataacttcatagaaataggtcttccctcaatctaatttttagtcttttggttttgttatttatttatttagagacagggtctcactttgtctccaggctggaatgtagtggcacaatctccactcactgcagccttgaactccatggcccaagggatcctcccatctcagcgtccccaagtagctgggactataggcatgcaccaccatgcctggctaattttcgtattttttgtagagagggggatttcaycatgttacccaggttgatcttgaactcctgagttcaagcaatcctctcagcttgacctcccaaagtgctgggattacaggcatgacccaccgtgcccggccctggttttgttttaattcaacaagtaatacaaatttatttagaataattagaaagggaaaaatcaccaataactccattatcccaagatatcaccactattgacatttttgagttctaggttt

SEQ ID NO: 14394 - DNA, 290 bp, Homo sapiens
  misc_feature (1)...(290): n = A,T,C or G
tagaagagaaaaactattctcctacacattcactaagaaatttttataaaatgtgtgttgggcagtagcaaaagaaaggagactataaatgtggaacaagtacacatggatttatgtccacacatgtatataatcacgaaaatattaaagtcatkcagtttaaaagaagtcaaaaattttaatggaaatnnnnnnnnnnnnnnnnnnnnnnnnnnnnnnnnnnnnnnnnnnnnnnnnnnnnnnnnnnnnnnnnnnnnnnnnnnnnnnnnnnnnnnnnnnnnnnnnnnnnt

SEQ ID NO: 14395 - DNA, 530 bp, Homo sapiens
ttttaatatagtccttattatacagagacaaagtatccagagaaaaagtgtgtgtatgtacatgtatatgtgtgtatatatatgtataaatgtatgtatgtataggtgtatatatattcaatcagatacttggttataattttatttaggcrcaattgaatatttgaccagatttttcaattttcagtttttgtttccccaaatgtgcccatattttgactatttcaggagaatacacagaaaaaccacacaaataaaatgttcttttaagttttctttgaaactatttcagatctcacaaataagatgtggtagctagaaaaacactgctctatagatgatgtatacctaaaaaaacaataaaaacgtatacacagtattctgctaaaaattagtatacaactctcagatataaatttaaaagatttacaattaaagaagaaagtaataatgcagaatcaaaccaagaagaattattatttggatggccctttagagttctacaaatgtactgataccccttatgccgt

SEQ ID NO: 14396 - DNA, 644 bp, Homo sapiens
gtatcagcgctgtacatcatttagcaggttgtatcttgtagctgtgcaatgtgtttgtctgtgtgtgtgtgtgtgtttcagcttgttagattctccaggtaactttgtagatccagtctgatttagcttttgttaaagtttcctcttcaacaaacagaagactgtttattcaaaatattcactcagtatggcactaagatttctaaagcctttacattaaaataatgcaggtagcataagactgataaaactggggccgggcgctgtggctcacgcctgtaattccagcactttgggaggccgaggcgggtggatcacgaagtcaggagatcgagaccatcctggctaacacggtgaaatcccctgtctacaaaaatacaaaaaacttagccgggtgtggtggcgggagcctgtagtcccagctactccggaggctgaggcagragaatggcgtgagcctgggaagcggagcttgcagtgagccgagaccacgccgctgcactccagcctgggtgacagagagagactccgtctcaaaaaataaaaataaaaaagactgataaaacatggccaaaaaaaaaacacctaattgattagaaagttatgcagtcttttcacatatgacataaggacacacctatctt

SEQ ID NO: 14397 - DNA, 526 bp, Homo sapiens
agtgtcttctgccctggcaaccttttcaggcccttcccacctgtaagtatgtgtgggctcctgacaacctggcgttggaaagaccaaggcaaggaaacagagtgaagattgtcggctaggtgacgttatggacctagagtcacctggggattatgggaacacaaagaaacgggctgtccatgagcatggatgggagatgtggttgagggagcrtgaattgtttaggtatccaggcccagcaaggacctcaggcagaggcttttaaactaagcttcaaacaccaagggcatcttcgggaagtttcccaaacctgtggaaactgggcaatatcactggtgcaatcccagcatgcttaggattcactgcttatgtccaccttctcaaactcctagctaaggcttgaaatgtcccagaaaaaaaaaaagaaccatttcttagcttggcagtaaacatcatgtttcttagattgatggtaaacatcatcttggcaaagataagtaagtcaaagaaagaagggaagaaaaaa

SEQ ID NO: 14398 - DNA, 1926 bp, Homo sapiens
gttaaaatatttcttacaatatcaccttagggtcaataaactgtggtaaattgcctaacatcacacatctgctaactggtagaacttgggtgcaaacataggattttacaacaaaaagctgggggattgttcccaagctaggacagcacctagcatagaatggaagtcctgtaaatatatactaagcatcagaatatgtgtcctatacatatacattttgtattgcatattatagcatatgatgtcccaaaccacacaccacatatatgcgtgtgtatgtataatttgctttccaggtcaatttctattttgggacttctctaaaataatcctgaagcaagaaatagttatttacatatttttgacaaaataaattctaggaataattttgttaatgaaaggtagagataaaagcaaattaagttgtggtagttgctgttcctggaaagattattttcagcaccgaggctgtgaaatgtaccagtcctcgcatcctggaggtgaccaagcctgatcaatgtcacccatgccaagggactccattgcctagattgttatgggctaatatttccgttctttaaaacgcgtacaggaataacttcaagcaaaataaaaatatcagtttgtaatggccaaattctctgaggtttataaaatgttgggactgatttgctgagttatagtaaaactaaagtagaccttgaaaggcactcaagttgacataaaacttgaacagtttaactagtaagagaaagactaacaaattaggttgaccagataatttatatttggaacaaatagcatttttaaaagaactgtttttgcgagaacccactgtgtgtgctggtaatgaggaaagtgccggccctgccttcaaatattctcaaagcccctgtgccaggcaggagccccaaagatgctgtgctaattccctggttgttaaatctgtgcccacgttactcgtcgtcactgatactcactttacctacattgtagagagctttagggattaccaaacactcccacactgagtcatcttggagcatcctagaaacttctaggtggatggcatttgatcttcctattatagatggaaaaaaggcacctgagagaggtcagcggctcctccaaagacccagaaacactggggaagcagttaattatttttcagccaaatttcagaaaatcaagataaagaaaatgcccattttggtgctttcaaaattaccaaagttatcaataactatactaattatatcccggaagcacacagagatgagaatgacggctgtacagtttgcaaactgcattcacatgcatgggtttattttacctttcacaccgcactcagaggtcagtagacagggatgcctctcccccttctcattttagcataatgggaactgaggcccagcggtgtaatcaacatattaggaggcgcaaggccaggagaccaactctcctttgcaggccaggtgtctttccccacctcctcacacacactcccactctcagatgcgagagcatgttaccatagcctcggtaatcctcaaatccggctttgtttgatagggatgagaataaggattcgggagatttgaccagctatctttcactttagtaccacttgagctaagagggagactttggggatgacagaaaatatgatctcaagtggaatttaaccagagcacatgaactgagagctccttaggagaggaggggactgtaaggaatgtttgtgggaagccgctctgcaccaggaccctttataaatgcctsatgccgcatcaccgggaagcagctgtggttacagcttaaatgcctgacccaaagttatcagccatgcagggctgagctactgctttcaagttgaagtgctggccgtttaccgctctttatttcatgtcaggctgttcccaagga

SEQ ID NO: 14399 - DNA, 522 bp, Homo sapiens
cagggagccctttccagaggtcccgttcattaagcctgggcagaatttcgacacagctcctgggtcccactcgttcctccgtgataacagaatgccaattcagatgctgcctgaaatcggcagkacatggttataccacccaatctgaaaccagaccacaaacgctcagttgaaatcattttgattccattatggaagtggtcattgtctcaaggtctctttcctaatgcgtaaaaaagaaaaaaactctttcattttgtgacatggccccatttggcttttgtccctcaaatatagagagaaatgtttgccttgctgtcatcacagagaaataaaattaagataggcctgtaaatgtggtcagttctcttcttatttcctagtctaaaagttgtgcttaacaaaatgtggcacagaaataagaaatagaaaataactaggtctcacaactcaataaccccacattttactctgtggttgcatttgtccatattttttctgaacatcaagtcatttgtttat

SEQ ID NO: 14400 - DNA, 522 bp, Homo sapiens
cagggagccctttccagaggtcccgttcattaagcctgggcagaatttcgacacagctcctgggtcccactcgttcctccgtgataacagaatgccaattcagatgctgcctgaaatcggcagtacatggttataccacccaatctgaarccagaccacaaacgctcagttgaaatcattttgattccattatggaagtggtcattgtctcaaggtctctttcctaatgcgtaaaaaagaaaaaaactctttcattttgtgacatggccccatttggcttttgtccctcaaatatagagagaaatgtttgccttgctgtcatcacagagaaataaaattaagataggcctgtaaatgtggtcagttctcttcttatttcctagtctaaaagttgtgcttaacaaaatgtggcacagaaataagaaatagaaaataactaggtctcacaactcaataaccccacattttactctgtggttgcatttgtccatattttttctgaacatcaagtcatttgtttat

SEQ ID NO: 14401 - DNA, 522 bp, Homo sapiens
cagggagccctttccagaggtcccgttcattaagcctgggcagaatttcgacacagctcctgggtcccactcgttcctccgtgataacagaatgccaattcagatgctgcctgaaatcggcagtacatggttataccacccaatctgaaaccagaccacaaacgctcagttgaaatcattttgattccattatggaagtggtcattgtctcaaggtctctttcctaatgcgtaaaaaagaaaaaaactctttcattttgtgacatggccccatttggcttttgtccctcaaatatagagagaaatgtttgccttgctgtcatcacagagaaataaaattaagataggcctgtaaatgtggtcagttytcttcttatttcctagtctaaaagttgtgcttaacaaaatgtggcacagaaataagaaatagaaaataactaggtctcacaactcaataaccccacattttactctgtggttgcatttgtccatattttttctgaacatcaagtcatttgtttat

SEQ ID NO: 14402 - DNA, 836 bp, Homo sapiens
gctgttagagaatttccaggacccccagccgctgtcagtataactttataactgaaccatttagaaatgaacataatctgtaagtaaagttggccacatctaaccttctgagtgcatgtggctgtttttttttctccaatacttaaatttgaggctatttctgtgcagaatagaagtatttttatgtgtgttttcttgtctgtagcaattgagatatcagaaggaatgaaaagtacatctttgatctattcactatggaggcttttaaatttttgatttccagcccaaatttcaaactcaaataggaataaaataggtactgttataaataaacaccacaacagtaacaaatacaaaggaaaaaggaagccagggaccaaacagcarcttcctcattcttcctttcctgaactggcagttctgggatggattggcaaaagtcatgtgaagtgtggggtttatggcctgtttttgctggtcccaagggctccaggttaagagttctgttgacagaggccaagggagcccctgtttactggggaaacgaatgtttctttacagcaaaggctgggtaatcccagatgctgaactaagaaacagcttgttctttgtatcaaggaatttactcttaaagcatgcttcttatttttagatttcaaaccccaagggctttgactgtggctgagtcagtgttccctgaaactattagtatattgctctcacacatcaagttttagtatgaatcattaaaaataacactgcacgtaacccgccagttttgttaagtagatggacaggtaagagggatgactatttatcctagaccagatcaaaat

SEQ ID NO: 14403 - DNA, 601 bp, Homo sapiens
ataactattatactcttaagaatgtgattgcaatgaaaaggagcaacagaactaattagtaattgattatattagcagccctgttctgggtataatgctaattcagagccatgttacaggtgatcatgggtaaaatctaacattatataaagaatggtggaacaaataggtgtgaaggagagaaaaaatgcttccttgattataaactctttgacaatagatattacatctcagtccctgcttagggaagctactacacttttaaattcatacaagtttatttkattgtacttgctaatggtatactattggatgttttttagaggcagcaatattggccttatgcaaaagtatatagctataaaatcttgtcttagctttttttcatcttgtctccatttcggagttcccaccacagatactcagttcttttgtgctgcctgtttcttgaaggtattacccgctacccacctcctgctcaagtttgcctctcccttattccatacctgttactccttaaccttatcaaaacttccctgttctttatcccattcttttaagattttgcaagggcacacaagttaagagcctagaagtattt

SEQ ID NO: 14404 - DNA, 528 bp, Homo sapiens
tcaaaataatatagcatttcctattgagaaaatgtgagtaaaaagataaacagttttaatgaagagaaagaataactatcaactaaaaagaaaaaaaaaatcaatccagaattccatacccagtaaaaatacgaaagaatctatcaaaaacagaccagaaaaaaaaaagttacatcaattagatctatgaatttactaaaaggaatgaagggcacaagaattgtaactgagtaaatatacatttttatttttatctactttcttgaaggatagttgattgttctaacaaaattartgaaatatggtgaggttttataacatgcgaaattaaaatatgtaataataagagcacaagtatctaaaagaaaggaatgagattatgttcttttaaggttattctctgactatacaggaagaggtataatatcactcttaggtagaatgaaattagttaaagatatacttaaaagaaaaaaacaaagcaatcattagaatgaaaaaaagattaatagctgatctaaaagcaca

SEQ ID NO: 14405 - DNA, 507 bp, Homo sapiens
tggctgctcccttcctctacttctttcaaagtattttttagacttttgttcttttatacaaatttgagcattagtttgtcaagttcctagaattagacttaatctatagataaattaggaaaccatagctttataaaaatgacttttcctatgattaaatatatttctctcctttaaagaattgcttagaatcttacaaagctttataattttatcaatgtattattgtcctaaatataagggataaataaaagttctaaaakaaaacatgagaatttttttgtgactttaggttaggcaaagatttcatagatattatactacaagtacaatcctcagagagaaaatattgatatattggccttcagaaacacttataaacttttgctaataagtagtcaccattgaaaaaaatgaaaaaaataggttacagactggagtaacatactggcaaaatgtatgtctgagaaaagttctatcctgaagatagaaaggaatcttgtaaca

SEQ ID NO: 14406 - DNA, 1642 bp, Homo sapiens
tgcattatcttacatccaggcaccagcattgttcctctatcactttcagcctctcctgactaatgtggcctggcccaggtgcatttatagtcttagacctgaggacccagaacaaagttcatctacccagtttcacgtattcttttacaacaacacaaaatggacttagacccagttttctcagaaaataaagttaacagcccttgaataaatataaagcccaccccaaaggtaaattatggatttattttttcttcattcttaaaagctagtttgttatcagtatcatgtttgatctctgtgttaatcatgaatttaccattagtaagtagattatattagattgtatttgtatgtaataaataaaaagacaattgataattttttaattgaaatgaacaaatgtttagtaagttgttcatgggaaataaagacaatattttgaaaattaaatgaattacttaaatattttggataaaaattagatggaaacattttcccctctggtgatagtaaaagttttcttcattagatgtattctaagcagagattgtctgcctactgtagaggtatctctggctaaaggttgtgaaacttccctaccgtggcatacaacagggattctgattaaaatgggtttagtagtgtgtcaccatcacatcctttaaaaaaaattagaaaatgtaattatgatagatggggaaggattcttaccagcatcaaaagcaggtttcaaattaaaacatggcccatatgctgattcctttcacactcacctctaccctactaaacacactcacataccgtacacacctacaaaattcagacacacattgtctttgtccattttttgttgctgtaaaggaatacctgaaactgggcaacttattttttaaaaaagatgtatttcgcctgtggttccacaggctgagaaatacaatgatatggccctggcttctagtgagggctttcttgctgcatcacaacatagttcagtaagtcaaaggggaagtgaacacatgaaagagggggaaacctgaggggcatcctagctttatgacaactcactctcatgaggactactccagacttggaagagtgagaactcattcaccaccaagaacagcaccaagacactcatgagggaatctgtccccataacccaagcacctcccatgaggccacatctcccaatactaccacaccaaggataaaatttcaacatgagctttggtagggacaaaccatatccaaaccatagcatgcatacacataccccttaaaaagggggacacaaaactaagagcaaactaacgtagtttaaaatatacataaaaacaaaaggcattccatatactttctttttttcttgacttgggctttttaggccccttcttcccatctgtactaactcaaaaataagacaaaagtcaacataacgaggtcaaaatctctcctttgttacttgcaaaatttaggctggagtacatagcctaatatacagccaagtagactttctagtactgagtctcagaattagaataaattgctttacccgtcaagatccaccaaaggggttttcaaaagatgtggtctgaatrtggataaaccaacaagggataaaagacaatagttaggaaca

SEQ ID NO: 14407 - DNA, 576 bp, Homo sapiens
tgatgataaatgccaatatttattatggtaatgttctcagttctttacaggtattgatctactgaatccccacrgcgtctttgtcagttgggtactgttattgttaagctgttagactgcaaccagtgctgttattggttaggaaactgagaccacagtcacatagctagaaattggtagagtcataatttgaatccacgtttgcaatctctgctacacttctatttctcacggtagacataatgtagtatttaatgtttccatagtgtaattttgtagctatagtgtgaaaaaaaatatttttctaactctaactttagtttaaactttattttttatttatttagaaactaatttaattttactcgagtcatttcacacaaaaattacacatgatcatggaataatcttgaagagttgtatgagattcagcttctagctacttatgatttgaatcaatgtcagtattctcttggtggtaaagaaacatataactcctcctacacagagggctggttcggagtaaaggaaaggggtggggaggtatggaagtagaagccaaagaatcttagggct

SEQ ID NO: 14408 - DNA, 520 bp, Homo sapiens
tcacagccatcattcagaacacttcagaaagcccttctccttctccctgtacagtagatgccatctctttctcttcttgaaaattttcttatgtaatggatcaactcaggaaaaaaggagaggaaattcagagtccaatagtctatataaatttctatatattccagacaataattttttatatgactaaacataataaaaacatgcatttatcttcttcctggatgcctcctaaactactgaaaattgtaaccttcaactttttaaaaatatttctctttgggatatattgaacttaattaggacaatactttctcacttgaggcaaggagaattttagagaacaaataycatattttgcttttctaagagtgcttccattatccatgtttttcctctttccattataaataatttagtaaacttctattgaatagctattaacatgtaccaggttcagtacttggcactgggaatgcacaggttaatagtatgtaatccctgcctgcaaaaagttcat

SEQ ID NO: 14409 - DNA, 918 bp, Homo sapiens
aggcccgcactggatcctaagtctgctggtaccttgagcttaaccataacagcatccagaactgcgaaagaaaagaaattctgcttacaagctatccagtttatggtattttgttatagaagcctgagtggactaagacacacgcttcctcaaatgactgtaaaattgctgcaagtattaattttggagttacaaatcaatttaagcaagtaggcaaatccacacatatgatctgtgaataatgagactagtggtaaagacttgaactatattaatgaataggacatagtctctgttttcaataaatttattcatataccatatttttctaaatttattcatatactatatatgtttttctcaaatgagaaaaccatagagaaaaaaaggaaagcatttagtactccagttttcatatatatatacacacacacactaacatatatgtatatattcattcattcatrctgttgttgaaggcctccaagctgaacatggcctcagtctcatcagaacacagacaccctatagcacgtagcccctcaaatacatggtgactatcattttaattgagaataatggtgggaactttcagaaatgttctgaaattagtctaacgaatatgagagtaatttaaggaagttttaatactgccagttgcagtaaaaataattgaaaattaaattacatccacaggaaaatatggaatacctattgagacatcaacattgggaaaattagcatgctgaaacagagccaaaaagaataaactattttctctctgtaggaattgaaaaccctctggtattggactgtatgctgatgagtctaagttggaatacttctggtgtaaccacatcccgggggaccattatgggatacactgttgttctgacccaccatatgccactcttcttg

SEQ ID NO: 14410 - DNA, 551 bp, Homo sapiens
attgttttgattttgctctttgcattactctttcttttaataagaattagtgatgattttaccagtattcaaaaataatattttatttaagtcctgtcctggtgatagcaaaatactgacattaaaatcaagtgaaatttcaggtatttttaaagaagcactccaatttgccaatgtctcaggcgccataaaaaggggtgaaattcaagtaaacaacagattcaactaaggaaagttaaaaagtgtggtgtttatactctcactgtctttctggtctaggatattctcctctcttctctccgcatctagtgggttgaattgtgttccccaaaaatgatatgttcaagttcttatgtccggtacttaaatgtgaatgaggcctcatttggaaataaagtcttacagatgtactcaagttaagataggagcatactggattagggtgggccakagtccaccatgagtggtttgcttataagaagaggacacagacacagggaaggcagccatgtgaacatggaggcagagattagagtgacatggctataaac

SEQ ID NO: 14411 - DNA, 1332 bp, Homo sapiens
tacctgggaactatctctttgaaatgtaaacattgaaagaaatagtgccctatgtcccagtcattgtaagagggtaggaacctaacctgactggcaccaattagcaaacatggatggccagatcacagaaaaaaaacaattacagactcagtaataaccaaatgtgatctccacatctcattgaccaacctctcctctccagtagtttcacgcattcacctaaacattccacattttgtttcagcgggattgaattcagtctttcttcccagttgcagtagtctggaaaaaagttttccttgcttgtttaatttgcccagtaaaattactgtgacagaatttaraggacccagcacttaaaggacccagcacttacaatgcctaagagggaatgtcagcaaactttaaccttttacaaaatacaaacagaatagcaatacaatggaaagagctcaggttgcataaacctggaaatttgtattcagtggctttcagaagtaattgttcagatatttgggtcattgaaaaggacagcaggaagcatttggtttcctatatatgtgtctcagtttgcattctgcagaggtatgcccaagagcaagaattcaagtgcaagtagcttgtttgggatataaaagaaacaccagtggtagaggagtgagactagaagaaaggcagccaagataaattatctttttaaccaacctaccactgtgggtgccggaggttaatacctcatggaaaactgtggaagccaatggaaaacacaccacacaagctgggagagacctagggtatttgtgcactatctcatcttagatgctgtttggaagttgagagtattaattcccagcacttctttctgcaaggtaggcagataaagccatcttgaggaaaggcttggcaaaggaacatgtaggggaggtaaagaaaatccacaagaaaaatgattcagatgctggcccttggagaagctgacagtaaaactgcaagagtgatagggtatgggtcagacacatacatggtcaactacactgtgttaatacatgttacttctagaaaagaataccatggtcaaaacattttggagaaaatttgggttaatcaaacattaattcgtttatttattttatgacttctcagatattttaggatatgaatttgaatgtatcttgcatagctttaagataagaatatcatgttaaaatttctaaactgttttggtgggtgcctctagttggattagtgcatgtagtactcttaacatactttgagaatcaccaatctaatttatttgccaaatattactaatgaggaaaattagatccatat

SEQ ID NO: 14412 - DNA, 1332 bp, Homo sapiens
tacctgggaactatctctttgaaatgtaaacattgaaagaaatagtgccctatgtcccagtcattgtaagagggtaggaacctaacctgactggcaccaattagcaaacatggatggccagatcacagaaaaaaaacaattacagactcagtaataaccaaatgtgatctccacatctcattgaccaacctctcctctccagtagtttcacgcattcacctaaacattccacattttgtttcagcgggattgaattcagtctttcttcccagttgcagtagtctggaaaaaagttttccttgcttgtttaatttgcccagtaaaattactgtgacagaatttaaaggacccagcacttaaaggacccagcacttamaatgcctaagagggaatgtcagcaaactttaaccttttacaaaatacaaacagaatagcaatacaatggaaagagctcaggttgcataaacctggaaatttgtattcagtggctttcagaagtaattgttcagatatttgggtcattgaaaaggacagcaggaagcatttggtttcctatatatgtgtctcagtttgcattctgcagaggtatgcccaagagcaagaattcaagtgcaagtagcttgtttgggatataaaagaaacaccagtggtagaggagtgagactagaagaaaggcagccaagataaattatctttttaaccaacctaccactgtgggtgccggaggttaatacctcatggaaaactgtggaagccaatggaaaacacaccacacaagctgggagagacctagggtatttgtgcactatctcatcttagatgctgtttggaagttgagagtattaattcccagcacttctttctgcaaggtaggcagataaagccatcttgaggaaaggcttggcaaaggaacatgtaggggaggtaaagaaaatccacaagaaaaatgattcagatgctggcccttggagaagctgacagtaaaactgcaagagtgatagggtatgggtcagacacatacatggtcaactacactgtgttaatacatgttacttctagaaaagaataccatggtcaaaacattttggagaaaatttgggttaatcaaacattaattcgtttatttattttatgacttctcagatattttaggatatgaatttgaatgtatcttgcatagctttaagataagaatatcatgttaaaatttctaaactgttttggtgggtgcctctagttggattagtgcatgtagtactcttaacatactttgagaatcaccaatctaatttatttgccaaatattactaatgaggaaaattagatccatat

SEQ ID NO: 14413 - DNA, 1332 bp, Homo sapiens
tacctgggaactatctctttgaaatgtaaacattgaaagaaatagtgccctatgtcccagtcattgtaagagggtaggaacctaacctgactggcaccaattagcaaacatggatggccagatcacagaaaaaaaacaattacagactcagtaataaccaaatgtgatctccacatctcattgaccaacctctcctctccagtagtttcacgcattcacctaaacattccacattttgtttcagcgggattgaattcagtctttcttcccagttgcagtagtctggaaaaaagttttccttgcttgtttaatttgcccagtaaaattactgtgacagaatttaaaggacccagcacttaaaggacccagcacttacaatgcctaagagggaatgtcagcaaactttaaccttttacaaaatacaaacagaayagcaatacaatggaaagagctcaggttgcataaacctggaaatttgtattcagtggctttcagaagtaattgttcagatatttgggtcattgaaaaggacagcaggaagcatttggtttcctatatatgtgtctcagtttgcattctgcagaggtatgcccaagagcaagaattcaagtgcaagtagcttgtttgggatataaaagaaacaccagtggtagaggagtgagactagaagaaaggcagccaagataaattatctttttaaccaacctaccactgtgggtgccggaggttaatacctcatggaaaactgtggaagccaatggaaaacacaccacacaagctgggagagacctagggtatttgtgcactatctcatcttagatgctgtttggaagttgagagtattaattcccagcacttctttctgcaaggtaggcagataaagccatcttgaggaaaggcttggcaaaggaacatgtaggggaggtaaagaaaatccacaagaaaaatgattcagatgctggcccttggagaagctgacagtaaaactgcaagagtgatagggtatgggtcagacacatacatggtcaactacactgtgttaatacatgttacttctagaaaagaataccatggtcaaaacattttggagaaaatttgggttaatcaaacattaattcgtttatttattttatgacttctcagatattttaggatatgaatttgaatgtatcttgcatagctttaagataagaatatcatgttaaaatttctaaactgttttggtgggtgcctctagttggattagtgcatgtagtactcttaacatactttgagaatcaccaatctaatttatttgccaaatattactaatgaggaaaattagatccatat

SEQ ID NO: 14414 - DNA, 1332 bp, Homo sapiens
tacctgggaactatctctttgaaatgtaaacattgaaagaaatagtgccctatgtcccagtcattgtaagagggtaggaacctaacctgactggcaccaattagcaaacatggatggccagatcacagaaaaaaaacaattacagactcagtaataaccaaatgtgatctccacatctcattgaccaacctctcctctccagtagtttcacgcattcacctaaacattccacattttgtttcagcgggattgaattcagtctttcttcccagttgcagtagtctggaaaaaagttttccttgcttgtttaatttgcccagtaaaattactgtgacagaatttaaaggacccagcacttaaaggacccagcacttacaatgcctaagagggaatgtcagcaaactttaaccttttacaaaatacaaacagaatagyaatacaatggaaagagctcaggttgcataaacctggaaatttgtattcagtggctttcagaagtaattgttcagatatttgggtcattgaaaaggacagcaggaagcatttggtttcctatatatgtgtctcagtttgcattctgcagaggtatgcccaagagcaagaattcaagtgcaagtagcttgtttgggatataaaagaaacaccagtggtagaggagtgagactagaagaaaggcagccaagataaattatctttttaaccaacctaccactgtgggtgccggaggttaatacctcatggaaaactgtggaagccaatggaaaacacaccacacaagctgggagagacctagggtatttgtgcactatctcatcttagatgctgtttggaagttgagagtattaattcccagcacttctttctgcaaggtaggcagataaagccatcttgaggaaaggcttggcaaaggaacatgtaggggaggtaaagaaaatccacaagaaaaatgattcagatgctggcccttggagaagctgacagtaaaactgcaagagtgatagggtatgggtcagacacatacatggtcaactacactgtgttaatacatgttacttctagaaaagaataccatggtcaaaacattttggagaaaatttgggttaatcaaacattaattcgtttatttattttatgacttctcagatattttaggatatgaatttgaatgtatcttgcatagctttaagataagaatatcatgttaaaatttctaaactgttttggtgggtgcctctagttggattagtgcatgtagtactcttaacatactttgagaatcaccaatctaatttatttgccaaatattactaatgaggaaaattagatccatat

SEQ ID NO: 14415 - DNA, 1323 bp, Homo sapiens
gaacaaatatgtattatttttgtatttgtaaaaacaatttaacagaagggtgaagatgtgaatttagactatctgtaaggccctctgtaagtacttgtctagactcaacatcatagttgggtagagacagttcttgggtctggaagggtgggaagagcttatatttaagaagcaaaactttcacttcatggtctggggcttgratttttggaccaataaacccaagtgaccccttctgaagacagtagacagtatgggagaggttaacaggtgtttctgtagtcttgtcctatccaaggtcctctattttaaaaaaagaaaggtcttgggcttctttggaagaggcaaggcaatctctgagttgtagtatctccgagtccaagatggtggggctggcatagaaccttccaagttctttctgcctctttgcttcctttcaggttggcatgtcagatgttttgtctgtttgtttgtttgtttgtttgtttgttttgagacggagtttcattcttgttgcctaggctggagtgcagtggcccaatctcagcttgctgcaacctccgcctcccgggttcaagggattctcttgcctcagcctcccaagtagctgggattacaggcgtgcatcaccacgcctggccaattttttatttttagtagggacagggtttctccatgttggtcaggctggtcttgaactccccatctcaggtgatctgcctgcctcggcctctcaaagtgctaggattacaggcatgagccaccatgcctggccctctttttatttgttttgaggcagggtctccactctgtcactcaggctggagtacagttgagtgatcatagcttactgtagccttgaacttgtggactcaagcgatcccctcacctaagcctcccaagaagctgggactatgggcacataccaccacaccgggctaatgtttaaatttattttattttattttgtagagaaaaggggctcactttgttgcccaggttggtctctaactcctagtctcaggcaatccttccacttcagcctcccaaagtgctgagataacagacatgagccactgtgcctggccaaacatgtcggattttattagatattctggatccctaataatgaaatttttctttaggttttggaagctttcttgggttataagtgcccacaaactttttgtagtttgcacatttagctcccagcactgtggacaatatccgagtgagaaaacagacagaactacttattgaagataggaatggaggctgacagatggaaaatcctgttttgcttggtaacttactccaaatgaa

SEQ ID NO: 14416 - DNA, 620 bp, Homo sapiens
caaacttctggcctcaagtgatctcccaccttagcttcccaaagtgccaggattacgggcatggccactgtgcttggcttaccttttttctttgaagaagatgtttttattggaatagagttagcagtttcttccctcctcttagtatctagaataatgagcctagtgcggtggctcatgcctgtaatcctggctctgggattgttagaatttctgatgcccgtgaaagtgacccttagggttgagagagaggagaaaagytttctcttagattttattaataaccaagagaattatgatgatgatattaataatagcaataattaatatataattaacacataacactccctatgtgccaggcaccattctaagtgttttgacatttgctttgtttgtgcctcagtgtttgagatgttatctcgtttatgtctcataagtactctctgaggtaggctctaatatgatcatcccaactttacagatgaggaaggtgaggcacagagaggtttaatgacctgccaaaagttacagagcagttgcagaagcaggattcgaaccccggcaatctggctctagattgccacattacccttagcagtcctgctctcacgcaaggc

SEQ ID NO: 14417 - DNA, 614 bp, Homo sapiens
gagcccaggagttccacaccagcctgggctacatggcaaaaccctgtcactacaaaaaatacaaaaattagccaagcacggtggcgtgtacctgtagtctcagctactcaggaggctgaggtgggaggatcccttgagtctgggaggtggaggctgccgtgagccgtgattgtgccactgcactctagcctgggtaagatcctgtctcaaaatttaagaaaaaaaaaaaaaagactgaatgagggggctaactttgaatggggacctctcagactcagagcaggaacaaagttgattgccctgggactttaaaagtttcttcaaaatcctatacatttgtcagctgctctcaggagccttagcaggcttcaggggtctctcatcccctctgctatggtctgaatgtttgtgtttccctaaaatccatatgttgaaatcctaccccctaaggtgatggtactgggagctgggtctttgggaggtgattaggtcatgaaggcagaggcctcctgaatgggaagagtgccctcatcaaagatgcccaagagagacctcccaccccttccaccttgggaggacayggtgagaaggcaccatctatgaactagagggca

SEQ ID NO: 14418 - DNA, 555 bp, Homo sapiens
gatgcacttagatattggcaatctcatgtggttccatccgatggaaggtcatttggcaaaggaaatatcacacatgagaaaaaacgtaaagtttactgaaaacaagaaaatgattttaaatttagtattagaggctgcgttgtaattcaatattaacttttctgtatttcatgctcttatcattttgtactttcttgtatttgttattttaatataaatatctgaatatatatataattaatatgatccataattaaaacattattttattgattaattacaacttartgaggcttaaaatatttccctattttctagtcaattatgaaaaatgggacaaaggaggcaaacattatcataaaaatgttaagaaaaagttcctaaaatatcagaattgttgagaacttcgaagagtagaagagtattttgatgagagggataatggacatgtgtgttggccttttttttttttttttttttcagacagggtctctctctgccacccacgctggagtgcagtggtgagatcatggctcactgcagcctcagtctcct

SEQ ID NO: 14419 - DNA, 548 bp, Homo sapiens
tgtcttttttacacataatttgaaagcaatatttttagtgatttgcctatattatgttttagtttttaaatttgattttatattttctcatatcataaaagtacatattttaaagcatcaaacagtcctacaaaccttataattaaaarcagtagtatttcattccacctctccctgctcttaatacctactattctctgtaggcaatcacttcaactcccttttccatttttcatttggattcacctctatacaaacatccctgtgcttatgttattttttgtgttaatttttcaattttggatattttctttttctgagacagggtcttgctctgtcactcagactggagtgcagtggcactatcatggctcactgcagcctcaacctcctgggctcaagcaatcctcccacctcagcctccctccgagtagttgggattacgtctgtgccaccatgcctggcttattttttagttttttgttgagtttagggtcttgctgtgtggcccaggctggtctcaaactcctgggctcaagtgattctcc

SEQ ID NO: 14420 - DNA, 1396 bp, Homo sapiens
gagagataaaatcttgtttgccttgtttgctttgaagtttctcaaagccctaaattctgtgacacttctgaagaagaatgtgatgaaatttaatattttaatatctttacctttatgtcttagaactgaacaacttctcatagataactggcagcattcataaaaaaatttaatcttaggacttttaagttttgtctaaaagcttaatatcagtgtatgggctgtacaaataaattcttacagattccaccattaagtattgctagaataaggaaataatgccattatcatgaataatttgccaaatactcttttcttacaagccttgagatttgaaatatgggttagagggactccatcaccttcttatagtcatccaggcttaaaatatgcagtcacctatgctgttcttaacattgaatcaatcaccaagacttttggctacatctgtaccctcagacttttcccatcaccaccagcctggcccaggcccttattattttgtgcctagagcattgtaggatggttatagttcatctctgtaatattttttttaacttccttcatcacgttttcatgctcatattgatcttgctaagataattggttgtcacaacgtctccatgaccaaaacccaaactccatgactctgccccatgaatcttcatagttttgtccatacctgcctttcattcctcccacaggagctttcttcttcgttcattaaatcatatggttagcaagtatttatgggattgctatcccataacagcatctatagtatggctagatatgcaactatgaataagacactgtgcctattgttccgacctaataatagtctactagagcaatcagacaggtaaacagataagacacacctgggtgacctggacatgggagagaatgtggacagttacaggaacccaaagcagaagtaacttgcccagccctggaagccctggcaatgcttccttgagaagatggcatcttgcttgagccctgtaaaacaagtagactgctctgctcattggccctacatgttggaaacacctgtcaaggccaagctcgcacttcagcctgtgaagtacttccttaacatctagttagtacccactggtcttctctccatgctctaagctactatggcattcattattaattcagtcttcagacatttattgtcatgaactcctgacctcaggtgatccagctgcctcracctcccaaagtgctgggattacaggcgtgagacacaatgcccggccttcttcagatatttattgtgtcctattatgagccagaaactctctagaccaagatatagcagtgaataattaaatccctgctctctggaacttacattcaaatggggtgaggcagacaatagcaaaca

SEQ ID NO: 14421 - DNA, 419 bp, Homo sapiens
cccttgatttttctgttaggaaaaaccctacatttttcaaaacccaggcttcatgagaccttctcagtaaattcttctccaaggctgaatgaagcatgtcctctgtggttccatgtcaatcataagcaattctcatggcatattactattaggtttatactcgtgaattcttacaggggaaggacaggatctaattcaccattctgtacgaagcacaaatacctggcaatgcacgctcaatatatgtttgaagaactaaagtgagccragcgcggtggctcacgcctgtaatcccagcactttgggaggcagaggctggtgggtcacgaggtcaggagtttgagaccagcctggccaacatggtgaaaccccatctctactaaaaatacaaaaattagctgcacgttgtggcccatgcc

SEQ ID NO: 14422 - DNA, 526 bp, Homo sapiens
tccccacctccatgatttcattcatgctgttccctcagtctgacattatttcccttaccattaccacacgtcaaaatctgttcatccttcaaaaacacaacaaataaaattattcaatgcaagtgacagaaaatacagccaaactggcttaagcacaaacagacattcatacccactaaatggctttgatcagaaaaacagaaaagaaaaaatattgacaaggatgtrgagaaattggaaccttcctacatagctggtggaaatgtaaaatggtgcagccctgcagaaaacaatttggtggttcctcaaaaagttaaacatagagttaccatatgacccagcaattgtactcctagatacatatgcaagagaactgaaagaatacatctacacagaaatctgtacatgaatgtttacagcagcattattcacaatagccaaaagatggaaataacccaaatgtccatcaacaaaagaatggataaacaaaatgtggtctgtccataaaatgaataatattaggtca

SEQ ID NO: 14423 - DNA, 524 bp, Homo sapiens
cgtaacaatcatgagctaaatggtctgagttaggtacaggacaaaaaaggaggcaattaatctgtaacatagatcagtyattagaaaggggaaaggtctggcctctcctagtcatttacagaacaagaacaatgaggaagagagttaatctataatctaataagcagaagttgcaaacacgctacacgtgattcagtctccagggcttaacttccttttgacataataaatttagagggtcttgaaattttattttcttttattgccatatggaccctggagcaggaagatgactgaggatccaaggcagctttggaagccttagtagaggagtttacaggtcttttcttattttcaacaggaagaattagcctcttatttttaatttgtggtttttctcacaatgatgtaatgacctctctggcttcctctaaattatgactttcctgatataactacagcactaatcaaaaaaaaccccgtttccaagaatctgatgacttattttagtcaattgtgccagg

SEQ ID NO: 14424 - DNA, 1294 bp, Homo sapiens
ggttttctggtcttgaaaagcagccacaatttgttattctaacaaagtgttcctttcctccaaacagaaataaaagttgctcaaggagggcttgtcctgatttctgttctgcatttcttgaaacttccatccagtcaacagtttctcctggcaggttctcagaaatccagagagagctgggtagtcagtgactaagaacacaggatcatttttatatgcctccctaacccccactttttggccccatgggaagatgctttattgtaggatgagcagaatcagctgcatatataaattcttcactgcccagctcacttgacacctttatctgaattgcccaacaggctgggaagatttggcaattgatgatttgaaaaggaaaggcccagatcttccccaagtggtatttgttctgtctgtacagacagggccatgtccatgtctctaattactcaactagctgcacagataaaaacatttgtgtacagaaagcagggaactcaaagtatacaaatgattcacaccacctaaacaactgcaaataaaggccggcccagcaaaataagggcttctagaagccaaaataatttaatatgggcggaaatggaatttggcaatccacacatcagactctgctccaattttggaaggcatgtcttccagctgcctcatcttaaaaaaaaaaaaagtaaactctgaccctctgcattcgattctcaacctcttgcttaggtacacacaagtgaacagatgggtggggggagctgaaacctcatcttttaaatcttacccagcacctacccacaatctttcctgattattttggttttaaaatttcccagggcacggctgcccaggcaccccagatttgtaatcccaaccttcaccaagtcctgactcttccagcatctgagagggtgcatttggcaacttggaaagtaagaattaactctctcatctccaaactatacactcccccaygtagagctaggaagggctaggagaagggccctctccacctaccccaattcagaaagaacacattaacaaatccagagttgcttcattaccgaagtccaccaagaagcaaagaaatggatttttaaagttctgggaaaataaacaacttttatcttttcggggatataagctcaaaatataaaggtatgtgggaagaagtaagtcatgttttaaagtagatcttcctggagatgttaagaaatattttgaatagaaaataactaggtcattaacagtaaataccttttaaatatttaggggaaaatgaattcta

SEQ ID NO: 14425 - DNA, 1294 bp, Homo sapiens
ggttttctggtcttgaaaagcagccacaatttgttattctaacaaagtgttcctttcctccaaacagaaataaaagttgctcaaggagggcttgtcctgatttctgttctgcatttcttgaaacttccatccagtcaacagtttctcctggcaggttctcagaaatccagagagagctgggtagtcagtgactaagaacacaggatcatttttatatgcctccctaacccccactttttggccccatgggaagatgctttattgtaggatgagcagaatcagctgcatatataaattcttcactgcccagctcacttgacacctttatctgaattgcccaacaggctgggaagatttggcaattgatgatttgaaaaggaaaggcccagatcttccccaagtggtatttgttctgtctgtacagacagggccatgtccatgtctctaattactcaactagctgcacagataaaaacatttgtgtacagaaagcagggaactcaaagtatacaaatgattcacaccacctaaacaactgcaaataaaggccggcccagcaaaataagggcttctagaagccaaaataatttaatatgggcggaaatggaatttggcaatccacacatcagactctgctccaattttggaaggcatgtcttccagctgcctcatcttaaaaaaaaaaaaagtaaactctgaccctctgcattcgattctcaacctcttgcttaggtacacacaagtgaacagatgggtggggggagctgaaacctcatcttttaaatcttacccagcacctacccacaatctttcctgattattttggttttaaaatttcccagggcacggctgcccaggcaccccagatttgtaatcccaaccttcaccaagtcctgactcttccagcatctgagagggtgcatttggcaacttggaaagtaagaattaactctctcatctccaaactatacactcccccacgtagagctaggaagggctaggagaagggccctctccacctaccccrattcagaaagaacacattaacaaatccagagttgcttcattaccgaagtccaccaagaagcaaagaaatggatttttaaagttctgggaaaataaacaacttttatcttttcggggatataagctcaaaatataaaggtatgtgggaagaagtaagtcatgttttaaagtagatcttcctggagatgttaagaaatattttgaatagaaaataactaggtcattaacagtaaataccttttaaatatttaggggaaaatgaattcta

SEQ ID NO: 14426 - DNA, 653 bp, Homo sapiens
tggacaactgggtgacagatcctcctcagctcacccatccaatcaatcaatcccttttccgtggaaaggaggaactaaaggaaggacagacaggctggaggaagaaactcatataaacatggaatagtatatttcctaatactttgtagtgctctgaggcaaatttgaggactaattagtgtgtccctttaaaaggttggtctaaaattgaatgtaccaatcagtgctacttttgtcctagtgaagcatttgagaaaagagtgtgtcaactagggcctagctctgccggccatatgtagtagcaacaaaacattactggtatcaatgatgatgtttactccctgtgaaatggactgggccctaggctaaaatgaaaccaaatagaaccaagatacagcaacagcaacaacaactccttgtaaacgcagatttatttctgttgattttgtaaggtcacacaccttagttgaaagctagtggtcacagttaactgaaaacctgaaaataataatgcatggtatggggctgtttacgaaaaataattttcattttttattatgtctattgtaagtggcttaacatggctctcaagaagttttggaaartcacaacagtactgaagaacaagaactatcgaaaaaggagatggtttg

SEQ ID NO: 14427 - DNA, 518 bp, Homo sapiens
atagggggttgagcagaggtcactgagctcccgccacgggcatggatccgggctcacccctgccaagtttcttgaatccctctcccggaaaggatgataaacatgagtcttcatttcctcaaccgaaaatgccctgcaggttcaggataggaatgatgacgcggggctggcctgcgtggggtggggctactgcacaacagtcatgcaggctggtgtgtgagcctcccggcagctcttccaggatcagctggtccccacttaaagacagctgtggcttggaggggttaagtgctccagaatccaygcacaatttgttggagtgtgaagctatccatacctcttctagtctgtctatatggcagaataagatgcggctgaaacatcaggcaggggcccaagagactttcttaaattgtctctttaaaataacatgatttccatcctgggcaacaaggcaaaaacccgtctctacaaaacgtacaaaaattattactagctaggcatgtgcctgtagtccc

SEQ ID NO: 14428 - DNA, 421 bp, Homo sapiens
ccaactgcagcagagagccggagatgattacccaatgaccccactacaaaaacccactcctgcctcaagtcccccaccctcgtggcccaaggggraagaggagatgcttgtactgggcggggaggttggttttgcagccaggtgatcgttctccaccagagtcaaaatggagcccaacctgcaacaccctgcgttcggcgcccaacccgtctacccttcgtcggggagacgggttgccatggcagccacacatcccaaacctcggccagagccagggctttctgagctgcaccaggcctccttcacaggcggttttggcttcccgtgcctcccagaactcttcctcgagctggcaagtggaactccacccagctgctgtggccttttcaccaaatctgactttgccagaaggaatgggaac

SEQ ID NO: 14429 - DNA, 506 bp, Homo sapiens
ctttcacttcccactcgagtgcctgmggacccggcttctcctaggcgtccagcaaagcccagacttaaaggtggcaggtgctgtcctctcaccctgcttcgggtgaggacgggtctccaactgagctccaatgaacaagacgaggctgggctggctccaggaggcaatttctggctgggaggtggggaagaaagacccagaagaagggcagggtgtgacagagggacctgaatcccagagccctgggtctcctgctcccctccctgagtgcctctggatatggcgcttccaggctggccctcaacgtccacacctataggaacaagagaactgaattcaagtgggaaaagcaaatgggtttatctcaggtgccaacttcttcccaccgggaggctctggggtggctgcggctctgcagggcaccaggaggaccaacaagggctggagggtggaggggaccacacatggtctgtgcattcaccatccctgcatgagatcccttccat

SEQ ID NO: 14430 - DNA, 517 bp, Homo sapiens
ggaaaggaggggacctggatgcacagtccataccctgccctgtatctacsccttaagaattcaggctaggtgcggtggctcacgcctgtaatcccagcactttgggaggccaaggcaggcagatcaactgaggccaggagttcgagacgagcctggccaacatggtgaaaccctgtctctactaaaaatataaaaattagccaggcgtgggtgtggtggtgtaagcttgtaatccccgctactcaggaagctgggacaggaaattacttgaacccaggaggctgaggttgcagtgagccgagaccacaccactgcactccagcctgggcaacacagcaagattccatttcaaaaaaaaagagttcagggccgacatttccaagcccgatgtgtatcttcaaaatcagaagatagacacaaccagctgccatttttcaagcatcaaccatatgcccaggtgctcagctcaacgcggcatgaattagccccacgagataaaaatggtcctactatagat

SEQ ID NO: 14431 - DNA, 517 bp, Homo sapiens
ggaaaggaggggacctggatgcacagtccataccctgccctgtatctaccccttaagaattcaggctaggtgcggtggctcacgcctgtaatcccagcactttgggaggccaaggcaggcagatcaactgaggccaggagttcgagacgagcctggccaacatggtgaaaccctgtctctactaaaaatataaaaattagccaggcgtgggtgtggtggtgtaagcttgtaatccccgctactcaggaagctgggacaggaaattacttgaacccaggaggctgaggttgcastgagccgagaccacaccactgcactccagcctgggcaacacagcaagattccatttcaaaaaaaaagagttcagggccgacatttccaagcccgatgtgtatcttcaaaatcagaagatagacacaaccagctgccatttttcaagcatcaaccatatgcccaggtgctcagctcaacgcggcatgaattagccccacgagataaaaatggtcctactatagat

SEQ ID NO: 14432 - DNA, 517 bp, Homo sapiens
ggaaaggaggggacctggatgcacagtccataccctgccctgtatctaccccttaagaattcaggctaggtgcggtggctcacgcctgtaatcccagcactttgggaggccaaggcaggcagatcaactgaggccaggagttcgagacgagcctggccaacatggtgaaaccctgtctctactaaaaatataaaaattagccaggcgtgggtgtggtggtgtaagcttgtaatccccgctactcaggaagctgggacaggaaattacttgaacccaggaggctgaggttgcagtgagccgagaccacaccactgcactccagcctgggcaacacagcaagattccatttcaaaaaaaaagagttcagggccgacatttccaagcccgatgtgtatcttcaaaatcagaagatagacacaaccagctgccrtttttcaagcatcaaccatatgcccaggtgctcagctcaacgcggcatgaattagccccacgagataaaaatggtcctactatagat

SEQ ID NO: 14433 - DNA, 515 bp, Homo sapiens
agcttccaattccacaccacctactaagcgtgaaagattcggacaagtttcattcctcttagaacctcaattatctcatctgttaaataggattattaatatccatacctcagatcaagtcaaacaattactgtaagcacatggtgagtgcttaaaaatgtaggtgtcattattaccactattgtcatcagtattattaatatgaatatgactgtagctattacagcattagtctccctacccttaggtamggccgcatttctattatttttttaggaacagtgtggcaagcagaagagtggccagaacggtgcagaggtttgagctgtggcacccggcgtgacctctcattcccggccgggtcccggtgacagatccgccgcctccactctgcaactcctcgccgcagtgagacgctgccccgctgctggccggcccgagccccctccccagcgccggcctcaccttttcatagttctgcatgaggcggctgatactctcgcgctcgacctgcc

SEQ ID NO: 14434 - DNA, 544 bp, Homo sapiens
gtttatgtagtattcatgactgctcttgcaatataacagagtaacaactctgccagttgagtaacggagtgatatggtgtgagctgcaaagcatatatcactatcttgtcctttatagaaaaattctgccgacctctcttttagagttaaattagtaaatgaaatctatgcttaaaaatgcctaataggcaattgggataacacagcttttcattgaaaaataatggataatattataaatagagttctgagattcactgcagagagtaaagaactgaatctatttgtgtaagtaatggttgacagttaacatcactttactcaaaaagtgtgttcttrcatatcatttgatgtccaaaacagcctgtcaggtaaagatcatggtatataatttaaagatttggaaacttaggttctaaacaatgtgactattctttggagaacaattgctttcaaaggtagacagcgatagagaaataccatcatggagaatgtgtatatattggtatattgtgggcaatattattcgtgtttgttggcttag

SEQ ID NO: 14435 - DNA, 558 bp, Homo sapiens
ttgtaagcttgacatattgctgacactgatttttaagacaaattttatctcaaaatttattactttcttttttattgatattgatagattcttagcttaattctgtggattggtaataaagcrcagtcttcatttctgccattaattatataataatatgtgccattagttatgtatgtgtttcttcatttgtcaaatgcatattgggcttccaccaggtgccctggcacatgccaggcacttgaatagacattagtaattccagcaggaataagctgtagttcctgtactcagactagtaagaggagacagacatttaaactgataaattccattctacattccataatcttaaaagtgctataatagaagtatgaatggatgtaagtacaagggaggaagtggtcacctttgggtcactaagagcacagggatactcgtcatttataggtgccaggagatagtattaattcctatgaggagatacacgtctggagctgaaggctggggcagaatcttggaggacatttgtagcatgccaaaactttagaaggttta

SEQ ID NO: 14436 - DNA, 558 bp, Homo sapiens
ttgtaagcttgacatattgctgacactgatttttaagacaaattttatctcaaaatttattactttcttttttattgatattgatagattcttagcttaattctgtggattggtaataaagcacagtcttcatttctgccattaattatataataatatgtgccattagttatgtatgtgtttcttcatttgtcaaatgcatattgggcttccaccaggtgccctggcacatgccaggcacttgaatagacattagtaattccagcaggaataagctgtagttcctgtactcagactagtaagaggagacagacatttaaactgataaattccattctacattccatartcttaaaagtgctataatagaagtatgaatggatgtaagtacaagggaggaagtggtcacctttgggtcactaagagcacagggatactcgtcatttataggtgccaggagatagtattaattcctatgaggagatacacgtctggagctgaaggctggggcagaatcttggaggacatttgtagcatgccaaaactttagaaggttta

SEQ ID NO: 14437 - DNA, 558 bp, Homo sapiens
ttgtaagcttgacatattgctgacactgatttttaagacaaattttatctcaaaatttattactttcttttttattgatattgatagattcttagcttaattctgtggattggtaataaagcacagtcttcatttctgccattaattatataataatatgtgccattagttatgtatgtgtttcttcatttgtcaaatgcatattgggcttccaccaggtgccctggcacatgccaggcacttgaatagacattagtaattccagcaggaataagctgtagttcctgtactcagactagtaagaggagacagacatttaaactgataaattccattctacattccataatcttaaaagtgctataatagaagtatgaatggatgtaagtacaagggaggaagtggtcacctttgggtcactaagagcacagggatactmgtcatttataggtgccaggagatagtattaattcctatgaggagatacacgtctggagctgaaggctggggcagaatcttggaggacatttgtagcatgccaaaactttagaaggttta

SEQ ID NO: 14438 - DNA, 517 bp, Homo sapiens
gtgggaggggatcagtaactcaagactgtctttcttaccctcttaagtgcctctttcagtgacatgaagttaaaaccagatattgtgattcctcacctgatttttggttcctatgaaggtgcttttttgtggatagttgttcaatttgctgttcctgcagggaggatgatcagtagaggcttctagttggccatcttgctctcagttttctctaagttgttcatctttacagcactttgacagaaattaactctttttctgagtgcaaaaggtcagtcacacaaccaatcaacagagaggtcaagtgatactcccatgaaatagctggttaagaaacaggtcttttaaaagctgatcttataaaataaataaataaataaataagcaaacaatacccccccmaaaaataacactcttgcttggaattacagatgctagtaaaggaataatttttgttaactagcagaggtatttacttaaatcatttcattgttattaaaattctttctataaagta

SEQ ID NO: 14439 - DNA, 555 bp, Homo sapiens
aaaataaaatttaaataaaaaaatttaaatatccattatttcaggctttgaactagttgcttttataaatgcgttctatttttaaagtaataatcttgctagtgatcaccttgctagtgataaacacatatatcactagcaagatatatatatatgtatatatatatatatakagagagatgtatatatatatgtgtatatatgtgattacatgtatacacatgcacatacatatatatatttatatagttgagccttgcacaatattggggttagagatgctatgaagtaaattcagagatgcatttgaggtgtggctatggcttaagaggctagccaggtatggtgcagttgaaattctgcatataactttttactctccaaaaactgtactgataatctattgttgacaagaagccttacgaataacataaaagtcaacatatactttgtatgtcatatgtattatatactgtattcttaccataatgtaagctagagcaaacaaaatgttctggagaaattcattagaaatataaaatatatttactattc

SEQ ID NO: 14440 - DNA, 555 bp, Homo sapiens
ctttgtagctgaaatagtgtaattttacactgagtttgaaacttctgatatcaggaactttgatgagcctaatacaggtgctatacgggatgaagtgaatatgcttagaatttttgatgaaaacaaatctgactactcaggtttctctatgagaagggtaggcagtttgatttgtaattatgggaagctgaatgtgaggcttggatgaggctttgtcagtatcagaccagctccttcctattgggggctgaattcccttgggctctccatcagagagaccaacaggaagcaatcatgtagttcttccaacacactcagaagtcagtaggtccactccacaaataaattgtaattggccatatagtaaaatatttggtagtgttattcttgtccttttccatatgtacaagagagaaaaataaaacaacttcacatcctcctaagcragtgatcgagtttagatatttgtcccctccaaatctcatgttgaaatgcgacctcctcatgttggaggtggggcctcactggaggtgattgggtcataggttccctccc

SEQ ID NO: 14441 - DNA, 530 bp, Homo sapiens
ccagagtggtgtggtttgcttctyctgaccctttcatgagcaaagctggtttcaggggaaactcagggatctgaactgttagtaacactgattagaaatgcagcagttttattcaggccttggttttattgaccatttttggttggctcttatctctgtgactgatcatgtatgcgtatttcaaatggataaataaactaaaaagtgtttaatactccaaaatgattagaagtgtattgttaaataccaaaaagaaaataattctggggtgtttcagcatgttattctgttaacatagttcacgttgagtgtttgtattcatttgttgtttgtttgtttgtaagtaacaggttttgactaaaattccacggactgtggaacagcacacactggggtctatcggagggtggaaagtgggtggagggagtgggtcaggaaaaataactaatgtatactaggcttaatacctgggtgataagatagtctttacaacaaacccccatgacacaagtttacctatataacaaacc

SEQ ID NO: 14442 - DNA, 530 bp, Homo sapiens
ccagagtggtgtggtttgcttctcctgaccctttcatgagcaaagctggtttcaggggaaactcagggatctgaacwgttagtaacactgattagaaatgcagcagttttattcaggccttggttttattgaccatttttggttggctcttatctctgtgactgatcatgtatgcgtatttcaaatggataaataaactaaaaagtgtttaatactccaaaatgattagaagtgtattgttaaataccaaaaagaaaataattctggggtgtttcagcatgttattctgttaacatagttcacgttgagtgtttgtattcatttgttgtttgtttgtttgtaagtaacaggttttgactaaaattccacggactgtggaacagcacacactggggtctatcggagggtggaaagtgggtggagggagtgggtcaggaaaaataactaatgtatactaggcttaatacctgggtgataagatagtctttacaacaaacccccatgacacaagtttacctatataacaaacc

SEQ ID NO: 14443 - DNA, 530 bp, Homo sapiens
ccagagtggtgtggtttgcttctcctgaccctttcatgagcaaagctggtttcaggggaaactcagggatctgaactgttagtaacactgattagaaatgcagcagttttattcaggccttggttttattgaccatttttggttggctcttatctctgtgactgatcatgtatgcgtatttcaaatggataaataaactaaaaagtgtttaatactccaaaatgattagaagtgtattgttaaataccaaaaagaaaataattctggggtgtttcagcatgttattctgttaacrtagttcacgttgagtgtttgtattcatttgttgtttgtttgtttgtaagtaacaggttttgactaaaattccacggactgtggaacagcacacactggggtctatcggagggtggaaagtgggtggagggagtgggtcaggaaaaataactaatgtatactaggcttaatacctgggtgataagatagtctttacaacaaacccccatgacacaagtttacctatataacaaacc

SEQ ID NO: 14444 - DNA, 530 bp, Homo sapiens
ccagagtggtgtggtttgcttctcctgaccctttcatgagcaaagctggtttcaggggaaactcagggatctgaactgttagtaacactgattagaaatgcagcagttttattcaggccttggttttattgaccatttttggttggctcttatctctgtgactgatcatgtatgcgtatttcaaatggataaataaactaaaaagtgtttaatactccaaaatgattagaagtgtattgttaaataccaaaaagaaaataattctggggtgtttcagcatgttattctgttaacatagttcacgttgagtgtttgtattcatttgttgtttgtttgtttgtaagtaacaggttttgactaaaattccacggactgtggaacarcacacactggggtctatcggagggtggaaagtgggtggagggagtgggtcaggaaaaataactaatgtatactaggcttaatacctgggtgataagatagtctttacaacaaacccccatgacacaagtttacctatataacaaacc

SEQ ID NO: 14445 - DNA, 587 bp, Homo sapiens
gggcatggtgggaaggaaggttggcaacttagataccagaggaacagcttcaggccacgagcgcctcccttggcctgtagggtggacccgctgtgcctctgccagttggcttttccttctgtctgccaggtccaccagatgtttgccaagagtgtaggacttggccaccagcttgaagtgtttcaggtggaccagagggctctcgccggggtcagaactgcttagatccagcagagggtgcrattgtggctcactgctacctccatcttcccaggcttaccgaggcgatcctcccattttggtctcccaagtggctgcggctctggggatctttctgttttgttttgttttgtttttttccctaggcccacttcaagtttgtttccacagtacattgaattgctgttttttttttctttcttttctctctgttatgctccttcctgcatactgaagttcctgttattttagattttttcttttcttttttttttttaaatcaggctttggctcccaaagtgctggaattacaggtgtgagccaccatgcctggctctatctatctatctatctatctatctatctat

SEQ ID NO: 14446 - DNA, 589 bp, Homo sapiens
agttaacttccccaaaggtttagtgagagtgaaatgggtaagtgaatgagattgattctatctatcctcatgccttttttggtccaagctcctatcttcatccaggccccctgctgctcttgcccaacacwgcatgttctctcaaagtatccaccaatggaggcctgagctgaaaattatctctcactatgcagagaagtgaaaatccattcatgaaatctgaccccacctactccatctctgtttaactatttcactctcattaccgtataggttacacatacaacaatgctatctaatcccgcctaattcacgaagcaataatttaatgcattattactgggtatgcaaaacacacagaaagtcaagacataatgtagataaaaacagtggtaaagacttagatctgtttctaggtcacacctgactgtgtaattgaaagatgttttcaccttttggaccaaagagttcagtttatatttgtttcatttcttacatattgatggaaaaatgtggtttttgtaccacagcaaattaagtatctgcttgtattttcttttattaaatataccacattctcaatagatca

SEQ ID NO: 14447 - DNA, 589 bp, Homo sapiens
agttaacttccccaaaggtttagtgagagtgaaatgggtaagtgaatgagattgattctatctatcctcatgccttttttggtccaagctcctatcttcatccaggccccctgctgctcttgcccaacacagcatgttctctcaaagtatccaccaatggaggcctgagctgaaaattatctctcactatgcagagaagtgaaaatccattcatgaaatctgaccccacctactccatctctgtttaactatttcactctcattaccrtataggttacacatacaacaatgctatctaatcccgcctaattcacgaagcaataatttaatgcattattactgggtatgcaaaacacacagaaagtcaagacataatgtagataaaaacagtggtaaagacttagatctgtttctaggtcacacctgactgtgtaattgaaagatgttttcaccttttggaccaaagagttcagtttatatttgtttcatttcttacatattgatggaaaaatgtggtttttgtaccacagcaaattaagtatctgcttgtattttcttttattaaatataccacattctcaatagatca

SEQ ID NO: 14448 - DNA, 548 bp, Homo sapiens
gctggggggctcttatatttattatctcatttaatctacaataatcctgtaaagtcagtattatgttccctctatagatgcagaaactgaagctaatgtggtaaaggtaccaaatctggtatagtggaactggattcagctccaaggtcaattaggtacccaaactgctacaaaccactacttagcaggcagtatgaatttatgaatttattctcagagttgaaattaaaatgaaaggtaaccaactccaacctttgatttgacgcgggaagtttctttatagaattcctgacagatgttcaccagtttctactttagtaccttcagccataaagaactcactgcctcacaaatatttaaccyttgtagttacatggtgtaaaacatttcctgtatttgatttcttattttatcttaaacccatatcctccagatcattctctgatgttacattttgcatgctgtactcaatcattcatttattatttcagcaatatttattgtctgttacatgtcaggtacaatgctctattctgagagcacaatga

SEQ ID NO: 14449 - DNA, 1306 bp, Homo sapiens
agtactcaggggctacctaatttttcacttactagctatgtaccaaaacatggtgtgttagaggagctctcagtggctcaacatgtatataatgaattgtgcctcgatcacttataaaatggcccctcttgtctatcaataacctcacaccttctttgttgaaatttcaaattccagttttgtgggtacatagtaggtgtatgtacacaaatgttcacagcagcagtattaataatagccaaaaaagtggaaacaacccaaatgtcatcaagcggtgaaaagattaaacaaggtgatatatctataaaattaaaaactagcaataaaaaggaacagattgctgggcacggtagctcatgcctgtaaccccagcactttgggaggctgaggcgggcagatcacctggggtcagaaatttgagaccaggcaggccaacatggcgaaaccccatctctatgaaaaataaaaaaaattagccaggtgtggtggtgggcgcctgaatcccagctacttgggaggctgaggcaggagaattgcttgaacccgagaggcagaagttgcttgagccaagatcgcgccactgcactccagcctgggtgacagagcagcagagcgagactctgtctcaagaaaaaaaaaaaaagaaaagaaaagaaaagaaagaacagattactgatacatgctgcaacatggaggacctcaaaaacattatgattcctgaaagaagccagaattaaaagactacatattgtaaaattccattgtaatgaaatacctagaaaagacaaatttatagagacagaagctctgggcatatgtgggagtaatttactgcaaatagccacaagggaattttgccaggtgatggaaatatcctaaaattgtattgtgggtttgactgcacagttctataaatttactaaaaatcacttacaataggcagattttattatatgtaaattatatatctcaataaagttatttaaaagtgaaaagaatttcaaattctaaatcatgtgctgtagcacgtaggatgctaagagtagatcaatagacattaccatgggaggataagggaaagaggggaaaaaatgcatgttctaaggcrttaaaaaaaataacaaccttccccctttaatttctcttcaaaaattgcaagagtaatgtgaacttagtgcaataagtgaaacagtataaaggaaaataaaggcaaaatgagctattaaaatcttttcacctcatttaccccctgcacttcccatctctgggtccccaaatgacaaatgctaacaatctggtgggaatc

SEQ ID NO: 14450 - DNA, 557 bp, Homo sapiens
gctctactcccaagaaaacccagtgtgtcttcattttctttggttatccagaatactactgccatcttttaataaatattttcttagagaagctaatttgacaggctttctgtgtcttagatacctgatggggaacttcccttttgactgtccctatatcaattctacatctttcaaggcccacccaaattcttcctttttcttgaatcacatgaaaagataaggacatgatgccaactcataccaatcattcctgaatacatcacacaaaatctgcacttcataatttaagctgagatgggagcaactttcayttgtgaaacaatgcctttgatagactataactcactagactgaaaccctccttagggcagaggtaaagtgttgtatttcttcaatagtttctataattggagcactccagtaggcattccagaaatatgttaattaagttgctgagcccatgttccaaaaatataactgaatctcactcaactgaaataagtaattaagtatagattctaatataaggcattgagatctaacaagaatattta

SEQ ID NO: 14451 - DNA, 1389 bp, Homo sapiens
  misc_feature (1)...(1389): n = A,T,C or G
taatgtattggcattcattaccaattctctacaaaatacaactacacgatatgccttgctagatccatattctatctgaatttaggaaccaaagacatttgygtagtaagaaatacttgtccagacattacattagaaaggcaaaaaaaaaaaaagactttatgatttaaaaagcatacctggatcaatgatagccagtgtgcacactctgtagtattttccgcatgctgtgcccagttcaatattattgccactgtagtgatggacaccagttttagccaacatagcatagtactctatttcagatttcctttgggaaccaaaatgggcaaataaataaatgcgataccaagtgactgacagactaaatgttactacttcttttactagtgttaatgttgttaaggccttcaaaaagtaacaaaatcacatattactcttaaaaacatcatattcattatccaatacaaaccaacatttgtatgtatcccttgcaagtgaaggggcaaccagcaaatatctaatcaacccctactatgtttaagacagtatcaatactcacggaagagggtaagatgcaaataaaagaaagcaaagcattatctagcattagtaaggaccacatactttatatttccatggcaatctctaaagtaggtattatgtacttttttttttgagatggaatctcattctgtcgctcaggcggatcgtgcagtggcacgatctcagctcactgcaacttccacctcccgagttcaagtgattctcctgcctcagcctctcaagtagctgggattacaggcgtgcaccaccacacccagctaattttttatatttttggtagatggggtttcaccatgttggccaggctggtctcgaactcctgacctcaagggatccgcccgcctcagcctcccaaagtgctgggattacaggtgtgagccacnnnnnnnnnnnnnnnnnnnnnnnnnnnnnnnnnnnnnnnnnnnnnnnnnnnnnnnnnnnnnnnnnnnnnnnnnnnnnnnnnnnnnnnnnnnnnnnnnnnntagtcccagctacttaggaggctgaggcaggagaattgcttgagcccaggagttcaaggttgcagtgaagtatgattgagccattgcacttcagtctgggcaacagagtgagactcaattaaaaaaaaaaaaaaagaaactatatgtttaaaccagcttctgctaactagatttaaatctgtttttgcctcagatcactctggatccccattaggtgtgtggtcacccactatctaaaaacaatgaaatcaatacaatacaatcaacaaattatactatgtatctttttttttttttgagacggcatttcgctcttgttgcccaggctggagtgcaatgg

SEQ ID NO: 14452 - DNA, 593 bp, Homo sapiens
cccatcaatggggtagggaagaatcctgcaattcttgtccctaactgagagctccaggaggagcagccactgtcagactcccacacctcttgctttacagtgaagatcctctgagactgcagccagaaccggaggttttggaagaggccaggtcagggaactctgaggtgagcagcttgaaactggagccacactcaggttacctggcagtaacacctggcaggtgttaaacrggcagattccaggtttccctcccagagcttctgagccatgttgtttgtaaggaccagggaggcctcagccgtggctagctaattctgcttttaccatcttccatattccagaggccgccccccagccttgattctctcctccctggctggcagtgcctctgagaacattcattttggctcacaacccttcccaactccagtccagggctcacttcacagaggcaagacccctcttcagggtggcaagatgcctagggccccttgtctggtgaagccagggagggtggtggccggggaatgttctgaaggttgcatcagtccattggaaggggcagcagggctccaggggaaactgcacac

SEQ ID NO: 14453 - DNA, 742 bp, Homo sapiens
tttgatgtggttgtttgtttttttcttgtaaatttgtttgagttgtttgtacattctggatattagccctttgtcagatgagtagattgcaaaaattttctcccattctgtaggttgcctgttcactctgatggtggtttcttttgctatgcagaagctctttagtttaattcgatcccatttgtcaattttggctttttcatttcaatcctgaaaataatcctatgaaataagagctattactattacctgactacagaacaraaaacattaagtttaaacataaagtgacatacccacagtgacgctgctacactactacagaacagaaaacattaagtttaaacattaagtgacatgcccacagtgacattgctagtaaattatactgttggaaagttttactgacaccagagtctgtgctctgaactattctgcatcttctagcaattacttttgcatattctcaatgccacacaattacagatagattgatagaaaacaagaaagcagaaacctatctgtattgtttatctgtaagggtgcaattctttttctgcatagaaattatgactagatttgtatttttcagagaatgattaactctttctgagcaacagtttttgctttgtgaactcttctttactgtcagtccagcttttacccttgaatagacaattttgtccagtgtgtgctatttggctggctgaattattcagttatgttcatatctttttgactg

SEQ ID NO: 14454 - DNA, 1466 bp, Homo sapiens
tcgtcagtatctaactaggaagcgtcctctttgatcagatgattaccttttttaagagaagaaatgcttgcaaaatactacattgctagttgaatattcctaacgtttttgtcccataggaaagaatgaattaaacaggccaaacagatcaactttaaattgaaaaaaaaaamacaaaaacaaacaaacaaaaaaaaaccttattgttgccaggaaagtagatgcataaatgccactctggtatcctggcctcttaaagggcaattcttcttgatatggaggtagtaagtataacatattcaaattatctaaacgataggaatcataatattttatgctttttctagcagaattattggtaaaacaagaatacttctaaacataccttcattccacgtgttagaaagcaatattgggggccaggcacggtggctcacacctgtaatcccagcactttggaaggctgaggcgggtggatcacctgaggtcaggaattgaagaccagcctggccaacgttgtgaaaccccatctctactaaaaatacaaaaaaaattacccgggtgtggtggcaggcacctgtaatcccagctactagggagattgaggcaggagaattgcttgagcgaaagaggcggaggttgcaacgagctaagatggtcccactgcactctagccttggcaacagagcgagactccatctcaaaaaaaaaaaaaaaaaaaaaaaaaaagaaagaaaaaaagcagtatggggatagttctcccacatgtcctcctctaagctcactcttaaattaaggtccattcacttcttccctcattcaaggaattccccacgagatctatccacaagtatcaattttcttaatattttttgattaagttgttggagaagccatgctattgcatttcaaatgaagcttcctttacactttgatgttcaaaatcattgtgtacaaaaactaaaacctattagacaatatttattggtactccctatccttctttactccacaaaaggtatgccagggatttaataagtaattggtataggatacattgagcttagagagctgatgtgcagttgaaattaagaaagttttatactatgaatttgttcatatgtgtttacacttaagttcacgtagagcaacaatttcaagagaggtaaatcaatagcaaagcagttaacatcaggttccttaggattttgaaacaaagattttagccatcagaggccagagtagataaatttagcaagatcacattagtataattattataaaagaaaattttactttttccatatggttaagattattggaaggagttaataaaatacatagcatgtttgtaattaagacacaaactctaattaacttagatcctgaatggcttttgctaagtctgtctccacaggctctcaaagaaacctgataactctggagttaaattccctaataaatta

SEQ ID NO: 14455 - DNA, 1466 bp, Homo sapiens
tcgtcagtatctaactaggaagcgtcctctttgatcagatgattaccttttttaagagaagaaatgcttgcaaaatactacattgctagttgaatattcctaacgtttttgtcccataggaaagaatgaattaaacaggccaaacagatcaactttaaattgaaaaaaaaaacacaaaaacaaacaaacaaaaaaaaaccttattgttgccaggaaagtagatgcataaatgccactctggtatcctggcctcttaaagggcaattcttcttgatatggaggtagtaagtataacatattcaaattatctaaacgataggaatcataatattttatgctttttctagcagaattattggtaaaacaagaatacttctaaacataccttcattccacgtgttagaaagcaatattgggggccaggcacggtggctcacacctgtaatcccagcactttggaaggctgaggcgggtggatcacctgaggtcaggaattgaagaccagcctggccaacgttgtgaaaccccatctctactaaaaatacaaaaaaaattacccgggtgtggtggcaggcacctgtaatcccagctactagggagattgaggcaggagaattgcttgagcgaaagaggcggaggttgcaacgagctaagatggtcccactgcactctagccttggcaacagagcgagactccatctcaaaaaaaaaaaaaaaaaaaaaaaaaaagaaagaaaaaaagcagtatggggatagttctcccacatgtcctcctctaagctcactcttaaattaaggtccattcacttcttccctcattcaaggaattccccacgagatctatccacaagtatcaattttcttaatattttttgattaagttgttggagaagccatgctattgcatttcaaatgaagcttcctttacactttgatgttcaaaatcattgtgtacaaaaactaaaacctattagacaatatttattggtactccctatccttctttactccacaaaaggtatgccagggatttaataagtaattggtataggatacattgagcttagagagctgatgtgcagttgaaattaagaaagttttatactatgaatttgttcatatgtgtttacacttaagttcaygtagagcaacaatttcaagagaggtaaatcaatagcaaagcagttaacatcaggttccttaggattttgaaacaaagattttagccatcagaggccagagtagataaatttagcaagatcacattagtataattattataaaagaaaattttactttttccatatggttaagattattggaaggagttaataaaatacatagcatgtttgtaattaagacacaaactctaattaacttagatcctgaatggcttttgctaagtctgtctccacaggctctcaaagaaacctgataactctggagttaaattccctaataaatta

SEQ ID NO: 14456 - DNA, 1466 bp, Homo sapiens
tcgtcagtatctaactaggaagcgtcctctttgatcagatgattaccttttttaagagaagaaatgcttgcaaaatactacattgctagttgaatattcctaacgtttttgtcccataggaaagaatgaattaaacaggccaaacagatcaactttaaattgaaaaaaaaaacacaaaaacaaacaaacaaaaaaaaaccttattgttgccaggaaagtagatgcataaatgccactctggtatcctggcctcttaaagggcaattcttcttgatatggaggtagtaagtataacatattcaaattatctaaacgataggaatcataatattttatgctttttctagcagaattattggtaaaacaagaatacttctaaacataccttcattccacgtgttagaaagcaatattgggggccaggcacggtggctcacacctgtaatcccagcactttggaaggctgaggcgggtggatcacctgaggtcaggaattgaagaccagcctggccaacgttgtgaaaccccatctctactaaaaatacaaaaaaaattacccgggtgtggtggcaggcacctgtaatcccagctactagggagattgaggcaggagaattgcttgagcgaaagaggcggaggttgcaacgagctaagatggtcccactgcactctagccttggcaacagagcgagactccatctcaaaaaaaaaaaaaaaaaaaaaaaaaaagaaagaaaaaaagcagtatggggatagttctcccacatgtcctcctctaagctcactcttaaattaaggtccattcacttcttccctcattcaaggaattccccacgagatctatccacaagtatcaattttcttaatattttttgattaagttgttggagaagccatgctattgcatttcaaatgaagcttcctttacactttgatgttcaaaatcattgtgtacaaaaactaaaacctattagacaatatttattggtactccctatccttctttactccacaaaaggtatgccagggatttaataagtaattggtataggatacattgagcttagagagctgatgtgcagttgaaattaagaaagttttatactatgaatttgttcatatgtgtttacacttaagttcacgtagagcaacaatttcaagagaggtaaatcaatagcaaagcagttaacatcaggttccttaggattttgaaacaaagattttagccatcagaggccagagtagataaatttagcaagatcacattagtataattattataaaagaaaattttactttttccatatggttaagattattggaaggagttaataaaatacatagcatgtttgtaattaagacacaaactctaattaacttagatcctgaatggcttttgctragtctgtctccacaggctctcaaagaaacctgataactctggagttaaattccctaataaatta

SEQ ID NO: 14457 - DNA, 572 bp, Homo sapiens
cctcaaaagcacaggcaaaagaaacccccaactagacaaatgagatttaattaaactaaaaagcttctgcacagcaaaagaaataaccaaaatgttttcttatgtaccacattaattcatggtaacatcacagaaagttagaaatgcagaagaaatagttgaaatatttcgtagtaaccctctatatgttttgttgttctcttttcgttcttatcaactataaagttaaatttatggatattgtgaaaagattattttctttttattaaatgagtgaaatgatatgtggtaaaaagataggtttaaataatcttagaatttatgtatgtgctttctaatgataaatgcttgaggtgataaaaaawttaaaatatattctgcttcaaaaaaagtatgagctttttactacaaagtttcatttttagaataatatattaatattcatttgtccaaaatatatgaaaactaccatttagtatgttagatccaagtgtgcacaatgtaaaatgacaattagttaaaatgaaatttaaaatttatctaaaatgtttcatttaaaagaaaggtgggac

SEQ ID NO: 14458 - DNA, 662 bp, Homo sapiens
acatctaaagttatttcaacaatgcctgtcataatagagacagaaatagtttgtcatcaggttttagtcatrtttaatataactaaagttctttgaacaatgcctgtcaaaaagtataaatgtaatagatgttagaggactgtaagtgaacagttatatattccaaaaatagatataaaatctcaaataattgtagaagtaaaattttacagaaaagtaaactaagatccagaaaattatatggcatatttaatacattaataaatgaatatcaaaacaacaggtataaaataccctgttaaaagaagggtagggctttttccaccattaatatggcattgttaatcctaacttttaactatttgtatacttgtctctctgtaagaaggatagatattttacacattgaaagtgcttagctagaaagaactcaaaggagggactaaaaattatagcaatattattttcttaatatgtgatttaaatgacaataaaaacatgtttcccaaaggcaataatatctgtttaatttcatgaattacaatgaccataatatcataagtgttctgttatttcggtactaaatattaacaactatggaaaacatgccatttttctcttgttttgaactgaaaagtgaacatttacatgcttttaaaagg

SEQ ID NO: 14459 - DNA, 662 bp, Homo sapiens
acatctaaagttatttcaacaatgcctgtcataatagagacagaaatagtttgtcatcaggttttagtcatatttaatataactaaagttctttgaacaatgcctgtcaaaaagtataaatgtaatagatgttagaggactgtaagtgaacagttatatattccaaaaatagatataaaatctcaaataattgtagaagtaaaattttacagraaagtaaactaagatccagaaaattatatggcatatttaatacattaataaatgaatatcaaaacaacaggtataaaataccctgttaaaagaagggtagggctttttccaccattaatatggcattgttaatcctaacttttaactatttgtatacttgtctctctgtaagaaggatagatattttacacattgaaagtgcttagctagaaagaactcaaaggagggactaaaaattatagcaatattattttcttaatatgtgatttaaatgacaataaaaacatgtttcccaaaggcaataatatctgtttaatttcatgaattacaatgaccataatatcataagtgttctgttatttcggtactaaatattaacaactatggaaaacatgccatttttctcttgttttgaactgaaaagtgaacatttacatgcttttaaaagg

SEQ ID NO: 14460 - DNA, 577 bp, Homo sapiens
atttccttaagtggataatatataccaaaagggtctcttcctaactcctatcacaaacatcatgatgaacacactaatactaatactataactcaagatatccataattataaatcctggagtttctacccatacaccaatgaatagcaatagtctccattaaccatactggcctaaaggtgtgtgtgtcaattcaaactccattgtgtctaaatatatatattcaagtagataccataaaagcattttaaagaagaaacaagtataataggagtttattgtaacacgtttaaggaatgaaataattgtccagatttcagaagcaatgttgggattgggatactagtagaagatattatggtaaggaagctaggaaacctcagattcttgcctaaggttgtcttgcttctctgcctcacaasgtcctcaaagaacataaaacacaagaaattacagcaaataaatgtcaattcataagttgtctttaagcttgacaaatcaatgaaaatctgcagtgagccagattagaccaaattaatgagtacaggagctaagtgcaatttagaatctaggcaca

SEQ ID NO: 14461 - DNA, 1351 bp, Homo sapiens
gatacaaagatgcaacatcaagtttcatatacctgagcaagtaggttcttagagcaagtargtgaatattgcactttacataaatttgcctctgtgacacttccacctgcacacaatatgccccagggcagttaattccaaacactggtgacaggctaggtccagtggagtcatctgaagatctttatcagaaagcacaaccctggagctcattctcaaagattccgattctttggtgggtcctagtattctgcattttaggaaacttccaggtgacactaatacacagccaggtttcagcaacactgccataagaacccgtattaaagagcttttaaaatggaaaaccagaaaatagtcactagatggcaacctcgctcactttttgaaaagcattttgaaacaaagcaaagagagtttttaactttcattcacaattaaatttggaaatgtctccctaaaggaagtttaaaaaaaaaaaaaaaaaaacatacaatcaggtgcctctctttcataatgcccgtatcctattacttttaaactccataaataaaaacaagggctcttttgtttgaataataacagccccctctggaaacttaatctagtttttgtttgcatacatctctcctataaaactctgaatttcctgtttccttagataataaagtggaatttgtcttaaaaagtctcttttctttcttactaatgtctgaatctccttaaagccaagatcagctgtgcttagttttgtgaggctaaaccccctgacattaacacgttgccattctttttctaactggctctatacaggtgcagagattcttggaagaaaccttagagatcatctggtccagtgctcacctaaggcaggttcactgtgtttcacccctaatagctggtcattttgccactgtttacatacttacactaacagggagttcattaccttaccttacacttttggtgctaggcagaaagatgcattcattttccacattacatgtttcctgttttctacacttctcctcatcaaactaaacatttttcaatgacctttcatgtgctctttcaccacacttacctccagttggttgggcacaatattccacatattgtttgaacatctcagcagaccatgtaatagtctaccctttattctggccactcaatcctgttaatatagtctaggattgtgttagactccttaacatctacaaaatgcctatgtcagcacttggtccaaaatacaggctaaattcatattagtttccctttctccttatttaatttctaattatataagtactaacttccttctggtttttgtttgctcatgtgcttactccat

SEQ ID NO: 14462 - DNA, 1351 bp, Homo sapiens
gatacaaagatgcaacatcaagtttcatatacctgagcaagtaggttcttagagcaagtaagtgaatattgcactttacataaatttgcctctgtgacacttccacctgcacacaatatgccccagggcagttaattccaaacactggtgacaggctaggtccagtggagtcatctgaagatctttatcagaaagcacaaccctggagctcattctcaaagattccgattctttrgtgggtcctagtattctgcattttaggaaacttccaggtgacactaatacacagccaggtttcagcaacactgccataagaacccgtattaaagagcttttaaaatggaaaaccagaaaatagtcactagatggcaacctcgctcactttttgaaaagcattttgaaacaaagcaaagagagtttttaactttcattcacaattaaatttggaaatgtctccctaaaggaagtttaaaaaaaaaaaaaaaaaaacatacaatcaggtgcctctctttcataatgcccgtatcctattacttttaaactccataaataaaaacaagggctcttttgtttgaataataacagccccctctggaaacttaatctagtttttgtttgcatacatctctcctataaaactctgaatttcctgtttccttagataataaagtggaatttgtcttaaaaagtctcttttctttcttactaatgtctgaatctccttaaagccaagatcagctgtgcttagttttgtgaggctaaaccccctgacattaacacgttgccattctttttctaactggctctatacaggtgcagagattcttggaagaaaccttagagatcatctggtccagtgctcacctaaggcaggttcactgtgtttcacccctaatagctggtcattttgccactgtttacatacttacactaacagggagttcattaccttaccttacacttttggtgctaggcagaaagatgcattcattttccacattacatgtttcctgttttctacacttctcctcatcaaactaaacatttttcaatgacctttcatgtgctctttcaccacacttacctccagttggttgggcacaatattccacatattgtttgaacatctcagcagaccatgtaatagtctaccctttattctggccactcaatcctgttaatatagtctaggattgtgttagactccttaacatctacaaaatgcctatgtcagcacttggtccaaaatacaggctaaattcatattagtttccctttctccttatttaatttctaattatataagtactaacttccttctggtttttgtttgctcatgtgcttactccat

SEQ ID NO: 14463 - DNA, 1351 bp, Homo sapiens
gatacaaagatgcaacatcaagtttcatatacctgagcaagtaggttcttagagcaagtaagtgaatattgcactttacataaatttgcctctgtgacacttccacctgcacacaatatgccccagggcagttaattccaaacactggtgacaggctaggtccagtggagtcatctgaagatctttatcagaaagcacaaccctggagctcattctcaaagattccgattctttggtgggtcctagtattctgcattttaggaaacttccaggtgacactaatacacagccaggtttcagcaacactgccataagaacccgtattaargagcttttaaaatggaaaaccagaaaatagtcactagatggcaacctcgctcactttttgaaaagcattttgaaacaaagcaaagagagtttttaactttcattcacaattaaatttggaaatgtctccctaaaggaagtttaaaaaaaaaaaaaaaaaaacatacaatcaggtgcctctctttcataatgcccgtatcctattacttttaaactccataaataaaaacaagggctcttttgtttgaataataacagccccctctggaaacttaatctagtttttgtttgcatacatctctcctataaaactctgaatttcctgtttccttagataataaagtggaatttgtcttaaaaagtctcttttctttcttactaatgtctgaatctccttaaagccaagatcagctgtgcttagttttgtgaggctaaaccccctgacattaacacgttgccattctttttctaactggctctatacaggtgcagagattcttggaagaaaccttagagatcatctggtccagtgctcacctaaggcaggttcactgtgtttcacccctaatagctggtcattttgccactgtttacatacttacactaacagggagttcattaccttaccttacacttttggtgctaggcagaaagatgcattcattttccacattacatgtttcctgttttctacacttctcctcatcaaactaaacatttttcaatgacctttcatgtgctctttcaccacacttacctccagttggttgggcacaatattccacatattgtttgaacatctcagcagaccatgtaatagtctaccctttattctggccactcaatcctgttaatatagtctaggattgtgttagactccttaacatctacaaaatgcctatgtcagcacttggtccaaaatacaggctaaattcatattagtttccctttctccttatttaatttctaattatataagtactaacttccttctggtttttgtttgctcatgtgcttactccat

SEQ ID NO: 14464 - DNA, 1351 bp, Homo sapiens
gatacaaagatgcaacatcaagtttcatatacctgagcaagtaggttcttagagcaagtaagtgaatattgcactttacataaatttgcctctgtgacacttccacctgcacacaatatgccccagggcagttaattccaaacactggtgacaggctaggtccagtggagtcatctgaagatctttatcagaaagcacaaccctggagctcattctcaaagattccgattctttggtgggtcctagtattctgcattttaggaaacttccaggtgacactaatacacagccaggtttcagcaacactgccataagaacccgtattaaagagcttttaaaatggaaaaccagaaaatagtcactagatggcaacctcgctcactttttgaaaagcattttgaaacaaagcaaagagagtttttaactttcattcacaattaaatttggaaatgtctccctaaaggaagtttaaaaaaaaaaaaraaaaaacatacaatcaggtgcctctctttcataatgcccgtatcctattacttttaaactccataaataaaaacaagggctcttttgtttgaataataacagccccctctggaaacttaatctagtttttgtttgcatacatctctcctataaaactctgaatttcctgtttccttagataataaagtggaatttgtcttaaaaagtctcttttctttcttactaatgtctgaatctccttaaagccaagatcagctgtgcttagttttgtgaggctaaaccccctgacattaacacgttgccattctttttctaactggctctatacaggtgcagagattcttggaagaaaccttagagatcatctggtccagtgctcacctaaggcaggttcactgtgtttcacccctaatagctggtcattttgccactgtttacatacttacactaacagggagttcattaccttaccttacacttttggtgctaggcagaaagatgcattcattttccacattacatgtttcctgttttctacacttctcctcatcaaactaaacatttttcaatgacctttcatgtgctctttcaccacacttacctccagttggttgggcacaatattccacatattgtttgaacatctcagcagaccatgtaatagtctaccctttattctggccactcaatcctgttaatatagtctaggattgtgttagactccttaacatctacaaaatgcctatgtcagcacttggtccaaaatacaggctaaattcatattagtttccctttctccttatttaatttctaattatataagtactaacttccttctggtttttgtttgctcatgtgcttactccat

SEQ ID NO: 14465 - DNA, 1351 bp, Homo sapiens
gatacaaagatgcaacatcaagtttcatatacctgagcaagtaggttcttagagcaagtaagtgaatattgcactttacataaatttgcctctgtgacacttccacctgcacacaatatgccccagggcagttaattccaaacactggtgacaggctaggtccagtggagtcatctgaagatctttatcagaaagcacaaccctggagctcattctcaaagattccgattctttggtgggtcctagtattctgcattttaggaaacttccaggtgacactaatacacagccaggtttcagcaacactgccataagaacccgtattaaagagcttttaaaatggaaaaccagaaaatagtcactagatggcaacctcgctcactttttgaaaagcattttgaaacaaagcaaagagagtttttaactttcattcacaattaaatttggaaatgtctccctaaaggaagtttaaaaaaaaaaaaaaaaaaacatacaatcaggtgcctctctttcataatgcccgtatcctattacttttaaactccataaataaaaacaagggctcttttgtttgaataataacagccccctctggaaacttaatctagtttttgtttgcatacatctctcctataaaactctgaatttcctgtttccttagataataaagtggaatttgtcttaaaaagtctcttttctttcttactaatgtctgaatctccttaaagccaagatcagctgtgcttagttttgtgaggctaaaccccctgacattaacacgttgccattctttttctaactggctctatacaggtgcagagattcttggaagaaaccttagagatcatctggtccagtgctcacctaaggcaggttcactgtgtttcacccctaatagctggtcattttgccactgtttacatacttacactaacagggagttcattaccttaccttacacttttggtgctaggcagaaagatgcattcattttccacattacatgtttcctgttttctacacttctcctcatcaaactaaacatttttcaatgacctttcatgtgctctttcaccacacttacctccagttggttgggcacaatattccacatattgtttgaacatctcagcagaccatgtaatagwctaccctttattctggccactcaatcctgttaatatagtctaggattgtgttagactccttaacatctacaaaatgcctatgtcagcacttggtccaaaatacaggctaaattcatattagtttccctttctccttatttaatttctaattatataagtactaacttccttctggtttttgtttgctcatgtgcttactccat

SEQ ID NO: 14466 - DNA, 1351 bp, Homo sapiens
gatacaaagatgcaacatcaagtttcatatacctgagcaagtaggttcttagagcaagtaagtgaatattgcactttacataaatttgcctctgtgacacttccacctgcacacaatatgccccagggcagttaattccaaacactggtgacaggctaggtccagtggagtcatctgaagatctttatcagaaagcacaaccctggagctcattctcaaagattccgattctttggtgggtcctagtattctgcattttaggaaacttccaggtgacactaatacacagccaggtttcagcaacactgccataagaacccgtattaaagagcttttaaaatggaaaaccagaaaatagtcactagatggcaacctcgctcactttttgaaaagcattttgaaacaaagcaaagagagtttttaactttcattcacaattaaatttggaaatgtctccctaaaggaagtttaaaaaaaaaaaaaaaaaaacatacaatcaggtgcctctctttcataatgcccgtatcctattacttttaaactccataaataaaaacaagggctcttttgtttgaataataacagccccctctggaaacttaatctagtttttgtttgcatacatctctcctataaaactctgaatttcctgtttccttagataataaagtggaatttgtcttaaaaagtctcttttctttcttactaatgtctgaatctccttaaagccaagatcagctgtgcttagttttgtgaggctaaaccccctgacattaacacgttgccattctttttctaactggctctatacaggtgcagagattcttggaagaaaccttagagatcatctggtccagtgctcacctaaggcaggttcactgtgtttcacccctaatagctggtcattttgccactgtttacatacttacactaacagggagttcattaccttaccttacacttttggtgctaggcagaaagatgcattcattttccacattacatgtttcctgttttctacacttctcctcatcaaactaaacatttttcaatgacctttcatgtgctctttcaccacacttacctccagttggttgggcacaatattccacatattgtttgaacatctcagcagaccatgtaatagtctaccctttattctggccactcaatcctgttaatrtagtctaggattgtgttagactccttaacatctacaaaatgcctatgtcagcacttggtccaaaatacaggctaaattcatattagtttccctttctccttatttaatttctaattatataagtactaacttccttctggtttttgtttgctcatgtgcttactccat

SEQ ID NO: 14467 - DNA, 1351 bp, Homo sapiens
gatacaaagatgcaacatcaagtttcatatacctgagcaagtaggttcttagagcaagtaagtgaatattgcactttacataaatttgcctctgtgacacttccacctgcacacaatatgccccagggcagttaattccaaacactggtgacaggctaggtccagtggagtcatctgaagatctttatcagaaagcacaaccctggagctcattctcaaagattccgattctttggtgggtcctagtattctgcattttaggaaacttccaggtgacactaatacacagccaggtttcagcaacactgccataagaacccgtattaaagagcttttaaaatggaaaaccagaaaatagtcactagatggcaacctcgctcactttttgaaaagcattttgaaacaaagcaaagagagtttttaactttcattcacaattaaatttggaaatgtctccctaaaggaagtttaaaaaaaaaaaaaaaaaaacatacaatcaggtgcctctctttcataatgcccgtatcctattacttttaaactccataaataaaaacaagggctcttttgtttgaataataacagccccctctggaaacttaatctagtttttgtttgcatacatctctcctataaaactctgaatttcctgtttccttagataataaagtggaatttgtcttaaaaagtctcttttctttcttactaatgtctgaatctccttaaagccaagatcagctgtgcttagttttgtgaggctaaaccccctgacattaacacgttgccattctttttctaactggctctatacaggtgcagagattcttggaagaaaccttagagatcatctggtccagtgctcacctaaggcaggttcactgtgtttcacccctaatagctggtcattttgccactgtttacatacttacactaacagggagttcattaccttaccttacacttttggtgctaggcagaaagatgcattcattttccacattacatgtttcctgttttctacacttctcctcatcaaactaaacatttttcaatgacctttcatgtgctctttcaccacacttacctccagttggttgggcacaatattccacatattgtttgaacatctcagcagaccatgtaatagtctaccctttattctggccactcaatcctgttaatatagtctaggattgtgttagactccttaacatctacaaaatgcctatgycagcacttggtccaaaatacaggctaaattcatattagtttccctttctccttatttaatttctaattatataagtactaacttccttctggtttttgtttgctcatgtgcttactccat

SEQ ID NO: 14468 - DNA, 1351 bp, Homo sapiens
gatacaaagatgcaacatcaagtttcatatacctgagcaagtaggttcttagagcaagtaagtgaatattgcactttacataaatttgcctctgtgacacttccacctgcacacaatatgccccagggcagttaattccaaacactggtgacaggctaggtccagtggagtcatctgaagatctttatcagaaagcacaaccctggagctcattctcaaagattccgattctttggtgggtcctagtattctgcattttaggaaacttccaggtgacactaatacacagccaggtttcagcaacactgccataagaacccgtattaaagagcttttaaaatggaaaaccagaaaatagtcactagatggcaacctcgctcactttttgaaaagcattttgaaacaaagcaaagagagtttttaactttcattcacaattaaatttggaaatgtctccctaaaggaagtttaaaaaaaaaaaaaaaaaaacatacaatcaggtgcctctctttcataatgcccgtatcctattacttttaaactccataaataaaaacaagggctcttttgtttgaataataacagccccctctggaaacttaatctagtttttgtttgcatacatctctcctataaaactctgaatttcctgtttccttagataataaagtggaatttgtcttaaaaagtctcttttctttcttactaatgtctgaatctccttaaagccaagatcagctgtgcttagttttgtgaggctaaaccccctgacattaacacgttgccattctttttctaactggctctatacaggtgcagagattcttggaagaaaccttagagatcatctggtccagtgctcacctaaggcaggttcactgtgtttcacccctaatagctggtcattttgccactgtttacatacttacactaacagggagttcattaccttaccttacacttttggtgctaggcagaaagatgcattcattttccacattacatgtttcctgttttctacacttctcctcatcaaactaaacatttttcaatgacctttcatgtgctctttcaccacacttacctccagttggttgggcacaatattccacatattgtttgaacatctcagcagaccatgtaatagtctaccctttattctggccactcaatcctgttaatatagtctaggattgtgttagactccttaacatctacaaaatgcctatgtcagcacttggtccaaaatacaggctaaattcatattagtttccctttctccttatttaatttctaattatataagtactaacttccttctggtttttgtttrctcatgtgcttactccat

SEQ ID NO: 14469 - DNA, 517 bp, Homo sapiens
tattttatgttaggaatattttctagattatttaagaaacaatttgtgttaggttggtgaggagagataggtagtcttcctctaaagtatagttatttttataaaatcagcttttgaagctgatctcttcagaaatcaagaaaaataatcttttcttacagactctctatttacttattttctgtcagtttattaaatagagttcctaactactgcctattttctggtattactgccctatatgaacggcataaatagccttttactgacctcactcaaaattcaactttcattttactttgatctaattattaataactttgtataattctcacctcccaaacttttcccttcagttctgatattaaaaatattgccggccgggcgcggtggctcacrcctgtaatcccagcactttgggaggccgaggcgggcagatcacgaggtcaggagatcgagaccatcctggctaacacagtgaaaccccatctctactaaaaatacaaaaaattagccc

SEQ ID NO: 14470 - DNA, 528 bp, Homo sapiens
atctaaataaatgaagagacattttatgttgcctataccctgataggaagctacattcagaatgattgaaatatagagtgaccaatcacttgggtttgtctggattgtttcatgggatgtgggacttttagtgttaaaaccaggaaagcctgaaaaatcaggcaaagttaaccatgttgtgaaatgttctaaaactaagttgtagtgatggcacacaactagacatttactaaaatcgtttaatcatgtggattgaatttatgatatgtaaattataactcaataaggttactaaataacagaatgataaaaatattggatatgccacacaaatagtcttgattaatgargtaagtgcactaatttaaggtaaatattgggaacctataaatgtaaaaaaaaaagacaaacctgtctcaacttactgatttaataaattataacaaaatttaattttatattgtattaatgtttgaaagttataaaattgtatattacattttcaagaaaagacaaatttactgttca

SEQ ID NO: 14471 - DNA, 1995 bp, Homo sapiens
ccataacgtgtcattttgcaaaaactccattacatttcctccttctcttctttagaatgggcgagtgtaaaagaagcctgaaactgctttggaacatctaactgaaggtgaaaaagagatagccaagagttcaggacaaatttattaacaagacatcgaaatcttcatattctgtgaatgtgtagtccaaattatgataataatgtttcagaaataggaactgcaaaccctaactcattctgtaacttacgattcatcatttgtaactccccacttctaagtagcactgtttatgatggacagaattgagtgccagttagaagatattaatcaaactaacttaaacaaaagacaatgcattttgatgcaattaaagtcaaacctaagtgtagaatacctttaggcaaagcgtttcaaattgttatcacattgtttctctctctctctctctctcacacacacacacaaacacacacacacacacaccacaacctatataacaaggaaggggggatcaagtaatcgatagttctagtaaaaccccatagattagaagaggggtagatattcacagtggtatgttatcagacaaaagcaatatgtgttaactagagctactctgcaagatactgccttagatacttagcacgagttagaggggttaaaggggtgattagccaatagaaaaataggtatgacacrttctttcttgaaggcatataaaagctgataatttagttagtaaaataagagatattcacaaataactataatacaaagtaaaatatagtaaggctattatagaatatttgtggcagcctttgaagagtagtgggtggctaatgttgttcctggttccttctgcttcaaggctatttctgtagtatcttctgtattgatttcctcttttatacattttatttccttttgtgtatctctcactgctagctagccctgtaattcttttattcttttattccttgaaagaccacaaacacagggaggcaacattttactgaaaaaatagagcaatcaatttgcatatttacagtacaggacaacactttgcacatttaaaatgaaatattgtctttttaaaatcctttgtccagctcctaccactggtctttgaaattccatcatttcttctattatgagattgtgaaaatagttaaatacaccccttttaatattactctgtgtcaatcatagtttggtcagagaggcagagttcttacaattgttataggaataagagatttcttatagttaattagactttacacaaatatagaagaatctgggggaactgaaggaatgaaaggaatgttacaaaatcagaaaaagagtgaattactagctcacaggaaataaaccgagaccttgcagggaaattttgacaagcaaatatgtcagatcactgaagtgagaaattgtgaaatgggagcttgaggaactgtctgttgggaactgttacctctataaagttaaaacatgtgtgctccgcacagagacaaaagttgagaagataagctcaatgaagacagagaaaagcggatgagctgagaccatttggataaatctgtgtctctctaactacataacttatcattacaaccatttggtaatagtggctgcttcttacttttaccatcacattacactcaagttcctttgtggccaactctaccccagaggcttaaatggaaggggattatgggaatgtagttaccagcttcaaatatatgttgactaacacaatcaactactgtctaccatttctgaatttgtcattcatacatgcctcatttgatagtcttatttaacatccaaatgaagaaatagaaaaaacatgtattaacctaataaaacattaggtcaaataaataaatacatatcaactttctcccaaagagaatatatgatgacatatgttactttagccataatagggtaatgtttatttttcctcaagctgattcaacctgtctttga

SEQ ID NO: 14472 - DNA, 1995 bp, Homo sapiens
ccataacgtgtcattttgcaaaaactccattacatttcctccttctcttctttagaatgggcgagtgtaaaagaagcctgaaactgctttggaacatctaactgaaggtgaaaaagagatagccaagagttcaggacaaatttattaacaagacatcgaaatcttcatattctgtgaatgtgtagtccaaattatgataataatgtttcagaaataggaactgcaaaccctaactcattctgtaacttacgattcatcatttgtaactccccacttctaagtagcactgtttatgatggacagaattgagtgccagttagaagatattaatcaaactaacttaaacaaaagacaatgcattttgatgcaattaaagtcaaacctaagtgtagaatacctttaggcaaagcgtttcaaattgttatcacattgtttctctctctctctctctctcacacacacacacaaacacacacacacacacaccacaacctatataacaaggaaggggggatcaagtaatcgatagttctagtaaaaccccatagattagaagaggggtagatattcacagtggtatgttatcagacaaaagcaatatgtgttaactagagctactctgcaagatactgccttagatacttagcacgagttagaggggttaaaggggtgattagccaatagaaaaataggtatgacacgttctttcttgaaggcatataaaagctgataatttagttagtaaaataagagatattcacaaataactataatacaaagtaaaatatagtaaggctattatagaatatttgtggcagcctttgaagagtagtgggtggctaatgttgttcctggttccttctgcttcaaggctatttctgtagtatcttctgtattgatttcctcttttatacattttatttccttttgtgtatctctcactgctagctagccctgtaattcttttattcttttattccttgaaagaccacaaacacagggaggcaacattttactgaaaaaatagagcaatcaatttgcatatttacagtacaggacaacactttgcacatttaaaatgaaatattgtctttttaaaatcctttgtccagctcctaccactggtctttgaaattccatcatttcttctattatgagattgtgaaaatagttaaatacaccccttttaatattactctgtgtcaatcatagtttggtcagagaggcagagttcttacaattgttataggaataagagatttcttatagttaattagactttacacaaatatagaagaatctgggggaactgaaggaatgaaaggaatgttacaaaatcagaaaaagagtgaattactagctcacaggaaataaaccgagaccttgcagggaaattttgacaagcaaatatgtcagatcactgaagtgagaaattgtgaaatgggagcttgaggaactgtctgttgggaactgttacctctataaagttaaaacatgtgtgctccgcacagagacaaaagttgagaagataagctcaatgaagacagagaaaagcggatgagctgagaccatttggataaatctgtgtctctctaactacataacttatcattacaaccatttggtaatagtggctgcttcttacttttaccatcacattacactcaagttcctttgtggccaactctaccccagaggcttaaatggaaggggattatgggaatgtagttaccagcttcaaatatatgttgactaacacaatcaactactgtctaccatttctgaatttgtcattcatacatgcctcatttgatagtcttatttaacatccaaatgaagaaatagaaaaaacatgtattaacctaataaaacattaggtcaaataaataaatacatatcaactttctcccaaagagaatatatgatgacrtatgttactttagccataatagggtaatgtttatttttcctcaagctgattcaacctgtctttga

SEQ ID NO: 14473 - DNA, 617 bp, Homo sapiens
ttggtctttctgtcttcttcatggtcacaaaaatccctggagaggggatttatggtaggtttactcttggcctcctttctgggggtaaaagccaccttaagaggaaaattatggcagcctcattttctttaaatttctgcttctagtccagtaaaggaagctccaagaaagctgctttttgtgtcggttgaatctcaaatatctttagcttaaaataatctttataacaactatggagttctgagtgggtctctctgtaggtgttttgatcttctattttgtatcgttggataaaatgtgtcattttccttgccctcagaaccctctgatggcgtctcttttccctcaaaaggaaatcagtctttaaaatggcacagaagttatgcatggtctctcctctccagcttctctgacctctcctgatcatctcaaccttgttcagtttgctccagccacagctgcctgctttcgtttctgtagtyctccgagcactcctctgcctctgcacatttgcacttgctcttctctctgcttgggatgctttcccccagagagctgcagagctcactcatttccttcacagccttccctggctaacttatataaagcaacaacac

SEQ ID NO: 14474 - DNA, 541 bp, Homo sapiens
catctcagccgaggctaggcgggggcgagctcccgagcggtcggtctgtgggcgcggggcaggctctcagctccgggtgtcccagcgctcctcagtctctctctctctgggtcctttctctctgcagctccktgctctgcctcttttcctcttgttatgggtctccctggtccctctgtccctccccaccttctcctgcccccattccctatcagttcttgatttttcctgtctccttttctccatctcattccggtcccatcccttctcctcttggtctctccctctcccgattgtctctcattttctttcctctttttttttgagatagagtcttgctctgtcgcctggctggagagcattggctcgatctcggctcactgcaacctctacctcccaggttcaagcgattctcctgcctcagcctcctgagtagctgggattacaggcacatgccatcacgcccagctaatttttgtatttttagtagagacggggtttcaccatgttggtcaggacagtcttgatctcttgacctcgt

SEQ ID NO: 14475 - DNA, 527 bp, Homo sapiens
cagtggggcatggtaattataaataacatttcaagtacaaattcagtaagtgccctgagggggaagtacagctaggtatgtccgtgtaacaggaattcctgatccactggggaaacctgaaggcttccgggaaaaagaggaattcatggaatgaataaaaactcttactccaggcaagaaaagggggcaggggaaagggagacccaggtagagggaacagcatgtgccataaccccggagtcagagggatgcctgggtcttaatctccacttgacctacctcctaccccacagcctgsagggacctccctcctacaagccaccgaccccaaaagcgaagctggaggcacaggagatggtgagcactttccctggagcccaagctatccccacctccacacccaccccagggctgggaggggcctggcagggagaagctggctgggtggtgggggcagttcctgacctccccgcccctctcccactacagccctcccagctcttcactctgggggcctcggagcacag

SEQ ID NO: 14476 - DNA, 536 bp, Homo sapiens
ttttggctttggtggcaatttacaaagatgaatccttgagcacccaagatggcattctcatctatagttttagcacacaaaagtggactataaggtaaataacaagttccaggataaacagtgaaagtcttagtagaatagctcttaagctctgagggatccagatggacagctccgagaaccaatcagacatggggttactagcagagagagacttgggtcagaagttgttagacagacagattgggatatacaggaaagaacaaatttaaatatactgccccataattttcagtcagcttcctagttctgaaactagatcagttcagttaaacagctgttttctatatcaggaggtggcaygcagatgggctatgcctcttcagttacagaggaggaaggtggtgacaatctgacatgttttttgctgcctatattacaagtagtaagcttaagcttgcaggacctcagttaaaaggtaggagcaatttcattgagtgcaagacagaaaaatggaagaaaaatctgaaagcatt

SEQ ID NO: 14477 - DNA, 538 bp, Homo sapiens
tgatgatttactgctgttaccatcatcactgccttcagtgaccaagggccttccaaggtgccagctctggaacgaaggatgcccttgggaggtgatgacactcaggtacacgggtgctcaacagattgcttcctcctatcctcagacggtctttgcatgcatgcagccattggcactcccattgtatggaaggaaaccagcccagggtcacacagctgytcagcagcaacatagctggtctcaaatctaaggtgcctggccatgcctccatgagggaccgcctgcaagggaggttgatcctggctttggggagcctttcctgggctgcacgaataacctccattgttcgagaccccaaactccgctcacatcttcctttccctgtctctgcttgggctatgatcacggtgactctagcaggccttcatggacattatagtactctctgccattcacttttgctctaatctgacttcaacccccacttacttggtctctccttttacaaccaacacaaccgaaatctagggcttctttt

SEQ ID NO: 14478 - DNA, 530 bp, Homo sapiens
tcagactttacaactattgtattttttaggatatattagtagacagtaaatggatgtgattgtgtgcaaacacatctgtgatatccattttctggttcaattttattcattaaaccagaatctcagaattaggagggaagttagacattaaccagtaaaatttctgaatatgaaagatgagaaaactgaagagtttgggaacattcctaaagataaataattatttcatgatggaaccaggttatctgctctgtatccagtgcctggcctctgtctscctactgcctaattcagtcatctcatgagtgggagctattgtctggatattgccatctgaatcaatatagctggtattactactaaccagaaaacaggatacttaggtcctagttctgttactaactggtcatgtgaccttgggcaatcatttaacttcatgatatttcagcatttcaattttctgtaaaattatgggtttgttttagctaatcagtagtacactgatatatctttggggttagaaatataat

SEQ ID NO: 14479 - DNA, 626 bp, Homo sapiens
acacaggtaggagcttaaaacaacagacatttattctcatagtttttgaggccagaaacccaaaacccagatgtcatcaggaccatactccctctgggggctctgcagaaaaattccttgtcaagcttccatagtggtggacacaacactccaatctctggctcctgctcacgctgcctcctttgcctccgtgcatgtcatctccctctgcatctctcacagatgcttgtgattggatttagggtcccccaaataatctaggataatctccccatctcaagattcttaatcacatctgcaaagaccctttctgccatataaggtaatayacacagattccaggaatttgaatgtggatatcttttaggaggaatgattattcagcctaccacagaaacccatgaagtttgttacactcaacccatataaacttttggatgagtttgagacaacctgatttagtagttgggtggtttatttattcattcagttaactgatatctagcctgcactaactgcgccagatatgctaagcctgggaatacagctgtgcaacagacaaacatggtcgtggtttgcagaaaatgaatttgaactcaaacacttgcaatgtcatggaagttgca

SEQ ID NO: 14480 - DNA, 626 bp, Homo sapiens
acacaggtaggagcttaaaacaacagacatttattctcatagtttttgaggccagaaacccaaaacccagatgtcatcaggaccatactccctctgggggctctgcagaaaaattccttgtcaagcttccatagtggtggacacaacactccaatctctggctcctgctcacgctgcctcctttgcctccgtgcatgtcatctccctctgcatctctcacagatgcttgtgattggatttagggtcccccaaataatctaggataatctccccatctcaagattcttaatcacatctgcaaagaccctttctgccatataaggtaatacacacagattccaggaatttgaatgtggatatcttttaggaggaatgattattcagcctaccacagaaacccatgaagtttgttacactcaacccatataaacttttggatgagtttgagacaacctgatttagtagttgggtggtttatttattcattcagttaactgatatctagcctgcactaactgcgccagatatgctaagcctgggaatacagctgtgmaacagacaaacatggtcgtggtttgcagaaaatgaatttgaactcaaacacttgcaatgtcatggaagttgca

SEQ ID NO: 14481 - DNA, 521 bp, Homo sapiens
aagtgacatacaacacctaataaaaattgaaatttatattaataaaaaataaccacaaacttggaataaaaagaaatggggaggaaaaaatagagacatcaaagtgttttgggcatcagagctatgaattattatatttcattctatattccttattatatactctaaaattatgataagcataccttaaaaattaactttattaaaatcttactactttataaagacaacacctatattctcaagttccacaaaatatgtaaaaaataaagtgaaaaatayacatacccacaacaaatgaacagtaacaccaaactgtattttaaaaggcataaatgaattcatatgtaatgaaaattaatgacttctttttctggcaggccttatctatatcttatgcagttcaactggcagtagatacagaagtaacatgcttgaggaaaatttcttcatctgttgttttcttcctgcccagcattgcttccctgttttttggagattacatcctgatttttctttgg

SEQ ID NO: 14482 - DNA, 559 bp, Homo sapiens
tttaacaagtacaataagtgtgaaaagggtaaccatgtaagcaagactgtcaggaatggcaagagttagaaaatacattaacatatgttatttatgaaaatatttaaaaattcatgattattaatgaatagatgttatatacgtttacaaaataataaacaaaaatttatagagactgaactacaaatgcaaatgctacaaatactatgcagaacctagctcaggtttgcagaaagtgctcattggatgatgtaatgcagggctaaatttttattgattagtacagagtttgggaatgtaaaagctaaatatrctagctaaatattacccttgatatagactgtatatcatttgaatgcatttaaagattctctctcctgcaagaaagtgtgcttttgttatatctaaaaggtgaagtgaccttcctagtaaaaataatcagagcccaggttttcaatttaatccagttatactacactgatcatataaaaatgactttggccgaggtgagcggatcactgagggccaggagttcaagaccagcctggccaatatggtg

SEQ ID NO: 14483 - DNA, 578 bp, Homo sapiens
attttttgattgataaaagagatgtctcttggggaatttgctttaataaatrtgaagaaaagaatgggtaagaatgaactaatgaagtaagttagaatgtctgaacaaaagtactttaatattttgctaggtgctacacacaaatgttcatcttacatgctttattgatttgttgagtaaattgtattgttgttattggatagaactcgaagcccaccccagaccaggcatcctgcactgctctctggagggctcatggtgagagaaggggctcagaacagccagctgccaggtgggtcaggtctggcaccaggccacagcaatgttggggagtttcactctggctaacaggttggtttctaactcaagtttccatttaacctcataactgaaaggggtgcctattcaattcagggtaaatttgctcaatctagttcagggtttgcttcccaccctcctgttgtcccaccatagaattaaagttccaagggccttcgaatgtctaggtgtcaaggagagaggcccctggggcggtcaccgctcctgcatcctcgtgcctgtagtgcccatccctgcag

SEQ ID NO: 14484 - DNA, 578 bp, Homo sapiens
attttttgattgataaaagagatgtctcttggggaatttgctttaataaatatgaagaaaagaatgggtaagaatgaactaatgaagtaarttagaatgtctgaacaaaagtactttaatattttgctaggtgctacacacaaatgttcatcttacatgctttattgatttgttgagtaaattgtattgttgttattggatagaactcgaagcccaccccagaccaggcatcctgcactgctctctggagggctcatggtgagagaaggggctcagaacagccagctgccaggtgggtcaggtctggcaccaggccacagcaatgttggggagtttcactctggctaacaggttggtttctaactcaagtttccatttaacctcataactgaaaggggtgcctattcaattcagggtaaatttgctcaatctagttcagggtttgcttcccaccctcctgttgtcccaccatagaattaaagttccaagggccttcgaatgtctaggtgtcaaggagagaggcccctggggcggtcaccgctcctgcatcctcgtgcctgtagtgcccatccctgcag

SEQ ID NO: 14485 - DNA, 578 bp, Homo sapiens
attttttgattgataaaagagatgtctcttggggaatttgctttaataaatatgaagaaaagaatgggtaagaatgaactaatgaagtaagttagaatgtctgaacaaaagtactttaatattttgctaggtgctacacacaaatgttcatcttacatgctttattgatttgttgagtaaattgtattgttgttattggatagaactcgaagcccaccccagaccaggcatcctgcactgctctctggagggctcatggtgagagaaggggctcagaacagccagctgccaggtgggtcaggtctggcaccaggccacagcaatgttggggagtttcactctggctaacaggttggtttctaactcaagtttccatttaacctcataactgaaaggggtgcctattcaattcagggtaaatttgctcaatctagttcagggtttgcttcccaccctcctgttgtcccaccatagaattaaagttccaagggccttcgaatgtckaggtgtcaaggagagaggcccctggggcggtcaccgctcctgcatcctcgtgcctgtagtgcccatccctgcag

SEQ ID NO: 14486 - DNA, 607 bp, Homo sapiens
tgaaactatcttgaagaaaagacaaaaatatgaattgagacttgagcattgacccatcacactgcatttcagcctaaccaatttaattgcctgataaaactgaaacatataacgaaatgtattttctctacaatataacatttaaaatgtgcagtatacaatataaaattatttactatattaagggccaataaaatataacgtatctgtattagcagggtgtggtggtgagcacctgtagttccaactactcaggagaatataaaccatgttgagcctgggcaacaaaaaacaggacatgaaaccttgtctgtacaaaaaaattttttaaattagctaagtatggtggcrtgtgcctgtagtcccaggtacttggcaggctgatacaggaggatctcttgaacccaggctatcaaagcaacagaataaaaccctgcccagatgcctcttgacttaagatggtgttgctgcttgataaatccattgtaaagtctaaaaagctttaagttgaaccatggtaagtcggggattgcctgtaataacaactctttgcattctctttaagaaaacagaagatgtagaagcaatccctactcatcttatgagt

SEQ ID NO: 14487 - DNA, 736 bp, Homo sapiens
tcacatccatgtttctattcagtgatcattctcaggcatatggtatatgtcaggattgaacacactttgaattgaaccttttgtttaagagtgatgaggtggtaaattgttttcatgttgcagctcagtcagaaatattttttactggccttttgctgaacaaggaaaatatccactaatcatgcaggtaagccttagcattttgtcagttttcttgtatgcacaggtaaagtcaatgatgagtattttcaagcagcaagaattcttgtttacagtttatatgtactgagtgaacttatctcttctttcctacctaagtctaggccaaaaaacgcttcaattttttttaattggatgttagcctgttgctttaaaaaaaataaactttacttttagagcagttttcggttcacagcaaacttgagcaaactacacagagatatcccatatactccccccacatacacataacatccctcatgatcaaaattccccaccacggttgyacatttgttataattggtgaacctacacattattatcacccaaagtccatagttcacattacggttcacactaggtgttgtacattctatgggtgtaaatgaatttataaggacgtgcatcaatcactgtagtatcatacagagcagtctcacctccctaaaagtcctctgtgctttgcctatacatccttctctccctcttttcctcatcttttattgtctctatagtt

SEQ ID NO: 14488 - DNA, 736 bp, Homo sapiens
tcacatccatgtttctattcagtgatcattctcaggcatatggtatatgtcaggattgaacacactttgaattgaaccttttgtttaagagtgatgaggtggtaaattgttttcatgttgcagctcagtcagaaatattttttactggccttttgctgaacaaggaaaatatccactaatcatgcaggtaagccttagcattttgtcagttttcttgtatgcacaggtaaagtcaatgatgagtattttcaagcagcaagaattcttgtttacagtttatatgtactgagtgaacttatctcttctttcctacctaagtctaggccaaaaaacgcttcaattttttttaattggatgttagcctgttgctttaaaaaaaataaactttacttttagagcagttttcggttcacagcaaacttgagcaaactacacagagatatcccatatactccccccacatacacataacatccctcatgatcaaaattccccaccacggttgtacatttgttataattggtgaacctacacattattatcacccaaagtccatagttcacattacggttcacactaggtgttgtacattctatgggtgtaaatgaatttataaggacgtgcatcaatcactrtagtatcatacagagcagtctcacctccctaaaagtcctctgtgctttgcctatacatccttctctccctcttttcctcatcttttattgtctctatagtt

SEQ ID NO: 14489 - DNA, 547 bp, Homo sapiens
gtctcttctccaacctctcagttcggttctagcctgcgcaggacacagcttcccaatcctgggtctgcggcactgtcccaaaatgctctccataagtgaggaattatatttatttagcataggtttttctttgtgataatggtrtatgaattacctgtctatatttagagtagctacctcaatgatttacaattcacacaaaataatatctttggttcgtggtagcaaaaattagccattttcataggagcaactctaacaatattattctcaattttgaaaatgaccagtctctggaccttgtcagatattattttacataatgcttttctcaggtcatggtttaatgataattatactaattagtgtatgaagctagggttcttgttcactgaaatcttgtagaatttcttcattaacttccaaggagtaaaaaacataaaacacccataagaaagtatgtttttctaatttagtagtctcagacattaaagttgaactgaattttttcaccataattctaatggctcagtatgtataaaaatcc

SEQ ID NO: 14490 - DNA, 1568 bp, Homo sapiens
caatgatagactggataaagaacatgtggcacacgtacactgtggaatactatgcagccataaaaaggaatgagatcatgtcctttgcaggggcatggatggagctggaagccattatcctcagcaaactaactcaggaacagaaaaccaaacaccgcatcttctcacttataagtgggagctgaacaatgagaacacatggacacaggaaagggaacaacacatactggagcctgtcagggatgaggtgggcgaaggtagagcactaggaaaaatagctaatgaatgctgggcttaatacctaggtgatgggttgacaggtgcagcaaaccactatggtacatgtttacctttggaacaaacctgtgcatgtacccaataacttaaaataaaaataaaaataaaaaatcaacaggttgccttgcttctgagacctgcatggccatgggcctctgactggattaggaatctttgctaaactgaccctcctgctctccgaagtagcaattccaagaattgacttttgaacaacagttttgaaaacaaccttgagtaagatgacatcttgaagttcactctggaacattctaaatagtccccttcagtcaaaatgttgctgctgtttttaataacagggaaaataaaaatatttaccagcttaaaaaataaaaagacattcatgaattataaatcatctgaaaggttccgtaggagaacacactgccctttacaaaatgaacctcattaccagtccagaacacactgagaatcacaaataaacgtttccaagaaacatttttaataaccactaatacaaccgtatttctattgctaagtacaaaaattctaccgtgtagagtttcttgtctattctgtggaaggaaagaaagagcatccttttgcgggaaaatgttaggtagcaaaataaataataatagcgggattcatcatatcttctctttgtcttagttctttaatggataacattattaaagaaaattatttaaaagtctctaaaaagttaattatgaattttcatcatagactgtagacttctaaaatgacaaaattacccttagggtctcaaaatatacttttaaaagtaggtactctcaaaaaagaatgattatttaaaatgctgaaaagaatctggcgatatttttatttataatgttcacagtttagggttaagcaaattattttataccatacataatttgcatttgagtaatgtggcatattatataatatttaattagatgcaatatctggcagaaaaaagtatggatctccatttaaggagattcaaattttctttacaaaattcagtggatgatgctatagctcatacagtgtaaaccaayggttctcaaccatggcaatgatggtggaagtgtgtggaaaaattagtagggagtgtagataatcagaatcttctcagaaagtttttcaaatatacgtcgctccacggacctttctgcaaagatctccctttctctactgacagaagaaatagcgatggactcaacatcatttctgtcacctgtaatttcgtacttagaacatgc

SEQ ID NO: 14491 - DNA, 541 bp, Homo sapiens
acaagaaataaaatactgaatcataaggctcattactgattagaaaatatttaggtacgagaacagcacagtatatttttaaaatgaaatttgaaaatatatgaagtcaatgaaaggtgataggtaaactattaaattatatcaatttgtatttaaayttcatgcaagttctacatggccaaaactcatggagtactggacagggacaaatgaaacttgtcatgaaaagtacattctagcaatcaaattaatatagcaagaggaagacattcttaaaatgacaagttataaataacttgtgtatgacagcagagaaacagattgaaaggtttcaaagcattgatagtctaggacagtggttctcaaacgttgacatgcataaaattatctggagagcttgttaaaatacagattactaggtcccacaaccagagtttataatactgtagtaggtctagggtaggacttgaaaatgggatttccaataaattaccagatgttgctgctattgctgctgctgctctgcagatcacactgagaa

SEQ ID NO: 14492 - DNA, 582 bp, Homo sapiens
cttgtcttggccaccagtcacattacactgactgctctaagctgtggcgccatggctaccagtgttggttcagatccctgtctcctgcttactggctgtgtgaccttgggaaagttagggaacttctctgtccctcacagtcctcatctaaaaactgggaatcacatcagtgcctacctcacagagctcctgcgaggatctgagcaaacgaattaacacaagtagaagacagggcctggctcaataaatgttcacttttattttgtccttttcctatcctgactaaaactaaaagaaccctcttctgtgtgtgcaaagttcstagaaacttctgttgtagtcttcttgtcatttttcatgctgcttctttttccttgggatcttcctgcttccttgtgagtgggaaaataaaaccaaggtcaactacaaattaattaattaatttatttatttatttatttatttatttatttatttatttaattttattttttgaggcagagtctcatgctgtcgcccaagctggagtgcagtggcacaatctcagctcactgcaacctctgcctcccaagctcaagcgat

SEQ ID NO: 14493 - DNA, 582 bp, Homo sapiens
cttgtcttggccaccagtcacattacactgactgctctaagctgtggcgccatggctaccagtgttggttcagatccctgtctcctgcttactggctgtgtgaccttgggaaagttagggaacttctctgtccctcacagtcctcatctaaaaactgggaatcacatcagtgcctacctcacagagctcctgcgaggatctgagcaaacgaattaacacaagtagaagacagggcctggctcaataaatgttcacttttattttgtccttttcctatcctgactaaaactaaaagaaccctcttctgtgtgtgcaaagttcgtagaaacttctgttgtagtcttcttgtcatttttcatgctgcttctttttccttgggatcttcctgcttccttgtgagygggaaaataaaaccaaggtcaactacaaattaattaattaatttatttatttatttatttatttatttatttatttatttaattttattttttgaggcagagtctcatgctgtcgcccaagctggagtgcagtggcacaatctcagctcactgcaacctctgcctcccaagctcaagcgat

SEQ ID NO: 14494 - DNA, 556 bp, Homo sapiens
tttctaatatagcatttaaacttctttaatgatgttttcactatatttttgagttatttttagaagttttatttaatttttgatggacagataattggacatatttattggatacaatgtgatattgcaatacatgcatacgttgtgtaatgattagatccgggtaagcagtatattcatcatgttgtaaatatattgtttctttgtggtgtgaacattcaacatctcctctattccagctattttggaacatacamtacattattgttaactatagtcaacctactgtaaaatagaacaccagaacttatttatcctaactaactctaacattgtacctgttgagcaattgctccccatatcccctccccttccttcctagcctctgacaagcagtattctgctcttactatttttgagttattttttagcagtttctctaaggtttaccgtatacatcttatttgaatgagcttctatttatactagcttaatttcagtgacatatggaaatactgctctgtgggatgacagtggttttggtagggttctcctt

SEQ ID NO: 14495 - DNA, 556 bp, Homo sapiens
tttctaatatagcatttaaacttctttaatgatgttttcactatatttttgagttatttttagaagttttatttaatttttgatggacagataattggacatatttattggatacaatgtgatattgcaatacatgcatacgttgtgtaatgattagatccgggtaagcagtatattcatcatgttgtaaatatattgtttctttgtggtgtgaacattcaacatctcctctattccagctattttggaacatacaatacattattgttaactatagtcaacctactgtaaaatagaacaccagaacttatttatcctaactaactctaacattgtacctgttgagcaattgctccccatatcccctccccttccttcctagcctctgacaagcagtattctgctcttactatttttgagttattttttagcagtttctctaaggtttaccrtatacatcttatttgaatgagcttctatttatactagcttaatttcagtgacatatggaaatactgctctgtgggatgacagtggttttggtagggttctcctt

SEQ ID NO: 14496 - DNA, 537 bp, Homo sapiens
acaggtgcctttaatgggcaatttttgtttggggaatccctatccctattaataggaatccatattcaattgctcatagaatcagacacctatctgtctgccaatctgaaactattctggtaagtgggaggtacatataaaggtaaaacagaatggaaaggttgctgaatacaggaaaaagtggtatgtagtaacattaacactaatatatttaaaataagttaacagtaaaccaatttatacacacayataacacacacacacacacacataaaataggcttcttttgtattaagaaatgaagcactgtaaaatagttctgaatttgtgttagctgtagattacactatcgaaaactatttttcctatttgtctgtgtacatgtatatgtatgtattcctttttctcttccattaactgaaaagccatgttgagtggtcttcgaccactgcttttcccctgtgtgaggcacaagtgctgctgctgtgtgtatattttttgtatattagccaatttttattaattcttgttttttta

SEQ ID NO: 14497 - DNA, 537 bp, Homo sapiens
acaggtgcctttaatgggcaatttttgtttggggaatccctatccctattaataggaatccatattcaattgctcatagaatcagacacctatctgtctgccaatctgaaactattctggtaagtgggaggtacatataaaggtaaaacagaatggaaaggttgctgaatacaggaaaaagtggtatgtagtaacattaacactaatatatttaaaataagttaacagtaaaccaatttatacacacatataacacacacacacacacacataaaataggcttcttttgtattaagaaatgaagcactgtaaaatagttctgaatttgtgttagctgtagattacactatcgaaaactatttttcctatttgtctgtgtacatgtrtatgtatgtattcctttttctcttccattaactgaaaagccatgttgagtggtcttcgaccactgcttttcccctgtgtgaggcacaagtgctgctgctgtgtgtatattttttgtatattagccaatttttattaattcttgttttttta

SEQ ID NO: 14498 - DNA, 527 bp, Homo sapiens
attttactttgtgttttcaggatagtaattatttgttaaccgggggacaggataaactgttacgcatatatgacttgaacaaacctgaagcaggtaagcataatttaaacatcagcttstagttttattttcttttaatttaaataactgattaaagaatttcatgctcagtactcaaatttggaaaataaagatagtcatggccgggcacggtggctcatacctgtaatcctagcactttgggagactgaggcgggtggatcacttgaggtcaggagttcgagaccagcctggccaacatggcaaaaccccgtctctattaaaaatagaaaaattagccaggcatggtggcaggcgcttgtaatcccagctacttgggaggctgaggcaggagaatcgcttgaacccgggaggtggaggttgcagtgagccgagattgcgccactgcactccagcctgggcaataagagtgaaactcagtttcaaaaaaaaaaaaatagtcaacaaagaagaaaattaaaacgtaa

SEQ ID NO: 14499 - DNA, 570 bp, Homo sapiens
tgcttagtacaaacctgagctaggaaatamtaacagagagctctttgtgccactgagtcctggaacttccccatactaattttgagaaggctttcttgtaagtatgtgacagatactgtttcctccactttctgtttattgcatataaccactattcttgtatgtaagtacgtataacagtttctttactattcccattattcagcgtttataatctggtttgacatatcagtgttggtgctgagagggaaaggtatttctaggtaggataaaatggtgaaaagtgatttaacactgttgtatgcttgcttttggccaggaactatagggcagtgtatcttaaactttgagtcttgagaccctcttacactcaaattctccatatatgtaaagaattgaaaacgagcttttatttatgtgaggtatttaacaatattgcattagaagttaaaactgagaatttaaaaatttctgttctcggccgggcatggtagctcacacgtgtaatctcagcactttgggaggccgaggcgggtggaattgcttgaggccaggagttcaagaccagcc

SEQ ID NO: 14500 - DNA, 468 bp, Homo sapiens
agcagggaccaggcgccgagtaggcatttgtgaggccctaggaggacggagccgggcccctcagggctcaagggaccccgcctagtggtggggctcagaatgaggggagcagcaggtaggaaagacctggagagggcagagctgggcaaggaggctggaccagagcatccattgtttgaagagatcatgcaggctgcagtgaggagactggatggaagggkgtttggggacatttcagctaaaacatctactcagctgttcacagcccacatttgggaaatgaggggacaaggatgagtctgagtcctagactgagaatgaaccaggtgactggtcatgccagcctcggaaactgggacatctgggaagaccccatgaagcttgggagtgatatcgttttacaacgtggagcatcttcaagatgactttgagggtctccatggagagggggagaggcagctggattta

SEQ ID NO: 14501 - DNA, 1086 bp, Homo sapiens
catggcaccaaatttcatgcgcktctgtgtgaagagaccaccaaacaggctttgtgtgagcaacatggctgtttatttcacctgggtgcaggtgggctgagtccgaaaagagagtcagcaaagggagataagggtggggctgttttataggatttgggtaggtaaaggaaaattacagtcaaagggggtttgttctctggcgggcaggagtgggggtcccaaggtgctcagtggggggtgctttttgagccaggatgagccaggaaaaggactttcacaaggtaatgtcatcacttaaggcaaggaccggccatttacacatcttttgtggtggaatgtcatcagttaaggtggggcagggcatattcacttcttttgtgattcttcagttacttcaggccatctgggtgtatacgtgcaagtcacaggggatgcgatggcttgacttgggctcagaggcctgacgcttttcatacattaacatgtggagcccattttaaaagctctttaacagtgactgtcgaaacagcttcctagttattcatataatgtttcttctttttttttaagttttcaaattagttttagaaaaacttaaacactgatgaatttgggccgctatcaaatccttaagaagcatttttgccaaataagatgggcaaacgtcctacatctgctaaatctgacatgagaggccatgtatttttgaaaaaaatgaataaataacgatttctaacagtcgctgagccttttttttctgtttgtttttcttttctttctttctttctttcttttttttttttttttttttgagacagtctcccaggctggagtgcagtggcgcaatcccggctcactgcatcctccacctcccgggttcaaacgattctcctgcctcaacctcctgagtagctgggaccacgctcaactaatttttgtatttttagtagagaaggggtttcaccatattggccaggctaatctcgaattcctgacctcaagtgatccacctgcctcggtcttccaaagttctggaattacatgcgtgaaacaccgcacccggcctagccttttagtttaaaatta

SEQ ID NO: 14502 - DNA, 1086 bp, Homo sapiens
catggcaccaaatttcatgcgcttctgtgtgaagagaccaccaaacaggctttgtgtgagcaacatggctgtttatttcacctgggtgcaggtgggctgagtccgaaaagagagtcagcaaagggagataagggtggggctgttttataggatttgggtaggtaaaggaaaattacagtcaaagggggtttgttctctggcgggcaggagtgggggtcccaaggtgctcagtggggggtgctttttgagccaggatgagccaggaaaaggactttcacaaggtaatgtcatcacttaaggcaaggaccggccatttacacatcttttgtggtggaatgtcatcagttaaggtggggcagggcatattcacttcttttgtgattcttcagttacttcaggccatctgggtgtatacgtgcaagtcacaggggatgcgatggcttgacttgggctcagaggcctgacgcttttcatacattaacatgtggagcccattttaaaagctctttaacagtgactgtcgaaacagcttcctagttattcatataatgtttcttctttttttttaagttttcaaattagttttagaaaaacttaaacactgatgaatttgggccgctatcaaatccttaagaagcatttttgccaaataagatgggcaaacgtcctacatctgctaaatctgacatgagaggccatgtatttttgaaaaaaatgaataaataacgatttctaacagtcgctgagccttttttttctgtttgtttttcttttctttctttctttctttctyttttttttttttttttttgagacagtctcccaggctggagtgcagtggcgcaatcccggctcactgcatcctccacctcccgggttcaaacgattctcctgcctcaacctcctgagtagctgggaccacgctcaactaatttttgtatttttagtagagaaggggtttcaccatattggccaggctaatctcgaattcctgacctcaagtgatccacctgcctcggtcttccaaagttctggaattacatgcgtgaaacaccgcacccggcctagccttttagtttaaaatta

SEQ ID NO: 14503 - DNA, 1086 bp, Homo sapiens
catggcaccaaatttcatgcgcttctgtgtgaagagaccaccaaacaggctttgtgtgagcaacatggctgtttatttcacctgggtgcaggtgggctgagtccgaaaagagagtcagcaaagggagataagggtggggctgttttataggatttgggtaggtaaaggaaaattacagtcaaagggggtttgttctctggcgggcaggagtgggggtcccaaggtgctcagtggggggtgctttttgagccaggatgagccaggaaaaggactttcacaaggtaatgtcatcacttaaggcaaggaccggccatttacacatcttttgtggtggaatgtcatcagttaaggtggggcagggcatattcacttcttttgtgattcttcagttacttcaggccatctgggtgtatacgtgcaagtcacaggggatgcgatggcttgacttgggctcagaggcctgacgcttttcatacattaacatgtggagcccattttaaaagctctttaacagtgactgtcgaaacagcttcctagttattcatataatgtttcttctttttttttaagttttcaaattagttttagaaaaacttaaacactgatgaatttgggccgctatcaaatccttaagaagcatttttgccaaataagatgggcaaacgtcctacatctgctaaatctgacatgagaggccatgtatttttgaaaaaaatgaataaataacgatttctaacagtcgctgagccttttttttctgtttgtttttcttttctttctttctttctttctttttyttttttttttttttgagacagtctcccaggctggagtgcagtggcgcaatcccggctcactgcatcctccacctcccgggttcaaacgattctcctgcctcaacctcctgagtagctgggaccacgctcaactaatttttgtatttttagtagagaaggggtttcaccatattggccaggctaatctcgaattcctgacctcaagtgatccacctgcctcggtcttccaaagttctggaattacatgcgtgaaacaccgcacccggcctagccttttagtttaaaatta

SEQ ID NO: 14504 - DNA, 1086 bp, Homo sapiens
catggcaccaaatttcatgcgcttctgtgtgaagagaccaccaaacaggctttgtgtgagcaacatggctgtttatttcacctgggtgcaggtgggctgagtccgaaaagagagtcagcaaagggagataagggtggggctgttttataggatttgggtaggtaaaggaaaattacagtcaaagggggtttgttctctggcgggcaggagtgggggtcccaaggtgctcagtggggggtgctttttgagccaggatgagccaggaaaaggactttcacaaggtaatgtcatcacttaaggcaaggaccggccatttacacatcttttgtggtggaatgtcatcagttaaggtggggcagggcatattcacttcttttgtgattcttcagttacttcaggccatctgggtgtatacgtgcaagtcacaggggatgcgatggcttgacttgggctcagaggcctgacgcttttcatacattaacatgtggagcccattttaaaagctctttaacagtgactgtcgaaacagcttcctagttattcatataatgtttcttctttttttttaagttttcaaattagttttagaaaaacttaaacactgatgaatttgggccgctatcaaatccttaagaagcatttttgccaaataagatgggcaaacgtcctacatctgctaaatctgacatgagaggccatgtatttttgaaaaaaatgaataaataacgatttctaacagtcgctgagccttttttttctgtttgtttttcttttctttctttctttctttcttttttttttttttttttttgagacagtctcccaggctggagtgcagtggcgcaatcccggctcactgcatcctccacctcccgggttcaaacgattctcctgcctcaacctcctgagtagctgggaccacgctcaactaatttttgtatttttagtagagaaggggtttcaccatattggccaggctaatctcraattcctgacctcaagtgatccacctgcctcggtcttccaaagttctggaattacatgcgtgaaacaccgcacccggcctagccttttagtttaaaatta

SEQ ID NO: 14505 - DNA, 704 bp, Homo sapiens
taattagatatttgaattgacaagataaaaacagatacaaaatctattacaaaagttatgattctaaaaacatatgacacacaaacagagtattttagctatctgaaaaactaattgcccaagaaaccagcactgaaaaagcagaatttgatattaaaaacacattacaattcacattagcatctcccaaagtaaaatacttatgtataaatctaacaaaatatgtataaggtctatgtaaggaaaactataaaactctgatataagatatcaaataataaataaattgagagatagytcatttttatggataggaagactcaattttgtcaagatgtcaattcctcccaacttcatctatagaaccaagtcagtctgagtcaaaatctcatcatgttatttcatggctattgacaaactgattttgtcaaaagacctggaagagccaactcattgtcgaaggagaagaatgaagtgggagaagtgacactacctgactataagacttacttattataaagctacagtaaaaaataatagtgtggtattgacaaaaaacagacaaatagatcaatggaacagaatatggaaacccagaagtagacccatataaatacagtaaactcatctttgacataaaacaaaggcaatacaataaagcaaagatagttttttttttcagcaatgggtgctggaataaatga

SEQ ID NO: 14506 - DNA, 704 bp, Homo sapiens
taattagatatttgaattgacaagataaaaacagatacaaaatctattacaaaagttatgattctaaaaacatatgacacacaaacagagtattttagctatctgaaaaactaattgcccaagaaaccagcactgaaaaagcagaatttgatattaaaaacacattacaattcacattagcatctcccaaagtaaaatacttatgtataaatctaacaaaatatgtataaggtctatgtaaggaaaactataaaactctgatataagatatcaaataataaataaattgagagatagctcatttttatggataggaagactcaattttgtcaagatgtcaattcctcccaacttcatctatagaaccaagtcagtctgagtcaaaatctcatcatgttatttcatggctattgacaaactgattttgtcaaaagacctggaagagccaactcattgtcgaargagaagaatgaagtgggagaagtgacactacctgactataagacttacttattataaagctacagtaaaaaataatagtgtggtattgacaaaaaacagacaaatagatcaatggaacagaatatggaaacccagaagtagacccatataaatacagtaaactcatctttgacataaaacaaaggcaatacaataaagcaaagatagttttttttttcagcaatgggtgctggaataaatga

SEQ ID NO: 14507 - DNA, 627 bp, Homo sapiens
atcatgtttccaccagaattgcaaagacaaaaagcacaaagggatagctgtctctcactgggagaagaaatctttcccaagctcccctaggaaatgtacctgggtcagaacccagcctcttgaccactccaagccagagaataagcccatttacccgaagaccattttctctgtctcaaagctgaacaaaattggagatggtggaagcaaagttctgatccaggcaataaataattctgctatattcaacattaaaagccagggaatccccttcagcaaatttgtttctgaatccccttctcaaagctttaaagagtgatttcaccacactaaaggctctttyctcttagacaataagcagttgcacatgtatatactgttagttataagagagagaaatattcatttcaattcaaaggtgtaaagagtggtatactgtaacttttctgaaataaatggggaaaaaagacctaaaaatagacatttttggtctgcacattttacaatattatgtaattcttcacatgcaacaaacactcaattcatgttgtccattcagagggggcaatgtgtacagacagccaagggccaaacagaggtagcttcaatctaggctcttttacttac

SEQ ID NO: 14508 - DNA, 578 bp, Homo sapiens
ggccttgccacttaatctccaccattccaaagaaaacctttctgagatcatcttaacgttgtctctaggcaataaatatctctggtttctagttattcccaaggacactgacctcacatttcttactgtcttaaagtcaaaagtacctttgtccttaactcacaccaatatgtatgagactaggatatgagagagattgttacatcttgcttgatgttttgacattwtaggtagtgtaggttttgttattacagtttgacttttgaaatgcgtatgagatttctcaggtgaaatagagcctttgatgtggtactcaaaagggataactatgactcagaggaaccatttctaaaagatggcactctttctccttccagttctttctgttcaatagtagggctggggaaaggcagaggcagtttttgttatttcaaatgacagcatcaaagatagtaatccacggtgctcaacaaaagtcgaatgaccttttttccttctccattcataaatacataagagctgatgcttcattatgtttaaatacaaaatgcacactcctactttgttttcctatatgt

SEQ ID NO: 14509 - DNA, 578 bp, Homo sapiens
ggccttgccacttaatctccaccattccaaagaaaacctttctgagatcatcttaacgttgtctctaggcaataaatatctctggtttctagttattcccaaggacactgacctcacatttcttactgtcttaaagtcaaaagtacctttgtccttaactcacaccaatatgtatgagactaggatatgagagagattgttacatcttgcttgatgttttgacattataggtagtgtaggttttgttattacagtttgacttttgaaatgcgtatgagatttctcaggtgaaatagagcctttgatgtggtactcaaaagggataactatgactcagasgaaccatttctaaaagatggcactctttctccttccagttctttctgttcaatagtagggctggggaaaggcagaggcagtttttgttatttcaaatgacagcatcaaagatagtaatccacggtgctcaacaaaagtcgaatgaccttttttccttctccattcataaatacataagagctgatgcttcattatgtttaaatacaaaatgcacactcctactttgttttcctatatgt

SEQ ID NO: 14510 - DNA, 527 bp, Homo sapiens
aaccacattcaccacttgtgccaataatatgttcatttcactgtatgttttgaaatgtgtaccacatgyatatgttatctttacgaaaaaaaaaatagtatgttgaaaccactcgtcacagccaaatgaaataagagctaactcattcaagcaggagccccggaggactaaaagaatccggcctctcccaggcctcctcacctgagcagggctccctcctgactaccgcccacccactccagggcaggacgcgggaagagactgcccagcccgagggtcgcaggggcagaaaaccccaggtcctgaacgcgcctgggccccgcggcgaacctggcgtccccaccagacaccagaatcagattcaggccaggccaggaaccaccccagcttcctgcatccgccttggtccaggcagcaatgacggcggcggccgccagggggacggaagctcaagggcggggatccaggcccaagcctgggcgcgcccaccaaggcgtggatccggacgaaggttccggaacagccgg

SEQ ID NO: 14511 - DNA, 527 bp, Homo sapiens
aaccacattcaccacttgtgccaataatatgttcatttcactgtatgttttgaaatgtgtaccacatgtatatgttatctttacgaaaaaaaaaatagtatgttgaaaccactcgtcacagccaaatgaaataagagctaactcattcaagcaggarccccggaggactaaaagaatccggcctctcccaggcctcctcacctgagcagggctccctcctgactaccgcccacccactccagggcaggacgcgggaagagactgcccagcccgagggtcgcaggggcagaaaaccccaggtcctgaacgcgcctgggccccgcggcgaacctggcgtccccaccagacaccagaatcagattcaggccaggccaggaaccaccccagcttcctgcatccgccttggtccaggcagcaatgacggcggcggccgccagggggacggaagctcaagggcggggatccaggcccaagcctgggcgcgcccaccaaggcgtggatccggacgaaggttccggaacagccgg

SEQ ID NO: 14512 - DNA, 527 bp, Homo sapiens
aaccacattcaccacttgtgccaataatatgttcatttcactgtatgttttgaaatgtgtaccacatgtatatgttatctttacgaaaaaaaaaatagtatgttgaaaccactcgtcacagccaaatgaaataagagctaactcattcaagcaggagccccggaggactaaaagaatccggcctctcccaggcctcctcacctgagcagggctccctcctgactaccgcccacccactccagggcaggacgcgggaagagactgcccagcccgagggtcgcaggggcagaaaaccccaggtcctgaacgcgcctgggccccgcggcgaacctggcgtccccaccmgacaccagaatcagattcaggccaggccaggaaccaccccagcttcctgcatccgccttggtccaggcagcaatgacggcggcggccgccagggggacggaagctcaagggcggggatccaggcccaagcctgggcgcgcccaccaaggcgtggatccggacgaaggttccggaacagccgg

SEQ ID NO: 14513 - DNA, 527 bp, Homo sapiens
aaccacattcaccacttgtgccaataatatgttcatttcactgtatgttttgaaatgtgtaccacatgtatatgttatctttacgaaaaaaaaaatagtatgttgaaaccactcgtcacagccaaatgaaataagagctaactcattcaagcaggagccccggaggactaaaagaatccggcctctcccaggcctcctcacctgagcagggctccctcctgactaccgcccacccactccagggcaggacgcgggaagagactgcccagcccgagggtcgcaggggcagaaaaccccaggtcctgaacgcgcctgggccccgcggcgaacctggcgtccccaccagacaccagaatcagattcaggccaggccaggaaccaccccagcttcctgcatccgccttggtccaggcagcaatgacggcggcggccgccagggggacggaagctcaagggcggggatscaggcccaagcctgggcgcgcccaccaaggcgtggatccggacgaaggttccggaacagccgg

SEQ ID NO: 14514 - DNA, 583 bp, Homo sapiens
gagaatccgtctccaaaaaaaaaaaaaatccacactagagcagcattctcaccatgtaatggaataaggagcatgtctggttcttggtgaaatgtgcagttgagtttaaggcccagctgtggccaacactcacacacacacgtctgctgtggaatgcacaggctgctgctgcctgtcacraaacgaaaatccaccagcccaatcactaaggttaaagtcgctttttgttgctgcgggtgctttcagtcagctggttcccagagagagctattaccttttgggagtccatgaaactttagaatgatggccttctgatggaaaatgctagaagtgtggttgaatctaactcctgattggtgggcagtgcagggcaggacggggccgtggtggcctcaggctcaagggcagatggccttggcttcaaatcccagctctgcctctcaccccctcggactcagcagtcctcacccagggatgggctcatctgcagcttctgggctgctttcctggtttcctccagttaaggaacaagctgtcctgaactagggcaggaaagaccagagtcacgtagtccccatcatct

SEQ ID NO: 14515 - DNA, 583 bp, Homo sapiens
gagaatccgtctccaaaaaaaaaaaaaatccacactagagcagcattctcaccatgtaatggaataaggagcatgtctggttcttggtgaaatgtgcagttgagtttaaggcccagctgtggccaacactcacacacacacgtctgctgtggaatgcacaggctgctgctgcctgtcacgaaacgaaaatccaccagcccaatcactaaggttaaagtcgctttttgttgctgcgggtgctttcagtcagctgrttcccagagagagctattaccttttgggagtccatgaaactttagaatgatggccttctgatggaaaatgctagaagtgtggttgaatctaactcctgattggtgggcagtgcagggcaggacggggccgtggtggcctcaggctcaagggcagatggccttggcttcaaatcccagctctgcctctcaccccctcggactcagcagtcctcacccagggatgggctcatctgcagcttctgggctgctttcctggtttcctccagttaaggaacaagctgtcctgaactagggcaggaaagaccagagtcacgtagtccccatcatct

SEQ ID NO: 14516 - DNA, 1167 bp, Homo sapiens
caggctacctggggaaactgccattgcctggtctgcactctatctatagctgcttgagaatggtgtgcatatgagggcagagaggatctataataataaccaacttaagaaaacaagcaggctcgctctttatactcccagttgtaattttgtgagcacctagtgaatctagaagcagagcgataaaggatcatggtgacttagaggagtgggcaagaaaggattcacctccaggctattttggctagtcctgcagagacaggggcatagattcaggccacctgtgggcactcatgggtttctttgcatgtagtgttagtcttgatggagagtggatgtattagtctgttctcacgttgcgttgcttakaaagacatacccaagactgggtcatgtataaaggagagagatttaatggactcacagttcagcatggctggggaggcctcacaatcatggcagaaggcaaaggagaagcaaaggcggatcttacacggcagcagacaagagcgtgagaggtagcaggtggaaccccagagtcttataaaaccaccagatctcgtgagaactcactatcatgagaacagtatgggggaaactgcccccatgatttaattatctccacctggtcccacccttgacacatggggattattacagttcaaggtgagatttgggtggggatacatagccaaaccatatcagtgggggagtgccaaattcatgttaaaaccctaattcctgggccaggcgcggtggctcacgcctgtaatcccaacactttgggaagccgaagtgaatgaatcacgaggtcaggagttcgagaccagcctggccgacatggtgaaactccatctctactaaaaatataaaaattagccgggcatggtggtgggcacttgtaatcccagctactcgggaggctgaagcaggagaatcacttgaacccaggaggcggaggttgcagtgagccgagatcgcgatgctgcactccagcccaggcgacagtgtgagactccatctcaaaaaaaacaaaaacaaaaacagaaaacaacaacagaaaccctaattcccaacatgataatactaggaggtgggacctttgggtagtgtcatgtcataagggtggagccctcatgatgggattagtgtccttataaaaagaaa

SEQ ID NO: 14517 - DNA, 567 bp, Homo sapiens
gggactcaaggttcaccttccagccactgattggaaagtggtaggtgctggccaggccacactgcccatgtttgccaaggagctgctgcccaattcacatggggcccatgccccatgcccatgaggaccccccgccccaccaccaaattacttcccagccctcacgccctctgtgcctgactggatacctgaaacctcttggaaggagccaattccagaacatgaacctaagtggaaaaattaactaygctcaaacataacctgaaagcacctttctaagctgctaccattagctaggatttcatgcatcccctaaagggtggacataccctacatatcctgcagtctgcggttaacaactttttaacaaagaaaacatcttattctgtagcctaatacgttacttttccagacaggaaggacctgaggggtaaaggcacgtatctccagccgcatttcagcagagcccaccctcttctcgcaggtcaaccgacatgtccagtaacttgtcctaagccaaaacacatttcggcttttttgtccacgcacgatagcaacatcagagtg

SEQ ID NO: 14518 - DNA, 567 bp, Homo sapiens
gggactcaaggttcaccttccagccactgattggaaagtggtaggtgctggccaggccacactgcccatgtttgccaaggagctgctgcccaattcacatggggcccatgccccatgcccatgaggaccccccgccccaccaccaaattacttcccagccctcacgccctctgtgcctgactggatacctgaaacctcttggaaggagccaattccagaacatgaacctaagtggaaaaattaactatgctcaaacataacctgaaagcacctttctaagctgctaccattagctaggatttcatgcatcccctaaagggtggacataccctacatatcctgcagtctgcggttaacaactttttaacaaagaaaacatcttattctgtagcctaatacgttacttttccagacaggaaggacctgaggggtaaaggcacgtatctccagccgcatttcagcagagcccaccctcttctcgcaggtcaaccgacatgtccagtaacytgtcctaagccaaaacacatttcggcttttttgtccacgcacgatagcaacatcagagtg

SEQ ID NO: 14519 - DNA, 569 bp, Homo sapiens
gtaccctgcacacaacacacagaaaagggccagatgccaaccatgaggaaaaaggtgaccttgtcaaagtcccaagaaaaaaaaatggctcacaagtcaaactccattacagtgaaatttcaaggatacccaattcttttctagtacaaaaatgtaggcccattacatatttctttaatttttaaaaaatgggggctgagcttygaactctttattacaccagagttttggagatttgtggtgggggttattttggggagggtgttttgttctgaagtgatatttgctttactgaaatttcactagcagtaacaaaagctgtgttttaaagaggcttattaccaaaaaaaaaaaaaaattaaataaataaatatatgtacaccttgcttggtagtatccagatgaaccttttttttttgtaaatgaagtatgtgaaatagattaagcaataaaggcattgagagatgatatttaaaggaaacctattataaatccattggtagggtatattcaatattttgtaaaaggagtcaccctgggagaaggaggaataaataggtggaccacag

SEQ ID NO: 14520 - DNA, 1118 bp, Homo sapiens
atggaaatgatatcttgttcatagtcttgttacagagtttagacaagatgacataaagttcttagcacgagttcttctcaaaagacgataggttgtttttgtttgtttgtttttgccttctccatttcctgtagccctatctatttctgattataaaaagaggactgtttcaaaaaattaaacataagcttaccatatgatccagcaattccacttctggtggtatacacacccaaaagaattgaaagaattgaaggcaggactccaacaggtattcatatgcccatactcatagcagcattattcacagtagccaaaaggtgggaacaacccagtgttcatccgtggattaatggacaagcaaactgtggtctatccttacagtggaatattattcagcctaaaaaggaaggaaattctgacacatgctacaacatagatgaaccttgaagacactgtggtaagaaaaataagccagacacaaaggacaaatactgtatgagtctacttatatgaagtatttagagtagtcaaattcatagagagagaaagtggaattatggttaccggcggggcaagaagagagggtatggagtttcagtttgggaagatgaaaagagctctggagatggatggtggcgatggttgcgcaacagtttaaacaatgtcaccaaacagtacgcctaaaaatcacacatagataaaatatacattttatgttatatatatcttactacagttaaaaaattgcttacacgacaaacatattttaatttcagttatgacataattttagagatattaaaatgtgaaaatcacataaatctttagaataaaaagaatatggtttttaacactcaaaaaaaaaaaagaaagactgcttgagcccccacatacagaggaggttagaaatataatccatggctcattgtcaagggcatggagagaccaatccttaaggggaaatcccagtcagagtattgcttataattgcctggaaagarcccccattactcacagttctgggggacagggtagacactgcaggagatgaaccccgcatcttctgtaacatcagcacacacacacaccctcagagccagccatccccaccaccc

SEQ ID NO: 14521 - DNA, 1118 bp, Homo sapiens
atggaaatgatatcttgttcatagtcttgttacagagtttagacaagatgacataaagttcttagcacgagttcttctcaaaagacgataggttgtttttgtttgtttgtttttgccttctccatttcctgtagccctatctatttctgattataaaaagaggactgtttcaaaaaattaaacataagcttaccatatgatccagcaattccacttctggtggtatacacacccaaaagaattgaaagaattgaaggcaggactccaacaggtattcatatgcccatactcatagcagcattattcacagtagccaaaaggtgggaacaacccagtgttcatccgtggattaatggacaagcaaactgtggtctatccttacagtggaatattattcagcctaaaaaggaaggaaattctgacacatgctacaacatagatgaaccttgaagacactgtggtaagaaaaataagccagacacaaaggacaaatactgtatgagtctacttatatgaagtatttagagtagtcaaattcatagagagagaaagtggaattatggttaccggcggggcaagaagagagggtatggagtttcagtttgggaagatgaaaagagctctggagatggatggtggcgatggttgcgcaacagtttaaacaatgtcaccaaacagtacgcctaaaaatcacacatagataaaatatacattttatgttatatatatcttactacagttaaaaaattgcttacacgacaaacatattttaatttcagttatgacataattttagagatattaaaatgtgaaaatcacataaatctttagaataaaaagaatatggtttttaacactcaaaaaaaaaaaagaaagactgcttgagcccccacatacagaggaggttagaaatataatccatggctcattgtcaagggcatggagagaccaatccttaaggggaaatcccagtcagagtattgcttataattgcctggaaagagcccccattactcacagttctgggggacagggtagacactgcaggagatgaaccccgcatcttctgtaacatcagcacacacacrcaccctcagagccagccatccccaccaccc

SEQ ID NO: 14522 - DNA, 507 bp, Homo sapiens
agtaaagcattctgtcacaagaatgaaactaatactgcctataaaagtaactaaaaagccacgaaatttttctctgcctgcctcccttttccagccgaactctaacattttatataaaaatggctttcatctcttatggcaatagaagagttgatggctgcctggcatcaaacttgctaaaatcaatagtagtgtaattatcagcacacttccaaatgttttcaaatacatcccggctgggattttcctaaattagatatgtgtgctttatgctggtggtmtaggattgtcaataacctgcactaaagagaattttcaaatattgcccaaagcattcttttttatagcaattgtttgacttctttacacctcacccctttcaaaaagtgtttgatgcactctacaacatcctaatgtcatattgctggttgtgatactactttaattgtacatttacatgatctgatacatgtaatggatttagaacagtgcttgacacatgggaaa

SEQ ID NO: 14523 - DNA, 532 bp, Homo sapiens
agagacgtttgaggccctggaatggggttcccccctgaaccaaagaccctcatggatccaggtaacattttatccacaggggcatctcaggccatgtgcctgggatcagttttgtctagtggtaatggatttcactttttgattgtgtgttgctttgaaggaaactcaattaatttgtgtctccctcagcatgtggcagttaaaattgcagtgataggacagggaggacccttgcaagtcgttttgttcactcaagcttttaaaactcctgcctccctttgcttcatatagaaatctcattcttcactttagtggtaagcgacatttctaaattatttcacctttggttgtagtaggccgaacgacagcccccaaacatatcagccccgaatctctgggacctgtaaatgttaccttatttagaaaaagggtctttgcagatgtgattaagttaatgattttgagactaggagattatgttggattaactagatcgaccctaaataccatcacawgtatccttacaagagag

SEQ ID NO: 14524 - DNA, 503 bp, Homo sapiens
ccttttctattcataagcataacacataatacctttgcctgtttatctaacagttattactgcttgatgtttcttaatgtttcatcgtggtgagaggcattgattggatcttccttcaacayagagatgagccaaaatttgctaagtgtatttatttataatttatattccttatagttccaaaatgcatttaagatcatttagatgaaaacatgtagttagcttaattaaaataaaaacaaaagttaaaaatatcttttagagttaggataagatagctattgtcacagagcataaaatttggcttgaacttttttggcaagccagggaaaacagaaagtagtacaaagctctcattatgtgatcaaataaactacatgagttctttcctcaacaaatgaatgtctgtaacaaatatttgtgaaggacttacaacacctcagacactacacttactgtgtggatacaaagacagaagatactaaaatgacatgaaaaggcca

SEQ ID NO: 14525 - DNA, 549 bp, Homo sapiens
ggtaagcaaagaaactagtaaacatgtgggtcaatataaagaaggattgttattattatttttttgagagagggtcttgctctgtcacccagcctggagtgcagtggcgctatcctggctcaccacaacctctgcctcccaggttcmagtgattctccttcctcagcctcccaagtagctgtgatttccatgtgataagaggcgtgtgccatcacgccaggctaattcttgtctttttagtagagacccggttttaccatgttggccaggctggtcttgaactcctgacttcaagtgatttgcccacttcagcctcccaaagtgttgggattataggcgtgagccaccatgcccggcctaagaagcatttcttacacagaacagtaatgataatggttattaattttggtaataatatcaagatataataaaattccaaacatctctaacacttaataagaagatgagtaatttttattagaagaaggttagaattattgatttcaattttagttcctgtttaatcaagtatatatgttagcaatttca

SEQ ID NO: 14526 - DNA, 549 bp, Homo sapiens
ggtaagcaaagaaactagtaaacatgtgggtcaatataaagaaggattgttattattatttttttgagagagggtcttgctctgtcacccagcctggagtgcagtggcgctatcctggctcaccacaacctctgcctcccaggttccagtgattctccttcctcagcctcccaagtagctgtgatttccatgtgataagaggcgtgtgccatcacgccaggctaattcttgtctttttagtagagacccggttttaccatgttggccaggctggtcttgaactcctgacttcaagtgatttgcccacttcagcctcccaaagtgttgggattataggcrtgagccaccatgcccggcctaagaagcatttcttacacagaacagtaatgataatggttattaattttggtaataatatcaagatataataaaattccaaacatctctaacacttaataagaagatgagtaatttttattagaagaaggttagaattattgatttcaattttagttcctgtttaatcaagtatatatgttagcaatttca

SEQ ID NO: 14527 - DNA, 594 bp, Homo sapiens
actgtggtgaacgtcttgtccacatgtccctgtcccagatccagtgtccagacgtcatgattccatgtgcgggctccgtggaggcgtggcccctgctccagatccatggctgccatggccttaagccgcggtgctgcggcttcctgcccttgtgggcgccctgcacactcacactcagactcacactcacacccacaccacaccctccatgcctcctgggcgccacctgtccccacagmcccccggcctctcagagccaccctgtccatgtgccccacagcggcgtggcatgaaagggaaggcccggaagctgttctacaaggccatcgtgcggggcgaggagaccctgcgtgtcggggactgtgccgtcttcctgtcagctgggcggcccaacctcccctacatcggccgcatcgagagcatgtgggagtcgtggggcagcaacatggtggtcaaggtcaagtggttctaccaccctgaggagaccaagctgggcaagaggcagtgcgacggcaaggtgaggcccggacaggtgtggggcccagcccccctcggggccccagggaggggacacgacagcagccagcactgtgc

SEQ ID NO: 14528 - DNA, 594 bp, Homo sapiens
actgtggtgaacgtcttgtccacatgtccctgtcccagatccagtgtccagacgtcatgattccatgtgcgggctccgtggaggcgtggcccctgctccagatccatggctgccatggccttaagccgcggtgctgcggcttcctgcccttgtgggcgccctgcacactcacactcagactcacactcacacccacaccacaccctccatgcctcctgggcgccacctgtccccacagacccccggcctctcagagccaccctgyccatgtgccccacagcggcgtggcatgaaagggaaggcccggaagctgttctacaaggccatcgtgcggggcgaggagaccctgcgtgtcggggactgtgccgtcttcctgtcagctgggcggcccaacctcccctacatcggccgcatcgagagcatgtgggagtcgtggggcagcaacatggtggtcaaggtcaagtggttctaccaccctgaggagaccaagctgggcaagaggcagtgcgacggcaaggtgaggcccggacaggtgtggggcccagcccccctcggggccccagggaggggacacgacagcagccagcactgtgc

SEQ ID NO: 14529 - DNA, 522 bp, Homo sapiens
ctagcatcttctgataattcctaaagttttttgcacttttggaattagctatccatggaaatttatccctacgtgtcccatgatctaggataagggttggcagcctatagtgttggtggtggcattcaaaccagctggcactagtgtataatctggcataaactaatatattcactctcatgtcctgattttccaagactcagaatgtgaactaacaatcttacttctctcaattagaacctcccaaatctcccctgattcatcttgcccaagactgtctttcacatttggtatcacctccacccaccagcacatayagttacaggattctttccacataagtcatgtgtattctaatgtgatattttggagaaaatggccccatgctttgttgtgtaaaccaaaggggtgactccagagatgcccatttcaatccaggttgtggaaaagaggcaccaagttttatttgtatatcttaatgtatctgcagttattggcttgtcagctgcagtatagtcagac

SEQ ID NO: 14530 - DNA, 521 bp, Homo sapiens
aatttatggaaccgaaacacctgagaaatgttttagctgtatagtcagctcatgagtaactacgagttgtccttttctttctccttttctgtttccttttcttccttattcctacctctcttttttcatytctatcttcctccctccacccctaaacacatacctgttgcatgttgctgagattctgagaagcggtcagtgaatatgacagacacggtgcctgttatcatggagctcacagtccgggaaaaagacaacagaaaattacctacaaaagtaattgttcaagaatattctgataagtgtaataaaggaagaatgtaggctgataaagaaacaagcaaaaaactgtgatgacggggaaacttgactctgcctggaaggtaaaacaagaaataataatggataccaataggtggatctttggtttacccttaattaatgaatgggcttttcttcttcctacacaacaggccaggcgaagtgtgctgtgcaaccacacggcactactgatgtttctt

SEQ ID NO: 14531 - DNA, 521 bp, Homo sapiens
aatttatggaaccgaaacacctgagaaatgttttagctgtatagtcagctcatgagtaactacgagttgtccttttctttctccttttctgtttccttttcttccttattcctacctctcttttttcatctctatcttcctccctccacccctaaacacatacctgttgcatgttgctgagattctgagaagcggtcagtgaatatgacagacacggtgcctgttatcatggagctcacagtccgggaaaaagacaacagaaaattacctacaaaagtaattgttcaagaatattctgataagtgtaataaaggaagaatgtaggmtgataaagaaacaagcaaaaaactgtgatgacggggaaacttgactctgcctggaaggtaaaacaagaaataataatggataccaataggtggatctttggtttacccttaattaatgaatgggcttttcttcttcctacacaacaggccaggcgaagtgtgctgtgcaaccacacggcactactgatgtttctt

SEQ ID NO: 14532 - DNA, 534 bp, Homo sapiens
caaggctaataactacaacccttcatcatatgcagtaaaatgaattcatggttgaataatttgatccaaaaatctgaataaagtcttaactgtctctcaattgcaagtttgctatttaatttaattgtttcactttggcttattctgtttattcattaggactttctttcctgatttcatatggcaattactaattatatctaacctgttgacttctagtattaaattctttattagttctagttttcttctaagctggggcatcattaattctcttatattctgtatgctgtttttttgtgagttttctttataagcatcaccagaaaacatgaataattatgattcccatgatttccattggtgtgtttaaagcaaaatctactcaatagagagactaggctgaggaaaatataatatatataattgttttgtaacaatttggcaagtttattatctacctttgttrcttctaaaaatacgttgtaagtataagagttctgtatctgtccatgtagttcacaactatggttg

SEQ ID NO: 14533 - DNA, 618 bp, Homo sapiens
ttgtttcttaatttaaaattataggttaatgtgtaggagtcactataaatacgcaagtacaggcatatgcctaagatagtttctatttgagtttaaatttccgagagctgtttgaatcattttggctgcaaccccaagcacaggagtaggacaaggagaagcagcaagagctccacacgctatttattgacctttgcaagagcagtgacaccatcaggtgaactgagatctggcagcttctaagcatgtttccatcacagaattacaccaagattgtaaggtttcattaagacgggtttgacagctgtcttaactacaggaatccttctatcaccttcgtctttcatgtttgagcctcattcctctcctcacccttccatggrtctttagcttggaatttaagactttgaactaataatgttcattttatttcccccgtcgtatatcttctaactatagaacaagaaactgctattagagcagtcatctcctgagtctccaaatattgtatcaaaaatcttgacaccaagtacttttcctcctttcctcagtaatattccaacacttttccaaagtccagaagtaaactacctgtttgactttcattgtgattttgat

SEQ ID NO: 14534 - DNA, 654 bp, Homo sapiens
tttcattccagttactcattagcacattcacagttgtcctctctataatctcttagtattagacctttaactcttcacttctctctcataaagcagtgtcttttaagcccacaaatataatttctacatataattaaagatctgcaattttaattttagctgaactttcttccccaagcttcagattcatatttccaatgtcctcttgatctcacaacttgagtccctcaaaatgtctccaaagtaaacagtcaagaatagagattatgatccgtccactttcttttccagaaccaattcttttccaatatttcttgtcacaataaaaggcacatgctcttagatgaaccaggaaccaaagagttatcattaacttttccttcactcccycacatctaatctataacattttccattaattatattttctaattacatgttgaatccatctaattgtttccatccctgatattaaactcaaatcaattataccttatatgtgcaatatttcagtagcctcacaatcattttaaccttgcgtctgctcatgtcctattttcacttagatagaatgctgttcttacaaaggcacctgcaatcatttaaagttgctacttatagtagtgcagattgttttctgaatgacttttgaag

SEQ ID NO: 14535 - DNA, 549 bp, Homo sapiens
ggtctttcttgacctccctactgagaatgccacccctcctgcctcctaggatgtttctccagcattatgtttgagctgtgatttcctcttgttttgttttctatatatataatcctattttctttgagaaattatccaacattttctaacctgtataaagtaattttatttgttttccacaccaagttgaatatatccattttcaaagtccttcaaactttttttaaagagtccaacatttaatgaccaataaaataagttttagaatattttraaatgattaggagctacgttatgtataatttccacaatctcattaaaaaatatttttttccattaagggggtatataaaaataaggacagatgatttaaaacaagacaattcaaatgaccagtgaataatgaaaaggttctctaagtaaaaatcagtagattgtaaattaaacaaacaataagatatcctttttcacccaatattttaataaaattaaacagatgatacatcaagtgttttagagaatgaaaagtaaaagaaattttttatacca

SEQ ID NO: 14536 - DNA, 786 bp, Homo sapiens
ccaggctggtctcaaactcctgacctcaggtgatctatccccctcaacctctcaaagtgctggggttacaggcgtgagttactgcgcccagaagtctagattcttttatcatttttagaacctgcacaatggagcatcataaaatttgctaaattatatttatagaattactgtgatattaaatgagcaaatatattcatttcgccaaatagatatatacatacatatgtgtgcatgtatgtgtgtatacatatatatacatatggagagagaggaaatataagtagatgatggatgagtggacagataaattgtagataatattttaacttgtcactttaaaaagcagacatcattctgccattattggcacattcagctaaagggaaaagcactggcttccctggcacgtctcttggagcttagaggggtttctctggcaagacaccaactcccttgtgaggagctggctgcagctctgagagaaggaaacaggctcttgttacagtaaatgtcagccccagtgggaaaaccttactagctggctgtgttctgggaacaaatatrtttttagtggttcattgcctggaaagctcaacttgggtaaccccaaaacctttgagtgtgtttaccagggagaataaacatcacctttctcattctgggcactgcaaatggaaatcaattgaacgtgttctgtcttctcactttaggactgactagaaacttctaaacatccagtgcttgtgctgaaatcacctctataaatgttggtttgtattcttg

SEQ ID NO: 14537 - DNA, 644 bp, Homo sapiens
tgtttagcagcatttacctatgcaaaatttaaatatttgttattttaaggctttatataaaataacaaaattagtgtaatttttgttttaagattttataaatttagtatagttaaaaccaaaaaaattcatacaactggaaatgccgactaggctttcaatgtgaagattaataaaaaagttcaaagtgtaaagaatgcacttaatcacgcctgtaatcccagcactttgggaggccgaggctggtggatcaagaggtcaggagactgacaccatcctggctaacacaktgaaaccccgcctctactaaaaatacaaaaaattagccgggcctggtggcacgcgcctctcccagctactggggaggctgaggcaggagaatcactcaaacctgggaagcagaggttgcagtgagctgagattgtgccactgcagtccagcctgggcgacagaatgagactctgtctcaaaaataaaaataaaaaataaaaataaaaaaaaagaatgcacttaaaagaaaggtttaatcaattatttcctttctatagttcaggtcttcaggacctgtacacactccccaaattataatttgtttgattgactttttatacccataatttgtagggaaaagagagatcagactg

SEQ ID NO: 14538 - DNA, 609 bp, Homo sapiens
ctcttcctttgactagttctgatttgtatccatttgctgtaataaaactttaataaaaagtatagtgctttcctgagttctgcaggtcattctaagcttgtaatcaaaccatgggaaccccagatttatagccagttggttagaagtgagtgtggccttggggactctgcaaattgtgatgtgtataatatttgaagtattgggcagtttctggcagtctggaaaattgtgtccttaaattgggtttggttaaatcccattactaccatttactgaaggtccactatatcctccagtcaatatacttaataatttaaaagtatatgttactgtggttgtcagycttcaagatggttcccaataatccttaccccctgatatttgctcatttctacgagtaaattggggctgatctattattcattaagaatgaccttcataatcagtagataatggcagaagtaacgatgtgtgacttctgaggtttctgctttctctttgatatcttgacgtacttgttcagggagagccagctatcatggtgtggggacacttatatagctctatggagaggctcaagggctcacatggaaaagagctatagctgtt

SEQ ID NO: 14539 - DNA, 552 bp, Homo sapiens
taaagtgcttagaaaagagaagggactctatttttaacttttttggggggtaaagtattttgggagtgatatatgtcattttaggaagtttaacttcaagagaacgttgcaatacactgaataggacccaactttaaacatattgttgctactgatagtattgcatgtaggcttttccgtatctgacagctatctaatactgttactgcaggatttttcckctttcacattgatttcagcagctgaaaacagcagtatgccgttttagcatacagtatgagaaacctgttgatttttgaagcaactagggctgctgctgctttataaaacgtgttcgttgatcacatttcccaaattatacttttatttttcttttaacaggaaggagtcaagactgagaacaacgatcatattaatttgaaggtggcggggcaggatggttctgtggtgcagtttaagattaagaggcatacaccacttagtaaactaatgaaagcctattgtgaacgacaggtgaggaattcatatgtgtacttccactgaataaaacta

SEQ ID NO: 14540 - DNA, 918 bp, Homo sapiens
cagccctggcctcccaaagtgctgggattacaggcgggagccaccgcaccccgcctaggttcctctttagaagaaaaagaaggtgtctgtcttcaatcttgaaagagaattaacaggtccttcaaaatctggagcttgaaaggaggggagttaaatgtaatcaagggtagccatttggaaagaaatgtctggcaatcctgcattactgtatggtagcctaccagctatcacattccaaatgccaagtctctcccaccaattgtctgaaatttcctcaggcattagcgtagctctgttactaattcctatcaggtgcttaaagttctcacataacaccaaaagtctacagggtacaaaaattgaatggtctgagaagcaatccccatcccccagggctattattttgggaacagtcatacaccttgtgacagaagaaaaactggcccactcactttcactttttgcacggggaaaagcatcttctgagtacagagtaaaatgtggatccccccaacccccgaagcaactggtattcaccatacgttatcttcttcccaagtctattagacttccaacagcatttctacttccaagaacactcctgcccacttttcacttgtattaatttctctagaatctcactttcttccamcttgatagacctttttatggcaaatccacagggagctctttgcctactcacgggcacaaaaagccctagtttctgcaatggtcagttccatgtctatctcctccagctctctgggcagctcagaaagcagagctcacccgcccacaggaacgggaaggaacctctggggataattctgggtgacttgatctttccatctgcctactgcctccccagcagatgcacacagcctcccacccactcaacatttccttcacctggcatag

SEQ ID NO: 14541 - DNA, 540 bp, Homo sapiens
gtgaacaaaatggatattaaataattacaatcatgtttgagactggcccttacagtatattactaatctgagacttgatggaagacttaataggaattaaccaggcaaagggtgtatatgtgtggatggtgctgtagggaggcaggcaaggaaagctagagagactgacctgtgtctacgttcaggcagaagactgcataaggcccagagggaagaaagagcacagagacaaaggatgaggccagccccagctgaacatgttacttgtgttcacaagtgtattgtcgctacaataggaaaagcaatcgaagagttgttagcaagggaaaggcaggatcgcatctgtatttcaaaaatatatttttctggaatacgctcaaaagacagaagggagcaagcttagagacagatgagtcagaaagctgttagagaagtcaggtgagaaatgatggcagtgtgaactcagctgctgaaagcagagctcaagaaaagaaaccgagagtccaaaaatwtttaacattaacaggatattgggcattg

SEQ ID NO: 14542 - DNA, 324 bp, Homo sapiens
aaawaaagaatttaaatataccttctttaaatacctcgaaaaacatcttcccataggctgaaaattgcctaatatattttttgattttttaaaaaaaaattattctcaaaaatatctattgagggctttccgtgtatcagacactcttctggatgctgagaagacttcagaatacaatgcatccaaagaccatggcttcatggagtttagattgtagaatagcttgacaagcagtaaacataacaaatgaataaataaattatatagtatgttagaagatagtaattactatgggaaaacaaatatagagaaaagttaggaaaa

SEQ ID NO: 14543 - DNA, 558 bp, Homo sapiens
agtcactgaagaacagggatttggagcagctcagagttaaaaagtgattggaggagaaacagaaaaaattatattcagctccaagaggaatccagggaacacactggtggaagttagatcttcagtgtgttagaccagggattcaggacctgggagtgaatctataagttttctcggtatactgaacaagactgagagaccagaacttctctagtataaaacagagaaagaaattagaatacacaggacagtaggaatgttggaatagacctacctctcagggagtttgragaaaactgtctttaccaaggcattatgaaaaattctcatgaagggaataccagcatccttcgtaaacctctattgtagttggttgtcttctgtagttgcttcagtctaggtataaatggggcttgcctttcatcattacaaatttgagttccatattttactgagaataatatgatcgttaagtggcaaatgccagacagaggcacttaattattcctggcaaggtggctgccattactgcaataatccacaaggacagagtagtaa

SEQ ID NO: 14544 - DNA, 1272 bp, Homo sapiens
gatgggtggatcacttgaggtcaggagtttgagaccagcctgatcaacatggtgaaactctgattctactaaaaatacacaattagccgggcgtggtggtgcatgcctgtaatcccaggtactcaggaggctgaggcaggagaatcgcttaaacccgggaggtggaggttgcagtgagccgagatcgcgcgccattgcagtccagcctgggcaacaagagtgaaactccgtctcaaaaaaaaaaaaaaaaaaaaaagaaagaagaagaaaaagaaaacaaatgtatgtcaggtttcccccttcactttttaatcagttctagaccattttatakattagcagctttcaaaatgtagactgtgcactatggtagttttgtaagttgctctgatatataaaatagaatgtgcttttgtttaagagagattcctagctaacacaggtagaaaagaacagttgctcagagtaagacataatttcttggcaaaagattagaaaagggaattcgctgaaaatgaaataaatgactagtaaacattcgaagagatgctcaatggtaatctaaaaaatgcaaattaaagtcacaatggaattaccatttcatatccaaaaattaaaatgtctgataataccaagtgttggtgaaaatgtagaacaacacttcatatattgccagcagaagtgtaaaaattggtataacattttggagagcaatgtggacattaaaaagctaaagatatactgtacatactcttgtactcaaaaattcgtccccttggtatatttccctcttccttccatggaaactcccaaggaagcttcctttctttgttccgtgaaagggccatatgtgcaaagtggcccccaaatgctgaaggagctgagaaggcaaagaaggaggcagacaaatccagtttgtcagttttgagtgatttattaggggaatgtacagacagaaatatggttctgggcagctgcatgacaggtagatctctgcatcgaaaccttccagacccagggcttatatcttagggaaagtatatgtgatctggaaggagtatgtaggtggctgtggacatcacagcctatgatttctgcaattgcatcaagtgtggtttaggaggaaacttacagtgaatagaagttcttacataaagactaatacatcatttagacattctggaggcattcccagactcggggttagtcagaagttacgtggcagattagcatttaaaataaagtcactcttgtccccacacttgttattag

SEQ ID NO: 14545 - DNA, 526 bp, Homo sapiens
tcaacaaagcgagagcttatgtaagaggaaaccactacaaaatatgagattttcagtgtgacaatcattgctacttttaactagaaattacccagtaaatgtattgtgaactgctttgtgactattgtgctttatttagtctttctaatccttggtttgattatctcaaaaatatgagatctccaattttataaaattgccctaaatattaaatgaaagrtaatcctccttctccacatattgaacatttacaaaattgtagacattgtgtccagatttttacacacttgccttatagaagcctcataacaaacctctcttttaaattacaagcattttgccatggttttacacactaaccttatggaagccttataacagtcacatcttctatagatgagcaaactgaggctcagatgagttaaaaacacattcaccatcacatcataaagagtgatggaactggtattcaaattcagttttctctgaggccaaaaatagtgcagtttaaggaggaccaagttat

SEQ ID NO: 14546 - DNA, 687 bp, Homo sapiens
catcaagcatggtcttcatttattgacaacttgtctttgggtttttatcttttctctagttagtacttttgatacccctacctctaagatccactttcttttttctttttccttttccctggtgtcctggtgcttgaggatagaactggcagacgggaagctgcatggctccaaagacatgccaagggggccagagctcttccctttgcctctgtacataacagggagtgggactacaagttcctgccaagaaaatgaggatccacttttttttttttctcaaatgaattttagcatttgtttacgttggaatcagttgagttttcaaactgctggtatcttttttttttttttttttttttttgaracggagtctcgctctgttgcccaggctggagtgcagtggcgtgatcttggctcactgcaagctctgcctcccaggttcatgccattctcctgcctcagcctcccgagtagctgggactacaggcgtccgccaaccacgcccagctaattttttgtatttttagtagagacggggtttcactgtgttagccaggatagtctcgatctcctgacctcgtgatccgcccacctcggcgtcccaaagtgctgggattacaggcgtgagccactgcacccggcctcaaactgctggtatcttaatgtttattagactggctttga

SEQ ID NO: 14547 - DNA, 687 bp, Homo sapiens
catcaagcatggtcttcatttattgacaacttgtctttgggtttttatcttttctctagttagtacttttgatacccctacctctaagatccactttcttttttctttttccttttccctggtgtcctggtgcttgaggatagaactggcagacgggaagctgcatggctccaaagacatgccaagggggccagagctcttccctttgcctctgtacataacagggagtgggactacaagttcctgccaagaaaatgaggatccacttttttttttttctcaaatgaattttagcatttgtttacgttggaatcagttgagttttcaaactgctggtatcttttttttttttttttttttttttgagacggagtctcgctctgttgcccargctggagtgcagtggcgtgatcttggctcactgcaagctctgcctcccaggttcatgccattctcctgcctcagcctcccgagtagctgggactacaggcgtccgccaaccacgcccagctaattttttgtatttttagtagagacggggtttcactgtgttagccaggatagtctcgatctcctgacctcgtgatccgcccacctcggcgtcccaaagtgctgggattacaggcgtgagccactgcacccggcctcaaactgctggtatcttaatgtttattagactggctttga

SEQ ID NO: 14548 - DNA, 687 bp, Homo sapiens
catcaagcatggtcttcatttattgacaacttgtctttgggtttttatcttttctctagttagtacttttgatacccctacctctaagatccactttcttttttctttttccttttccctggtgtcctggtgcttgaggatagaactggcagacgggaagctgcatggctccaaagacatgccaagggggccagagctcttccctttgcctctgtacataacagggagtgggactacaagttcctgccaagaaaatgaggatccacttttttttttttctcaaatgaattttagcatttgtttacgttggaatcagttgagttttcaaactgctggtatcttttttttttttttttttttttttgagacggagtctcgctctgttgcccaggctggagtgcagtggcgtgatcttggctcactgcaagctctgcctcccargttcatgccattctcctgcctcagcctcccgagtagctgggactacaggcgtccgccaaccacgcccagctaattttttgtatttttagtagagacggggtttcactgtgttagccaggatagtctcgatctcctgacctcgtgatccgcccacctcggcgtcccaaagtgctgggattacaggcgtgagccactgcacccggcctcaaactgctggtatcttaatgtttattagactggctttga

SEQ ID NO: 14549 - DNA, 687 bp, Homo sapiens
catcaagcatggtcttcatttattgacaacttgtctttgggtttttatcttttctctagttagtacttttgatacccctacctctaagatccactttcttttttctttttccttttccctggtgtcctggtgcttgaggatagaactggcagacgggaagctgcatggctccaaagacatgccaagggggccagagctcttccctttgcctctgtacataacagggagtgggactacaagttcctgccaagaaaatgaggatccacttttttttttttctcaaatgaattttagcatttgtttacgttggaatcagttgagttttcaaactgctggtatcttttttttttttttttttttttttgagacggagtctcgctctgttgcccaggctggagtgcagtggcgtgatcttggctcactgcaagctctgcctcccaggttcatgccattctcctgcctcagcctcccgagtagctgggactacaggcgtccgccaaccacgcccarctaattttttgtatttttagtagagacggggtttcactgtgttagccaggatagtctcgatctcctgacctcgtgatccgcccacctcggcgtcccaaagtgctgggattacaggcgtgagccactgcacccggcctcaaactgctggtatcttaatgtttattagactggctttga

SEQ ID NO: 14550 - DNA, 753 bp, Homo sapiens
tttaattttttagagatggggtcttgctatattgcccaggctggtcccgaattcctgggctcaagtcatcctcccgcctcaacctcccaaagtgctgggattataggcatgagctgcagagcccggccagtcttaaccacttttaagtgtatagttcagtagtgttacatatattcacattgttgtgcaactggtctccagaaccttcatcttacaaaactgcaactgtatacccattaaacaactttccactttccactcctggaaaccaccactctagtttctgtttctatgagtttgacaactctaggcatctcatattagtggaaccatacaataaagctttgttttaacttttcaccctgagcctggcttagaccaagactatggctaaaataattttactgcatatagcttagagctgaatgagccatcctgtaagttatagcagaagacacaagaggtcaagactgtaggtgaaaactaaatgtgatgatcaggtggcccatagtaaccatgccttagatgtgctattaacatcttcttgaatctttgacctacrtttgcaataggaaaaggaggtctaggataagcagaaacttcagctagaaagcttgatggcctcacccaacatccatgcccctaccccaaatggaagagttgggcagaagcactggtcccagagtgtgcagagttaagtacttattgagtgcctagggtacactgggttctttttcatataagccatctgct

SEQ ID NO: 14551 - DNA, 550 bp, Homo sapiens
aagtgctaatcacagcaaccaactagtacagcttcacagaaggcttaaaattttagtaagtgcttttactcaacaayaatgtacaccagagaaaagaaagtccttagtggtccttctatgcaaaacccatatctgaagtaggaacttattttagagttactcagaagagatttgagcttaataaatattgtcacaactgatttattctacttagctaattcatgtcactaaattattgatatagaaaagtcttactaatgagtaaaaacattatctctgaattattgtgtattttaaccccaaatgttatcactatctcaaaatataactgaaatataagtttcagtttccttgtactatttcagtttcctatttattaatgagctgcaggacatttttaaatttgagaatgcttagcttgcgataatatgaaaaatatgacatataatatgcaaatccagacaaacatgcacaaaatgtgctcgataatttcattcaaaagaaactagagataaaatataatagcttatttctcaaaagaacaattaga

SEQ ID NO: 14552 - DNA, 501 bp, Homo sapiens
tattaatctgagccagatatgtatgccctatgcaagaaaaggatctggagaatgctagagaccctaggagaccctagacaggtctcagaggtctrtctctgcttcatgagacacttttagttgtctacattcttgaaattgttaataaacattgaaactggctgagcttatacgatgtgaatataattcaacaattccatgttatgtcacctcaccaagcactttaaacagtgcctgaaatattatgatttatgaatattaggtgtatgaataaataactagattgtcctcacagtactctcacaaaaatattgagtttttgaattttaatatcattaggtaaccacttttgtttaaaatgataaatattgtagatgtagaactgtatttaataaaacgagagagcagagctctttctttttatagagatttactactgttttttgtttcaatttcatttagttctgctctgatcctgtcatttgttttcttctgctgggt

SEQ ID NO: 14553 - DNA, 563 bp, Homo sapiens
tcaacaacatttctagttgttagaattgcaagtttgtaacatcacaggcaagggtaaataaacattcactgttctttgcttaagccatggtcccttcccacgcaccctccctccttcattgggagcagagttcctttatgccaagtagcccaggagcctctgaagctcctcsgtgttggggactttgtctttcacatctctgagtcctcctaccacagagctctgagtaaattggatttgggaccttatctttattcccaatgctaaacagggaaaagaccaggctagactgttccccatttctcctctctgtcccctcaaggtctgtggagctctctgaccccatttccttggaagattgaggctgaataataataaaaaccaacatctgtgtcacagcttaaattttacagagtctttacccttccatggactcaattaatccttacaaccatatcagtagctactgctgctgctgctgcaattattatgaacccatttcacaaatgaggaaccatggctctgagcagctaaccagcctaaggcctaacttggaagcagca

SEQ ID NO: 14554 - DNA, 1116 bp, Homo sapiens
catttagttttacattggtttggaaatcatattctgtttctggcctctaattgcttatccctaagttagcttcaattatatataataaaaaacaaatagtagcttaaacaagacaggagggtgtttctcactcatgttaaagcagacaggaagtagggtgtccagactgatctggcagctgcttaagggacattcaagctccagccagcaggaaaggaggaaagggtgtggaaatgcttgcctcttcttttaaggacagaatttctaggaaccggcacacattgtrtctgttcacatggcgctggccaaaactgacccccagggaggctgggagtgctgttgctctgctaggtgacagtgtttcctgctaaaatcagaactcttaccacaatgaagaaagggagaatggataccagggggcaactagcagtccttaccgcagccccttttcccccagacttcagggttttagagtttctgatcactcccttcttacatgttatcacagtccagaatttcattgtccccttgtttttagatcttaaaaatcattactgcagttgtggctttatatatagttactgcttgttcagatttatccacatgcttgccagttactcctcattgtgattgtattccttcggaggtttcttttcctttctgaagtacatcaagagttgtgtcagtatggtctgtgaatggtaaaacagtctgagtttttgttctaggattggcttccctttgccctaactcttgattgtgagtttaattggatttagaagcttaagtggataatttctcccgagtaccttggagatattctgttgccctctaacttctactgttggtggtaagaatctcctgactgccaaattgctaccctttctaggcaacatgtgtttctctttggtgcttgcattttcactatagtttttctaggtatagattttatatttattttacttggaaatcactggttttttttaaatttgagaattcacatctttcattggttctttttttttgagacagagtctcaccctgtggcccaggctggagtgcagtggcgtgatctcggctcactgcaacctctgcctcctgggttcaagcagttct

SEQ ID NO: 14555 - DNA, 556 bp, Homo sapiens
attgtatagccttgaacccgattgtgaatacaatgtagcaacttcgctggcgcctgccccgcactccccgtcccgtccacttctgaaactcctgttcctaatgacaaagtggctatgtgcaatggatataaatgtactgtgagtctctcggttcagtattaggttcactttaatttatttatgctgtaagttatttttgcttccttctcctggacccacttccagtcccgttttgcattcccctttggattttgctttggctattttttgttgtaacctcttgatgtaacagcactttaaaagggcgacaactgactcacgagatggcaaccacctggagcctgtttggggagaccaccctgtacccgtgactttcgtttttaataataataataataataataaaagatgtcacttctggggctacggaggtgggagtgcaccggcggagcggggcggcggaacaccgtgcaacaggtgggggtgggagsggccccgcgggttctggggctcccagggtcagaatcgggcctgctcaagtgggcagcagcgagca

SEQ ID NO: 14556 - DNA, 556 bp, Homo sapiens
attgtatagccttgaacccgattgtgaatacaatgtagcaacttcgctggcgcctgccccgcactccccgtcccgtccacttctgaaactcctgttcctaatgacaaagtggctatgtgcaatggatataaatgtactgtgagtctctcggttcagtattaggttcactttaatttatttatgctgtaagttatttttgcttccttctcctggacccacttccagtcccgttttgcattcccctttggattttgctttggctattttttgttgtaacctcttgatgtaacagcactttaaaagggcgacaactgactcacgagatggcaaccacctggagcctgtttggggagaccaccctgtacccgtgactttcgtttttaataataataataataataataaaagatgtcacttctggggctacggaggtgggagtgcaccggcggagcggggcggcggaacaccgtgcaacaggtgggggtgggaggsgccccgcgggttctggggctcccagggtcagaatcgggcctgctcaagtgggcagcagcgagca

SEQ ID NO: 14557 - DNA, 520 bp, Homo sapiens
tttattaaataaatatttattgaatacattctttgtgccaaacattatccttggctgtagggatagcctaggcagagaaaacggccaatactctttcttccttcaaggactcacattcaaaaggcaaaagaaacatcaaaaatttaaatacataaatgttgggggacttcagggaaacaccaacaaatagattcacatttccctgcccaagttccgaaccaattaggaattaagacaaaagagtcatcataggagaccaaaatattaccctcataactgacaaggctgatatggagaatctggcaatctggatttaggtgtgggagccatgtgagctttcaactcccagttcccctaaattgggtagactcatcaacccagtcgtagaagattccaaatcacygcaggcagttatccccacatgacatagatacaagttctctcctacttatatatatgactgaaaacaattgggaacaagtgttctctgcaggcaggcagatcctgaaagagaaggcag

SEQ ID NO: 14558 - DNA, 527 bp, Homo sapiens
ccacagtgtctggaggctgagcaatcaatgctgttcttagcataattttagatatttggctagacatttattgagttctgactgtatgccagcaatcagagaaacaatgacaaaacagacaaaattcctgccctaatgaatagtgataataataatttaattttaaaagagaaaaactaatggaatcaaggctcgaggtagacaccttgagcagcaagaggtcctggagggaagaagacaaatctggggggtggcttgccctttcctcaaatacgatgcttgcttatctccttagggagcacaaagatctttccttctttaactttctttaaatagcctccagtggactcttccacatcacagtttctatcaaatatatttgagttwagaaattctctaactgatggtaagatataaataatattaatggtattggaatttaaaagtacaaggtagaaagaagacccatttttccttaaatatcctgatatgctttgaatttttatcatatgtgtatactattttta

SEQ ID NO: 14559 - DNA, 527 bp, Homo sapiens
ccacagtgtctggaggctgagcaatcaatgctgttcttagcataattttagatatttggctagacatttattgagttctgactgtatgccagcaatcagagaaacaatgacaaaacagacaaaattcctgccctaatgaatagtgataataataatttaattttaaaagagaaaaactaatggaatcaaggctcgaggtagacaccttgagcagcaagaggtcctggagggaagaagacaaatctggggggtggcttgccctttcctcaaatacgatgcttgcttatctccttagggagcacaaagatctttccttctttaactttctttaaatagcctccagtggactcttccacatcacagtttctatcaaatatatttgagttaagaaattctctaactgatggtaagatataartaatattaatggtattggaatttaaaagtacaaggtagaaagaagacccatttttccttaaatatcctgatatgctttgaatttttatcatatgtgtatactattttta

SEQ ID NO: 14560 - DNA, 662 bp, Homo sapiens
atgcataaggtaagggccaagcagaacgagtggcaaggactgagattcccaaccctggaaggattgaaactaattttgattgaccccttgtagtatacattgcagtgggtattcaaacatgaacaaagactagaatatagattgcttaaagtctctttgagatkataggaaaagagtgaaatctgtgtcactgtaagtagcagacacatttggttggctggttctatgatttaaggaaatgaagccccaaacctctgggctggtatgagcacttcagctcacataggccccactgttccctgatattttaaccctgtcttatttacatatatatgtatattatcttctatgcgacgataagtatttatatttctgttccttcttggagaagttttcataggtctataaacaataaaacataaaattgagagcaagatatttcgtctattttgtttactgctttatcttcggcatggaaaacaatgtcttgaatatagtgacacctcaaatcttgttaacttgtcaaataataaatataatacccgttttctattctaaatccttgcagaaagactatattaactattattttttcacaataatcttgatatattttcttacagaacttactccacttagcagtcaggaaaaattaaaaataa

SEQ ID NO: 14561 - DNA, 662 bp, Homo sapiens
atgcataaggtaagggccaagcagaacgagtggcaaggactgagattcccaaccctggaaggattgaaactaattttgattgaccccttgtagtatacattgcagtgggtattcaaacatgaacaaagactagaatatagattgcttaaagtctctttgagatgataggaaaagagtgaaatctgtgtcactgtaagtagcagacacatttggttggctggttctatgatttaaggaaatgaagccccaaacctctgggctggtatgagcacttcagctcacataggccccactrttccctgatattttaaccctgtcttatttacatatatatgtatattatcttctatgcgacgataagtatttatatttctgttccttcttggagaagttttcataggtctataaacaataaaacataaaattgagagcaagatatttcgtctattttgtttactgctttatcttcggcatggaaaacaatgtcttgaatatagtgacacctcaaatcttgttaacttgtcaaataataaatataatacccgttttctattctaaatccttgcagaaagactatattaactattattttttcacaataatcttgatatattttcttacagaacttactccacttagcagtcaggaaaaattaaaaataa

SEQ ID NO: 14562 - DNA, 526 bp, Homo sapiens
aggggaagagttgtccctgcttacctcccccttacccctctctctctccttcaagagggcttgctttctgccctctcctaggcagccatggaacaggagacatccctctcctgggacatcaaattctccaactacaccctcagctgcagaaggcaaggtcacgatttggaattcatgtctccttccctgccgcccatgcccacaacagggatgggcacacagaggatgctcagaagaatgagtacgtgcttgcctttggcttgtattcttcttgccgagtcgaacagggtggtcaaccctgaaggccacctggctgaaactgaacgtggtggcctgggtgggttttatgggcagragacctgcaactgtcctggacacagccatttcctggcagcgtgacctttgaccagtcactaaacctctctgaacatctgtttgtactcaaggcaaatggaggtgcctatgtctgccttccaacttgttagaagcttaaccctgggtgcaagcctttgagtaagaggccaca

SEQ ID NO: 14563 - DNA, 516 bp, Homo sapiens
tggattcccatgaggatcgtcctctgtgaactgtgaaacatttagtgtgtaagacgttgagccagccccaggaaaccctaggccgatgaggaacatggaagtcagcaaaagaagaggcaagtgcggtggccacatcccacccagcatcaacccatcacacttccatttggctctaggtataaaagcccccaaattgggagtttgtcaggatggcctcagtttgcactccaaatgttccctgcaccttggagttttcccacctgaacaccgggccatgggtgtactggttgtgcaattaagggactgaggggatgcagctggaagcaccttcatctgtcttcaccttttttgcaggtagaggtgtgggacctcattcaccccacaacagattgtatcctctcccctatctgaccttattgctgctcacactttctgtmcctgaatgaaatccgaagatgatggaggagtgccccctcacgacgggaagtacctgctcggctgggaactgaattcgat

SEQ ID NO: 14564 - DNA, 1403 bp, Homo sapiens
ggtattaggaaacaattataatagtgttcagtatgcttggcaaagtatagccatgtgatataaaaggcctttgtcaaagctactactgacactggagttaagataggcattaatcagtagagttttctttttctttttttttttttgagatggagtcttgctcttgtcacccaggctggagtacaatggcacaatcttggctcactgcaatctctgcctcccaggttcaagtggttctcctgcctcagcctcctgagtagctgggattacaggaacccgccaccacgcctagctaaattttttttgtatttttaatagaaacggggttttgctattttgtccaggctggtctcgagctcctgacctcgtgatcctcccaccttggcctcccaaagtgctgggattacaggtgggagccacggcgcctggccttaatcagtagatttcaatggttctagagtctgtcactggtttgttgatccctggagggaataattgctattatggtctaggggttgtgggatgrcaggtttcctcttcctggaacatccttaccctaagaaggtcattaatttgatttccccaccccagcccctgcccccgttttgtccctgcaaatttgatccaggcttgggagagggctccagggttaaaaagctgcctagtggctggagggggaggctcaggcaggcagaaaccctgatcctttgagaggagcctctcagaggtcactgggctcgctaggctcccagtcatgcttgagggtggccagactttggaaaagacagttgcctggcccggctccaggtggccagcccgcagaggtcaggtgatcatccaccctcttgacgagtttcactcccccatctaggaaaggcctctctaggaagtcccagaggtgacgtctgtgtcagcagaacccaggttcaggctcctctccagggccagggctacccccacggcgtccagggttttatcccattcatctcatctgcaggtcctgcaaaagagcaggctgccacgctggctttgcatcttccagagatgcttggccagttcaccttccagagccatgtcatcgtggccaaagtagaagtccagagagatgccggttgacggggcagttggtggctgcctctgcctgggtggaatcattctaacacatctaggagctcatgcttggggacaagaagaagatatccacaaaaacggtgttggctgggcccagaagcaggaggttgccaagaagatggtctgggaggctcaagtgaaaaggagatgggaggcgatcacaggctggaagagggatccccctggtctgttcgttctaaacactgttgaagcaagagacagagccagaacccaacatgctaacttcaggcaatgtgctgtagatttcaaat

SEQ ID NO: 14565 - DNA, 623 bp, Homo sapiens
gtgattcagaatatgaatggtatttaatttctttgaaatcaataattgctgagtgacattaattaatgccaatatttcagaagttgttctagttagtgaaatgtatacaacatgcaaaagtttcagaactctgaagggcaacattattctatgattaagaattaagaattaattcacattaattattggggagaaataattattaagaatgacagaaatgtttttattttttayttagaaaattattttgtgcatgagcattactgcaagttttgcaagaaacataaatttaaagaaacaattatgtgcacaaggtgaatttaataacatctgatattttccatgattacagttttatttggtaaatctttaaatatacatcatctaaagataataaatgaatcttggaaatcttgtaggtaagggtaaatattaggatgcatccaattacatttacacacacatacaattacatttacacacacatacatgcacacacactcactgatacacgtgtgtatatgtatacatgaatttactaaatgattttaactaatatttataagagccagtaggattgatatatattgttgaacctgaaaaacatttattatatacatgtt

SEQ ID NO: 14566 - DNA, 623 bp, Homo sapiens
gtgattcagaatatgaatggtatttaatttctttgaaatcaataattgctgagtgacattaattaatgccaatatttcagaagttgttctagttagtgaaatgtatacaacatgcaaaagtttcagaactctgaagggcaacattattctatgattaagaattaagaattaattcacattaattattggggagaaataattattaagaatgacagaaatgtttttattttttatttagaaaattattttgtgcatgagcattactgcaagttttgcaagaaacataaatttaaagaaacaattatgtgcacaaggtgaatttaawaacatctgatattttccatgattacagttttatttggtaaatctttaaatatacatcatctaaagataataaatgaatcttggaaatcttgtaggtaagggtaaatattaggatgcatccaattacatttacacacacatacaattacatttacacacacatacatgcacacacactcactgatacacgtgtgtatatgtatacatgaatttactaaatgattttaactaatatttataagagccagtaggattgatatatattgttgaacctgaaaaacatttattatatacatgtt

SEQ ID NO: 14567 - DNA, 555 bp, Homo sapiens
gaaggcttcaggcagagggaccaggcatggaggaagggaggcacccgggctcccgagggggtcggccaggaggagcctgtaggccatggcggaatctggattttcagctgtggcagagctggttagttgtcccctactatccgttctcccctgtttccatgataagacggctgcaaagaagaaagactacatttcccagcrttccttgcagtaaagcatggccacgtgaccacattttggccactggggcaaaaggagaatgtcacctaccagtcccagcctcttgccagaagctagcgttgcttctcttcttttctgatttttcctccatctgatgcctctggctggcaagccaccctaagccgcctgatgaggggctccctggggatggccatggtgcgcagaaggggcctgcttcccagcgtcctgtgtagctcagctccaggctgcatcctcccggggagaattcaacacactctgcctggttgcaatttccattatttgggtttcctgtcactctcagcgggacctagttcaagctgataatagaattgc

SEQ ID NO: 14568 - DNA, 555 bp, Homo sapiens
gaaggcttcaggcagagggaccaggcatggaggaagggaggcacccgggctcccgagggggtcggccaggaggagcctgtaggccatggcggaatctggattttcagctgtggcagagctggttagttgtcccctactatccgttctcccctgtttccatgataagacggctgcaaagaagaaagactacatttcccagcattccttgcagtaaagcatggccacgtgaccacattttggccactggggcaaaaggagaatgtcacstaccagtcccagcctcttgccagaagctagcgttgcttctcttcttttctgatttttcctccatctgatgcctctggctggcaagccaccctaagccgcctgatgaggggctccctggggatggccatggtgcgcagaaggggcctgcttcccagcgtcctgtgtagctcagctccaggctgcatcctcccggggagaattcaacacactctgcctggttgcaatttccattatttgggtttcctgtcactctcagcgggacctagttcaagctgataatagaattgc

SEQ ID NO: 14569 - DNA, 555 bp, Homo sapiens
gaaggcttcaggcagagggaccaggcatggaggaagggaggcacccgggctcccgagggggtcggccaggaggagcctgtaggccatggcggaatctggattttcagctgtggcagagctggttagttgtcccctactatccgttctcccctgtttccatgataagacggctgcaaagaagaaagactacatttcccagcattccttgcagtaaagcatggccacgtgaccacattttggccactggggcaaaaggagaatgtcacctaccagtcccagcctcttgccagaagctagcgttgcttctcttcttttctgatttttcctccatctgatgyctctggctggcaagccaccctaagccgcctgatgaggggctccctggggatggccatggtgcgcagaaggggcctgcttcccagcgtcctgtgtagctcagctccaggctgcatcctcccggggagaattcaacacactctgcctggttgcaatttccattatttgggtttcctgtcactctcagcgggacctagttcaagctgataatagaattgc

SEQ ID NO: 14570 - DNA, 564 bp, Homo sapiens
gaatctactgtcaacaatgaggatttgtggatgtgggagcagttaacacactaatctggacatgatcatactttctactctgagcatgtagcgtatgactttcaattagtactttgctgccactgtcctgagagactgtacacttgtgcaactgtgagttttagaaaaatggtttgtctgatacctttgttcaaagaragcaattcaactactcaaaaaacttagcttttactgatagagatgtgagctggtatttaatgactctgtagcacaacagaacatgctaatctctttcttgtttccccaaggaaataaaaataacctctaaaattatcttcccgtagacatctcacaaaatgaaagtttctaagttctgtaatatttcattgttcctaaacagaatccttaaatggtttggatgtctttagatgtcttatctgtttttgatgaaagctctgacttgacaaacacccccaagatatattgctttatggcatttggccagataagacttaacaggtgtttttacaattttttcccctactcccactgtatctttaagga

SEQ ID NO: 14571 - DNA, 535 bp, Homo sapiens
caacataattttacccttttttgctgactctgaatcatcataatgaaatttattgcactatagwcctctggagtccctaaggaatggaggttaattgagccaacgcaaaagggccaagaaaactcacttcatagttcttgtatctgcgtttctcctctctcattctcagcagctgatctgcagcgcaatataccaggactgaaaggtgatctaaatcaaccaccaatctcacaacacaattcctagatcccaaacaatgtgcccatctaatgagatggtttggtctagtttagttcaccaaatcatcaaatatttataacgtgcctcctctgggatagtcagagtcctacattcaatgatgattaaggcatgattcctgcccttaatgaatatgactccaaccttggtagaaaacccaacgtgacccaatggtatgtggataagaaggccccacttcttacgacttcacttttgctattttgctcattcaggcccaatatttcactttcagggttccattcacacattcattgca

SEQ ID NO: 14572 - DNA, 535 bp, Homo sapiens
caacataattttacccttttttgctgactctgaatcatcataatgaaatttattgcactatagtcctctggagtccctaaggaatggaggttaattgagccaacgcaaaagggccaagaaaactcacttcatagttcttgtatctgcgtttctcctctctcattctcagcagctgatctgcagcgcaatataccaggactgaaaggtgatctaaatcaaccaccaatctcacaacacaattcctagatcccaaacaatgtgcccatctaatgagatggtttggtctagtttagttcaccaaatcatcaaatatttataacgtgcctcctctgggatagtcagagtcctacattcaatgatgattaaggcatgattcctgcccttaakgaatatgactccaaccttggtagaaaacccaacgtgacccaatggtatgtggataagaaggccccacttcttacgacttcacttttgctattttgctcattcaggcccaatatttcactttcagggttccattcacacattcattgca

SEQ ID NO: 14573 - DNA, 564 bp, Homo sapiens
tcacccgcctcggcctcccaaagtgctgggattacaggcatgagccactgcgcccaggcaggttctctttaagtctgttactcacacctaaattaacttgctgataaaagcatgaaaaagatgctattagagtgaaaatatctatataaccaaacatttgcaaattggagctagtggcctgctttatacaatatttgccacaacatttcagcacttctactttcagtttgctactttgatagtatttttgtgggcaacatctcatttaagtggctatttttcccctgatcatccttccacggcagtgtaactcaggaggaacacctgtgacacatatrtatcaggcaagaccactcctaaagaactcgtgggcttgcctactgtatatgcaccaagctgtcagggttgactgcccccaaaatgccactccattccagaggagatgaaaaggagcccaccaaaacataaacaaaaacccagaagctggtaaaaaaaagtcaggaagtaaataatgaaagaaaaacaggaaattgactactgaacactacataatcgatggctcct

SEQ ID NO: 14574 - DNA, 2005 bp, Homo sapiens
tgcaaatgacatggaacccgtgggtatatcaggtgatattctggggatacatgaggaaccaggaaggagactgagtatttggaaaaaataatacaaaacattgcattggcaaacatttactaaatgcaactatttgccaggtactgttttaagccttctacgtcgattgaatccccataactatcctatcaggtaggattattattgctcccattttacagatgaggaaactgaggcccaagccagatttcaaacctacgctgtctagctcctgggccctcactcaaggaaatgcaagaatgagcacaagttttcggttgaaacatttgtgtgcatgctttctgaggagagcagtgctgcatatgaattagtaataaactgtatagaatacagtttgtgtaggaatagcatattttcaaataactaaaattttaaagagatactaattgtgataactagatgggcctatccattgatctctaaggacctgagaatgtcttttcattcaaatttgcctttggaatcagcattctgatttgtgaacctatgggaaaaaatgtgttttggttcaaatatttattgagttttttttgagacagagttttgctctgtcrcccaggctggagtgcagtggtgtgatcttggcttactgcaacctccacctcctgggttcaggcgattctcatgcctcagactcccagtagctgggagtacatgcaggctaccacgcccagctaatttttgtgtttttagtagagatggggtttttgccatgttggccaggctgatcttgaactcctgacttcaagtgatccgcttgccttggcctcccaaggtgctgggattacaggcatgagccaccgcacctggccgaatgttgtcactttaaaagtcccactcactgtcttcaaggtgcagttcagtggcccttcctctgagaggctttgctgggcgcctccagctgagttggctgctgcctgcttctcaggtgtgttagaaagagcacaggagatctgactttaccacccgccaaccgtgtgaccaggacaggctctgggctcagttttcttctctgaataatgagaatcagaatacatgctgtagagagtggtaatgaagcttcaataacatttcatttgaaagtactttgtgaccatttgggttttctgcagaatgtaagatttgattaatctttacaacatttttcctgacttcttctctagcctttctgtcctcctctcttcattcattcaaccaggtttttcctgagcagttagggacagtcactgcagtgcttaggtacatggactctaggaccaaactgcctgagtttaaatctctgttctacacttaatagtcgtattactttggtatttaagcttactttgcctcagctttctgatctgtaaaatcgaaacagtaatagcaccttatcctttgggttattgtgagggttacatgaattaatatatgtaattattttagaaccttctgcctgtacctattaccactagaatgtatgttctgtataagggcagagattttttgttgctgtttttcatgactgtaactcagtgccaagagcagtgcctggaaataatgggcacttaataaacatttgtcaaataaactagtaaatatgataaaccttgtggagaaaaaaattaaaaagacaaagaatgaaattatataatgaatgcttttattaaagtatggtaaatattgtatcatccttttcaagttgccatgaagggttgcagtaaaaatttatggagataagattcctgatggaaaaagtatctttgaaaatcaaagggcctgtaatcccagcactttgggaggccaaggtgagaggatcacttgaggccaggagttctagaccagcctgagcaacatagcaaaatcccatctctacaaaaaatttaaaactaaaaagaaaatcaaagtttactaaacgatgaggttgttaagaattgggattatgtcttcgtatgattttggatcc

SEQ ID NO: 14575 - DNA, 599 bp, Homo sapiens
tggaataagtttctttatcttgttttacccaaatcccaggacttattagatctcactggcmgatggcagtattctgggtagtgagaaaacaatgttaactctcccacaggttgcctacaattctggacaaacacataaactagtaatgttggaaataaatcagatacaaaggcagtaacaggcacacatacaattttaaactacagttcaaagaaccatgagacaaggaattttccttttttctaagatggccagaaaccaaactatttcctaataatgacacaaaactcggcaggtgggtgcaaggctctggtgtaaagagctaatagataggctcagggaggcatctccctttctccaaaatactccaaggggtctctgtggagatggaggctttcatagtctttgaaagataactgccaaggcaggtgcctcgtattctggtaagatttattgcctgtaaataatgcattgaaaaagaaactaccatcagagtgaacaggcaacctacaaaatgggagaaaattttcgcaacctactcatctgacaaagggctaatatccagaatctacaatgaactcaaacaaatttacaagaaa

SEQ ID NO: 14576 - DNA, 524 bp, Homo sapiens
ggaggtagcaaagactgagggcatgagaccccctagaacatctgtggaaaatccctatgcagggtttggttatccagtggacaacaagaggtcatggaggaagcttaatatgagaccagatagaggttctggggaggacataggaggcgattatttctactttaggagttttgcctagggctggcctgctgaaggggtaaacaaataaataaatcatactcaataaagactcagttgcaaagagcttcagggcagaaaatagttaagaagccttgctaaagagaaaccatttcatgtctacatttttacaattctttctcatttctcctgttatgtgtttcttgtgttcaatagtcattacttgggcrtttgaattttttgagagatttctagttcagtagttattttctgcttgtaaagtccagggatggcctcttctgcgtggctccacggaagggcagtctccgcaggcctgctctctgacctgccatggctagctgcccatcggcagcagattgctcatc

SEQ ID NO: 14577 - DNA, 556 bp, Homo sapiens
gttttgaaacactatgggtttaactaatgtctgactcaaaggtcaaagcaataacctctttaacttttcaatttcatagatgatataggtcaaaataaagagataggaaataaaaaaagaaaattatttcacttgcttctgtttttctttattacacattaataaaagaggcaaattagttcataccaattgaatacttctgtgatctaggttaagtcatagatttttttaagcccctatatcttcatttatatggttcttttagaatatgatgtatattctgttcagtcccaaaattttctcttaattggctccaaattgatcaaataattttcttttaattactaattcacttaattgctactaaaaggtggaattggatgtattgagttgtttttgatagactaggccaatatatggatcagagaacgttctgctatacgttatgkttctacaatatgaaatactaacctgaataaggagggagatttcttatcctctagttctaatccacaaaatgaatgaatgaatgaatcaatgaatgaatcaatcaatt

SEQ ID NO: 14578 - DNA, 538 bp, Homo sapiens
ggtcactttagaaaggcagcggcctggccttctgtgacaagcagagtgaatcggcctccatctcacccttggtgccactatcttgttgccacttcccttgagagcactgtgagctcttcctcaggatccacttttcagcttcccttcaccccattttcactgggtggtggtggcagcctctctggccttgccagggactgggtgcagggaggggcagccaagggcgtgaggcaggtgggcagcctgtgtaggtgcctcttgccctttccacccagacaagaaatccactctagtcagtaagtgtctcttcatcctatgggtgttaatagcctgggtgagaggtttggctccagyacttggcaggcagtagtaacacttacacagcacttgctatgtctgagaggtgctctaagtgcttcacacattagttaatttaatcctcacaactctgacattagcactattattatctccatttcacagataaggtaaatgaagcacagagaatgtaagcaagttgcccaaagtcatgtagtta

SEQ ID NO: 14579 - DNA, 503 bp, Homo sapiens
tacaaaaattaggcaggcatggtggcgggcgcctatagtcccagctactcgggaggctgaggyaggagaatcacttgaacctaggaggcagaggttgcagtgagccaagatcgcgccactgcactccagcctgggcgacagagccagactccgtctcaaaaaaaataaaatgaaataaaataaagattattttctggggaaaccaggcacagctgagtgtcaggttgcaattctatgctgaaaacaacatactggacagggggattccccgcccccacacacccaagcttcctggacaccagcagcctggcttacaccctctgagtcagagataagagatctggggagactgagcataaccaacagacatggcctagagatgctggcatctggcatccccatcacccccagcaaagtcctctagttgaaaagttccagtaatgcacacagtttccaatgagctcacagggccttactttaactatgacagccaagcaccacca

SEQ ID NO: 14580 - DNA, 547 bp, Homo sapiens
ccgccagatgttccaagaacatctgtctacaagcctcccaacggcaagaagcacatttactcatttcgaatccccaacgcccagaactgcaactggcacatgacatttcaaacatgtgtgatgaaaaatgaaccagaggaacctctgctttactggaagtaatgyatacatccgtagaggcaagctgaccatcagctggtacccagccttccacccttcaccaactccagcccctagacctcttgatcatgcagcaactgaaaagggactcccagcactctcatacactctcctccagcattccagcagacttgagtcatcctcacagctaccagccaatatatgattctaatatcacccttggtgacatgctgaggccgggtatatgtcatctcaaatccacactgccaggattttaccttaccctatattaaggtaatttacttattttcagaaatagaaacaataaagaattagtcaaacccaaaggaactctgcccacaaaagcaaagaaggcaaggttggagaaggggtggcaaggtacagg

SEQ ID NO: 14581 - DNA, 535 bp, Homo sapiens
accagcaaatttggtatctcatgagggcccagccctcatagatggcacattgtatctgtgtcctcatatgttggaaggggccacttagctctctgggacttctttctaagggcagagcccttatgacctaatcaacttccaaaaggccccacctgttactactgtcgccttgggtttcaacttatgaatttgggagagacaccaatattcagacccttgaaattttctttatatttttccatgttttacaaattattctctttgaattagtgttatattttattttatgaaataagtgcaataaagtatattgtttagaaatgtttcagtgtgaggccaggcgcaggggctcacgcctgtaatcccagcactttgagargccgaggcgggcggatcacgaggtcaggagatcaagaccatcttggctaacgcggtgaaaccccgtctctacagaaaatacaaaaaataagctgggcgtgttgttgggcacctgtagtcccagctactcgggaggctgaggcaggagaatggcatg

SEQ ID NO: 14582 - DNA, 622 bp, Homo sapiens
gtatacatatatatatgtattttatatatgtgtaaatatttacattttacatatatttactatactatttacatatttaatatgtaatatttaatactatttacatttataaatgtaatatttaatataaataaatatttaatactattacatatataaatatatatatgtaaatagtctctctctctctctctctctctctctctctctctctmtatatatatatatatatatatatatatatatgtattttagacatgaggcctctctgtgttgtccaggctggactccaacttctggcctcaagtaatcctcccatcttagacttccaaagtgctgggattacagaaaagagccaccacacctggctataatggttactaatcctttatattaactgtagctattgtatttttaatggttattaatttattaagagtttctattgcttcatgagtcaatccagaaatttatatttttctagaaaaatgttcacttcatctaagttttcaataaaatcagcctaagtaatttattttatttattattttttctttctattttctctccatctttattttatttatttattttattcccataggtttttgggaaacaggtg

SEQ ID NO: 14583 - DNA, 1206 bp, Homo sapiens
  misc_feature (1)...(1206): n = A,T,C or G
gaaagcaattaagtggtcacctcaacataagggggacatgatccattctgtaagcaggtgggagggggtagagatgggacaaaattttggtctcagaggtcttaccatcttaatttggtcacttctaatgaaaaanataaaaaatagaaataacattatccaaagatatcttaaagctgaaaacttgaacagaacatttcttgtttttgttgttgtttggctagctcctcctggaatcacctttctggtttagctagtactttgtacagagcaatgaggtttcccatagtggagtctcctgggctctgtttggctctcagtaaggcaggcctataccttttcctctcctctatggagaggggaatatgcattaaggtgaaaagtcaccttccaaaagtgagaaagggattygattgctgcttcagggctgtggaattatttggaatgttttacaaatggttgctacaaaacaacaaaaaaggtaataacaaaatgtgtacatcacaacatgctttttaaagacattatgcattgtgctcacattcccttaaatgttgtttccaaaggtgctcagcctctagcccagctggattctctgagaagaggcagagacagtttggtgaaaaagacacagggaaggagggggcggcaaaaggagaaagcagccttccagttaaagatcagccctcagtttaaggtcagcttccaggaggctggcctcaggcggagtctgggtcagagggaggagcagcagcagggtgggactggggcgttctacatctcattcaggtcaatcagagtctggtccagcatcctttgtgtacagaggtgctcctctttggtgcgtttcagtttatcttccaagtcatcaattgtcttttccagcttggctaccgatctctcagcaaactcagcactggtctctgcctccttgagtttatcagtaagaatcttgatctcttcctcatatttgtcttctttttgagagtacatttcttcagcagcactcagacacttcaggttctggtccatcagtctaatctgctcatccatctcttggcaacgggactctcccagctcagctcgttcctccgtgccttccaagtctccttcaatgatcaccaacttatgagccacctcttcatacttcctatctgcctcttctgcaatgtgcttagcttcttggagttagatttcctggagttc

SEQ ID NO: 14584 - DNA, 1206 bp, Homo sapiens
  misc_feature (1)...(1206): n = A,T,C or G
gaaagcaattaagtggtcacctcaacataagggggacatgatccattctgtaagcaggtgggagggggtagagatgggacaaaattttggtctcagaggtcttaccatcttaatttggtcacttctaatgaaaaanataaaaaatagaaataacattatccaaagatatcttaaagctgaaaacttgaacagaacatttcttgtttttgttgttgtttggctagctcctcctggaatcacctttctggtttagctagtactttgtacagagcaatgaggtttcccatagtggagtctcctgggctctgtttggctctcagtaaggcaggcctataccttttcctctcctctatggagaggggaatatgcattaaggtgaaaagtcaccttccaaaagtgagaaagggattcgattgctgcttcagggctgtggaattatttggaatgttttacaaatggttgctacaaaacaacaaaaaaggtaataacaaaatgtgtacatcacaacatgctttttaaagacattatgcattgtgctcacattcccttaaatgttgtttccaaaggtgctcagcctctagcccagctggattctctgagaagaggcagagacagtttggtgaaaaagacacagggaaggagggggcggcaaaaggagaaagcagccttccagttaaagatcagccctcagtttaaggtcagctyccaggaggctggcctcaggcggagtctgggtcagagggaggagcagcagcagggtgggactggggcgttctacatctcattcaggtcaatcagagtctggtccagcatcctttgtgtacagaggtgctcctctttggtgcgtttcagtttatcttccaagtcatcaattgtcttttccagcttggctaccgatctctcagcaaactcagcactggtctctgcctccttgagtttatcagtaagaatcttgatctcttcctcatatttgtcttctttttgagagtacatttcttcagcagcactcagacacttcaggttctggtccatcagtctaatctgctcatccatctcttggcaacgggactctcccagctcagctcgttcctccgtgccttccaagtctccttcaatgatcaccaacttatgagccacctcttcatacttcctatctgcctcttctgcaatgtgcttagcttcttggagttagatttcctggagttc

SEQ ID NO: 14585 - DNA, 1206 bp, Homo sapiens
  misc_feature (1)...(1206): n = A,T,C or G
gaaagcaattaagtggtcacctcaacataagggggacatgatccattctgtaagcaggtgggagggggtagagatgggacaaaattttggtctcagaggtcttaccatcttaatttggtcacttctaatgaaaaanataaaaaatagaaataacattatccaaagatatcttaaagctgaaaacttgaacagaacatttcttgtttttgttgttgtttggctagctcctcctggaatcacctttctggtttagctagtactttgtacagagcaatgaggtttcccatagtggagtctcctgggctctgtttggctctcagtaaggcaggcctataccttttcctctcctctatggagaggggaatatgcattaaggtgaaaagtcaccttccaaaagtgagaaagggattcgattgctgcttcagggctgtggaattatttggaatgttttacaaatggttgctacaaaacaacaaaaaaggtaataacaaaatgtgtacatcacaacatgctttttaaagacattatgcattgtgctcacattcccttaaatgttgtttccaaaggtgctcagcctctagcccagctggattctctgagaagaggcagagacagtttggtgaaaaagacacagggaaggagggggcggcaaaaggagaaagcagccttccagttaaagatcagccctcagtttaaggtcagcttccaggaggctggcctcaggcggagtctgggtcagagggaggagcagcagcagggtgggactggggcrttctacatctcattcaggtcaatcagagtctggtccagcatcctttgtgtacagaggtgctcctctttggtgcgtttcagtttatcttccaagtcatcaattgtcttttccagcttggctaccgatctctcagcaaactcagcactggtctctgcctccttgagtttatcagtaagaatcttgatctcttcctcatatttgtcttctttttgagagtacatttcttcagcagcactcagacacttcaggttctggtccatcagtctaatctgctcatccatctcttggcaacgggactctcccagctcagctcgttcctccgtgccttccaagtctccttcaatgatcaccaacttatgagccacctcttcatacttcctatctgcctcttctgcaatgtgcttagcttcttggagttagatttcctggagttc

SEQ ID NO: 14586 - DNA, 1206 bp, Homo sapiens
  misc_feature (1)...(1206): n = A,T,C or G
gaaagcaattaagtggtcacctcaacataagggggacatgatccattctgtaagcaggtgggagggggtagagatgggacaaaattttggtctcagaggtcttaccatcttaatttggtcacttctaatgaaaaanataaaaaatagaaataacattatccaaagatatcttaaagctgaaaacttgaacagaacatttcttgtttttgttgttgtttggctagctcctcctggaatcacctttctggtttagctagtactttgtacagagcaatgaggtttcccatagtggagtctcctgggctctgtttggctctcagtaaggcaggcctataccttttcctctcctctatggagaggggaatatgcattaaggtgaaaagtcaccttccaaaagtgagaaagggattcgattgctgcttcagggctgtggaattatttggaatgttttacaaatggttgctacaaaacaacaaaaaaggtaataacaaaatgtgtacatcacaacatgctttttaaagacattatgcattgtgctcacattcccttaaatgttgtttccaaaggtgctcagcctctagcccagctggattctctgagaagaggcagagacagtttggtgaaaaagacacagggaaggagggggcggcaaaaggagaaagcagccttccagttaaagatcagccctcagtttaaggtcagcttccaggaggctggcctcaggcggagtctgggtcagagggaggagcagcagcagggtgggactggggcgttctacatctcattcaggtcaakcagagtctggtccagcatcctttgtgtacagaggtgctcctctttggtgcgtttcagtttatcttccaagtcatcaattgtcttttccagcttggctaccgatctctcagcaaactcagcactggtctctgcctccttgagtttatcagtaagaatcttgatctcttcctcatatttgtcttctttttgagagtacatttcttcagcagcactcagacacttcaggttctggtccatcagtctaatctgctcatccatctcttggcaacgggactctcccagctcagctcgttcctccgtgccttccaagtctccttcaatgatcaccaacttatgagccacctcttcatacttcctatctgcctcttctgcaatgtgcttagcttcttggagttagatttcctggagttc

SEQ ID NO: 14587 - DNA, 538 bp, Homo sapiens
ttttaatagccgttttaatgggtatgagatgatgtggttttgattttcattcctctaatgattagtaaggttgagcatcttttcatttgcttattagccatttgtatgtcttcttggaagaaaggtctattgaagtcctttgcctattttttaatcagattgtaaacattagaaaataaaacacaaattgttaactatttttttccagtcttttttttttttktttactggtgaggaacgtcgaaagaaagctgaaaaagaagtgaatagtaactatttttttccagtcttttttttttttttttaactggtgaggaacgtcaaaagaaagctgaacaagaagtgaatagtagacattattgtgttactcctgattttaaaggtttccttctgatattttccagttaggtgttacgggttgaagatttctggttaatactcttctatcatagacctaggcttcaaagtattcttcacgaaaagtagtttgaatttaattatttaattactggtatatttgaaatgaccatgtgactca

SEQ ID NO: 14588 - DNA, 538 bp, Homo sapiens
ttttaatagccgttttaatgggtatgagatgatgtggttttgattttcattcctctaatgattagtaaggttgagcatcttttcatttgcttattagccatttgtatgtcttcttggaagaaaggtctattgaagtcctttgcctattttttaatcagattgtaaacattagaaaataaaacacaaattgttaactatttttttccagtcttttttttttttgtttactggtgaggaacgtcgaaagaaagctgaaaaagaagtgaatagtaactatttttttccagtcttttttttttttttttaactggtgaggaacgtcaaaagaaagctgaacaagaagtgaatagtagacattattgtgttactcctgattttaaaggtttccttctgatattttccagttaggtgttacgggttgaagatttctggttaatactcttctatcatagacctaggcttcaaagtattcttcacgaaaagtagtttgaatttaattatttaattaytggtatatttgaaatgaccatgtgactca

SEQ ID NO: 14589 - DNA, 616 bp, Homo sapiens
tggagggcataagtggatactagcagttctttctgatggtgacaacctatgatttttacatatttactgggtactgcctataagtcgttctgactgtgacaaccttgtacctttgaggtatctgtgkttgcagattctttactgggagattacatcagtggaatatgtccaccctgacacgtcctgaatcattgaccctctcatgctaagtgcttgaaacttgcatgaagctgaacatgtccctggagtaaaaggagtagatgttttgccctttacagaaaatcactgaggggaacctaaagtaccttttcgtccctcttcctactctgctttgggagaaaagttaatgttaagtaagataacactaggaagaaaagaaatgctcttgtgaattataataaaggatttttaaatactaggaatatctgggtcactagctcagactgttttagttattgcttggttttctagatgtcaagcctacctgttgtaaagctggagctcagtaggtcaactcagctttgatgtagtttgctctctggtatgtgggcaaatgagtttgtaataaccatttgcccccttgatgaatagggttggtatgagaatttcgtatttg

SEQ ID NO: 14590 - DNA, 446 bp, Homo sapiens
ataatatatatacaccacattttgtttatcctttcatctgtggatggacatttgggttgtttccaccttttggatatatctatctgtatctatatttatatctaatacctaataccttaatgttcttacagcaacattaagacacaattattatgattctcttaacatcctaaacagaagttagtcaaaacacatggccaaagattgtataacaattaagtagaatggggttgaattaatgtctgtctcactccaaaatgagacaaaactttacttacataatttttaaaacgtaggagccacctcaggaataaggaaagagcttgaggagactctgatactgattcttcaaacctccaactttaaccaggtcacctctacctttctgtgattgacattttgtttgaacaaaagattccgtctaaaataaacacaacttttwaaaa

SEQ ID NO: 14591 - DNA, 538 bp, Homo sapiens
cttgcaataaaaaatatctctagtattcacttgtcatgtcaacttaggtgacttaccatttctctgctcccattttctcatgygtaagttggtgatagcaaaggtaatattggaggacattaagtgacgggcactggcagtgctgttggtgttcaagacccagatcattaaagctatttcaaaagaacttctttgaccacctgagacactggttgtcacttcaccaatttctattattgcaccaattacagtttgtttatctacgccttttattagactatcaactgtgtgaaggttcatagttcaagctccttgccctgccatatctcaacacagagcttgctatgagccctaggcattcaataaatgcatgtttaatgttaattatagtcacaagaagggcttgagagttagagagtcactgattaaataacaatttattttccatattaaaatataaaatcagatttccttacaatagttagttgtgatagaattacagatgggttagtaattcaagacatttccaaacaagact

SEQ ID NO: 14592 - DNA, 548 bp, Homo sapiens
gttgagagagggtgagaaacagatcgctggtgagatttttgagcacctgaaagtggccacacttggaattttttatttcatacaccaagacttttttttttttttcttgagacagggtctcractctgttgcccaggctgcagtgcagtggcgtgagctcggctcattgaaggctcaacctcctgggctcaatcaatcctcccgcatcagcctcctgagtagctgggactgcaggcatgcactgccatgcctggctaattttttttgtttttgttttatagagatggggtttcaccatgttgcccaggtttgtctccaacgtctgggctcaagtgatctacctgcctcagcctcccaaagttccgggattataggcatgagccactgtgcccagccaagccattctttttcgtgttgacaaaacagctgcatttctgtcacttgcaacctttttctcgggctctgaaggggattttttgccaaatggttgcaatcatctcccagtagtcacatccttgagtgcggggcctttccacactgactctgtg

SEQ ID NO: 14593 - DNA, 516 bp, Homo sapiens
tggcttcattagcctttatttagtcagatttgtttagtctcctcaaggtttgtaagaactgccatcttgtcaccagactgacaaaacaagactttattatcagaatttctatataaaatcatgttattttttaaaaaagcaaatttaccacagacctmtaaaaataaggtaagcaaaggcatgggcatatactctaagccttgtcttgatggtttgagctatagtttctcatttgacaaatacaaacactaaagtgcactgctttgcctttggggaaaaacaaaacaaacaagtctccagctgtctgtaacacatgagttcctgtgtaacattgagaccaagagaaacagaaaaaaaggcaggggcaggatttgccttccttcccctgattcaatgcttttttatacttttcccaatgataagaagagtaattaactggcaaccagccaagtagtttataaattaggttaacactgttttctatgggatagagggaggtcccaacagtgtgctttc

SEQ ID NO: 14594 - DNA, 555 bp, Homo sapiens
tgttttgctcctgtgcttgaggcttagcctgaattccacaaaagcagaggggaatttgatcagggaaggaatcccaggaatgccaggagtgtgggaagagagagggcrtggagctgacaggaggatgcattattttggtgatctccagggacatctgatcaagtcccaagaccatgtatttatttatttattgattcatttattcatttatttatttatttttgagacagtctcactctgttacccaggctggagtgcagtggcttactgcaacctccacctcctgggttcaagtgattctcctgtctcggcctcctgagtagctggaattacaggtgcctgccaccacaccaggcctgaccatgtagtttgatcacaccaaagttattcctcgagcttgggagagcctggagcaccacctaaacattggagtattccatcaatactctccaacttacatgacaatattctggtagaattatttaaatgtgaaatataaaaccatttgaaatactagaatatgataggggccaacatttatgtaatttttattca

SEQ ID NO: 14595 - DNA, 555 bp, Homo sapiens
tgttttgctcctgtgcttgaggcttagcctgaattccacaaaagcagaggggaatttgatcagggaaggaatcccaggaatgccaggagtgtgggaagagagagggcgtggagctgacaggaggatgcattattttggtgatctccagggacatctgatcaagtcccaagaccatgtatttatttatttattgattcatttattcatttatttatttatttttgagacagtctcactctgttacccaggctggagtgcagtggcttactgcaacctccacctcctggrttcaagtgattctcctgtctcggcctcctgagtagctggaattacaggtgcctgccaccacaccaggcctgaccatgtagtttgatcacaccaaagttattcctcgagcttgggagagcctggagcaccacctaaacattggagtattccatcaatactctccaacttacatgacaatattctggtagaattatttaaatgtgaaatataaaaccatttgaaatactagaatatgataggggccaacatttatgtaatttttattca

SEQ ID NO: 14596 - DNA, 564 bp, Homo sapiens
cagcttaaaatatttgctttttatattttagcctaaagcaattgaatttagaatttacatataaaattgatgagatgttactacagtaatgtgaagatctgtactaattagcataaacttaatacaggacccttcctggcatacattccatggagactgcttatcacatatgctttacagctaatctcttaaagatttttggagaatgtataaaccaccagaattattttctttggtatctgtcaaatatatgttagaatcataaaattactcagaaccttgaaaatgatatttccctgggagaccaattgttaattaatcctgtttttgttttagtrgatcaatattttaagttgataacagggtctctgtttctgctttgtattttttttttttttggtttatcaaaaatagctcctctaaaggggacaaaaatggacatcattttctgttttaaaaatactgaaaattttcttcaaattgtaatactttaatactccaagagagaactaataaatcaaatgagaactcattgtcaatgggcatgtaagaacaattcctaat

SEQ ID NO: 14597 - DNA, 565 bp, Homo sapiens
actgcctcagaaggtgctagggaaagatctctttcaggcttttctcgtaccttccgttagtttcttggtttctggcagcgtaactccaaattcatctgctgatttccttgtatctgtaattctcctcttctacagcgacacatacttacatcagacaataaaaacattaagccggccgggcgcggtggctcacgcctgtaatcccagcactttgggaggcccaggcgggcggatcatgaggtcaggagaccgcgaccagcctggctaacacggtgaaaccccgtctttactaaaaaaaatacaaaaagaaattagctgggcgtggtggcgggcgcctgtrgtcccagctactccggaggctgaggcaggagaatggcatgaacccgggaggcggagcttgcagtgagtggagatcgagccactgcactccagcctgggcgacagagcgagactctgtcaaaaaaaaataaaataaaataaaattaagccaaatactgttacaggagacaaagaaggtcattgtgtaatgatagacagggtcagttcatcaggaagatgtataaca

SEQ ID NO: 14598 - DNA, 530 bp, Homo sapiens
tagactggttgatcattggcagatgggccctttccctgatcccatactttttttttttttttttttttgagatggagtcttgctctgtcgcccaggctgaagtgcagtggcatgatctcggctcactgcaagctccgcctcccrggttcatgccattctcctgcctcagcctcccaagtagctgggactacaggtgcccaccaccacgcccggctaattttttgtatttttagtagagacggggtttcaccatgttagccaggatggtctcgatctcctgaccttgtgatccgcccgcctcgggctcccaaactgctgggattataggcgtaagccaccgcacccggctgatcccatactttaggagcttcctgggctctgattctcccagggcccgacatacagtaggtctcagcgatgacactgagggggtgaagattgcacagtaatatagatggctagttgagtgtgcgtgagctgttttctgagctttttgctgaactgctttgaaattttaatgaacaaaagtc

SEQ ID NO: 14599 - DNA, 530 bp, Homo sapiens
tagactggttgatcattggcagatgggccctttccctgatcccatactttttttttttttttttttttgagatggagtcttgctctgtcgcccaggctgaagtgcagtggcatgatctcggctcactgcaagctccgcctcccgggttcatgccattctcctgcctcagcctcccaagtagctgggactacaggtgcccaccaccacgcccggctaattttttgtatttttagtagagacggggtttcaccatgttagccaggatggtctcgatctcctgaccttgtgatccgcccgcctcggsctcccaaactgctgggattataggcgtaagccaccgcacccggctgatcccatactttaggagcttcctgggctctgattctcccagggcccgacatacagtaggtctcagcgatgacactgagggggtgaagattgcacagtaatatagatggctagttgagtgtgcgtgagctgttttctgagctttttgctgaactgctttgaaattttaatgaacaaaagtc

SEQ ID NO: 14600 - DNA, 530 bp, Homo sapiens
tagactggttgatcattggcagatgggccctttccctgatcccatactttttttttttttttttttttgagatggagtcttgctctgtcgcccaggctgaagtgcagtggcatgatctcggctcactgcaagctccgcctcccgggttcatgccattctcctgcctcagcctcccaagtagctgggactacaggtgcccaccaccacgcccggctaattttttgtatttttagtagagacggggtttcaccatgttagccaggatggtctcgatctcctgaccttgtgatccgcccgcctcgggctcccaaactgctgggattataggcgtaagccacygcacccggctgatcccatactttaggagcttcctgggctctgattctcccagggcccgacatacagtaggtctcagcgatgacactgagggggtgaagattgcacagtaatatagatggctagttgagtgtgcgtgagctgttttctgagctttttgctgaactgctttgaaattttaatgaacaaaagtc

SEQ ID NO: 14601 - DNA, 530 bp, Homo sapiens
tagactggttgatcattggcagatgggccctttccctgatcccatactttttttttttttttttttttgagatggagtcttgctctgtcgcccaggctgaagtgcagtggcatgatctcggctcactgcaagctccgcctcccgggttcatgccattctcctgcctcagcctcccaagtagctgggactacaggtgcccaccaccacgcccggctaattttttgtatttttagtagagacggggtttcaccatgttagccaggatggtctcgatctcctgaccttgtgatccgcccgcctcgggctcccaaactgctgggattataggcgtaagccaccgcacccggctgatcccatactttaggagcttccygggctctgattctcccagggcccgacatacagtaggtctcagcgatgacactgagggggtgaagattgcacagtaatatagatggctagttgagtgtgcgtgagctgttttctgagctttttgctgaactgctttgaaattttaatgaacaaaagtc

SEQ ID NO: 14602 - DNA, 637 bp, Homo sapiens
aatgttgaccacacgatgagccttgctcttgaacttgagtggaatgcttcttacgtccgctgttaggtaaagcagaaagccctggtcaggttgaggtcgacaccatctctcctttgctaagagcattgatcaccagtgggaccccagagcataggtggctctggaggttcctttgatctgtccctacagggtcaggggcttggggtgaagctcccataaggctgaaggctgagctcacagtggtcccagggcctccttccctccagggcacttcccccggcacagggagggctgtcccagagcatgtgggatccatgtgggaaggtaacatcactcctcctccgtcaccatggcccatcccgggtggggcccccgaagcttgtgctggaaacaaggcttaggtcagaaccagcccagctttgcactctgccctggatccaggccctgtcgggaacgggtgtgttcacagggcccggcagtgtgagccgtgaccacacagcgkggtcctccctgctggcctggagatagccagtctgctgtgcgttcctgcataggaggtggggatgcacacaggggctcccctttggggccgacaagggtcaggaggtgaagggagaggcttgcccctgggcctctt

SEQ ID NO: 14603 - DNA, 681 bp, Homo sapiens
atgatattccattagccacttgcagtggccgatttcaacatgaataaatattgataagtatattactgagagcctaatatgtataaagcatagtttttggacactaagtggaagttgttgggatttgctagcttgaaacgctgttctgttttactgtaaggccaactgcttcccctcaaagatttgactttgaagttctcatatgagaactctggttttcatttataaytggagttttaatttgagagttttccatttataactggagtttaatttgagttttatatgagaactgattttcacttataattggagttttcttattccattattttattccttccccctttattataaacatgattatttatattgccatgaagacagtggaaaaaaaatcagaatatttacaacgctgaggttgtgaccttttgttttccatgaagtttaaaacatttttgcttttatcaagtttttgatagtgtttatgaaaatgatagttacattctaatttaggtaattacgtatttaccacccttgtcttatgttagccttgtttcccccttgtcttccttgccttgttttccccttgtcttcttggagcttatctgttgtttccttgctaaatcccctgagcccaggattggatacactgtatctgattagtaaatatttgttggc

SEQ ID NO: 14604 - DNA, 681 bp, Homo sapiens
atgatattccattagccacttgcagtggccgatttcaacatgaataaatattgataagtatattactgagagcctaatatgtataaagcatagtttttggacactaagtggaagttgttgggatttgctagcttgaaacgctgttctgttttactgtaaggccaactgcttcccctcaaagatttgactttgaagttctcatatgagaactctggttttcatttataactggagttttaatttgagagttttccatttataactggagtttaatttgagttttatatgagaactgattttcacttataattggagttttcttattccattattttattccttccccctttattataaacatgattatttatattgccatgaagacagtggaaaaaaaatcagaatatttacaacgctgaggttgtgacmttttgttttccatgaagtttaaaacatttttgcttttatcaagtttttgatagtgtttatgaaaatgatagttacattctaatttaggtaattacgtatttaccacccttgtcttatgttagccttgtttcccccttgtcttccttgccttgttttccccttgtcttcttggagcttatctgttgtttccttgctaaatcccctgagcccaggattggatacactgtatctgattagtaaatatttgttggc

SEQ ID NO: 14605 - DNA, 629 bp, Homo sapiens
atgcaccgagtgtgggttcaaggcaaattccagaaaccattgcaccagactcagaatagttccaatatggtatctacactcctttctcaaggctgaactttgtaacatgttaaggtacaaagccagaggactgtgctattcaaggactactgtaagkttttcgtttctcaaaagacaatgagaaaaaaagaagagaatttgtatttcttgctgttttgtcataggtgagctcctttgtgcattttaagcacatgtaagtgattcagcacagtatgcctttttctgcgctttgaaaacttgatatgcctaagcttgtttgaatttattacatctaaccattttgcttgttccttgaattttataagcattcaattaaactggtattatgtcaggtaattttgagaaaacgtaacttgacattttttgcaagtaaaaaaattatttatttgtttaggcttagtaagccagttcccaaacacgcacacacacagacacacacagacacacacacacacacacacagacacacacacacacaaagggaggaattcctgaccataatgaagctcaaaaccctcaaaggggagactaatatttgcttaaaaggattgttaacttccacatgtaat

SEQ ID NO: 14606 - DNA, 574 bp, Homo sapiens
ttcatggcaatagattatcaggtgacttgctttaaaacccgaaaatttgtccaggcaccatggctcacgcctgtaatcccagcacttttggaggccgaggtaggcggatcacttgaggtcaggagttcaagaccagcctgaccaacgtggtaaaactccgtctctactaaaaatacaaaaattagctgggygtggtggtatgcacctgtagtcccagctactggagaggctgaggcaggagatgcgcttgaacccaggaggtggaggttgcaatgagctgagattgcgccactgcactccagcctgggcgacaaagtgagaccctatttcaaacaaaaaaaaccctgaaaattggccaggcacagtggctcacacttgtaatcccagcactttgggagggcaaggtgggaggatagcttgagcccaggagtttgagaccagctttggcaacgtttgtctctacaaaaataaaaaaagaatacaaaattagctgagtgtcacagttacatgggaggctgaggcaggaggatgccttgagcccaggagctgaaggttgcagtgagctatgattatg

SEQ ID NO: 14607 - DNA, 568 bp, Homo sapiens
tggagagtttatttgataataataaccatggttcctatatataaaagtgtgctcaattattcatatgycctgtcttattatgacattcccacaaaaactgcaaggtagttgcagttttctaaatcatattttttactaatcagggaagtgatgctcagagatgttaagtacgcttccccaagaccctaaaggtgataagtgatgtagtctcaactaaaactttggtttgtgtgattagtgcatgttctttccactctatcagtagtcagcaagctacaacatacaagacaattccagcccaccacctgttttgataaatgaagttttattgggacacagccacactagttattgtttatgactaccttcacacttcaacagcagaattgagacatagatttttttttcttttttttagacagggtatcactctgccacccaggctggagtgcagtggctcgatctcagctcactgcaacctctgcagtgagctgtatggctcaagccatcctcctacctcagcctcctgggtagctggcaatacacatgcatgctaccatacccggct

SEQ ID NO: 14608 - DNA, 568 bp, Homo sapiens
tggagagtttatttgataataataaccatggttcctatatataaaagtgtgctcaattattcatatgtcctgtcttattatgacattcycacaaaaactgcaaggtagttgcagttttctaaatcatattttttactaatcagggaagtgatgctcagagatgttaagtacgcttccccaagaccctaaaggtgataagtgatgtagtctcaactaaaactttggtttgtgtgattagtgcatgttctttccactctatcagtagtcagcaagctacaacatacaagacaattccagcccaccacctgttttgataaatgaagttttattgggacacagccacactagttattgtttatgactaccttcacacttcaacagcagaattgagacatagatttttttttcttttttttagacagggtatcactctgccacccaggctggagtgcagtggctcgatctcagctcactgcaacctctgcagtgagctgtatggctcaagccatcctcctacctcagcctcctgggtagctggcaatacacatgcatgctaccatacccggct

SEQ ID NO: 14609 - DNA, 1685 bp, Homo sapiens
atcgctagaatgtacttaaatatgaccaaaacaaaaaggaagtaggacaatgattaggccaatagatgatttctcaaagcaaaactggccggagggcgggggtgggggagaaagcaaatctgtacagaaaactatgggaacttaataaatatctacctatatataataaattcaatgaaactagatagaaaaaactttatgtgcaaattaatggtaaacaacaaaaagcagcagaaatgtcatgggaaagctcaaaggggtagcaagggagcagacaaaatcacaacaacaaaagaactaggaattctgagttatcctattgagaaaatcacaaaacatccgcaaaaacgacccccaacccacccccaccaaaaaaaagtctccctctctcaataccatttgagatctggaaacaatgaggataggaagaagccttaggacattggggaaaacaaaacatggaaagtgcacagaggacaaggtgacagataaaagaccatctgttctaacagagaagaacttgccttggaatacacaggcaatatctgtaaggtgcagtagtcaaagataaaaacaattggtagaagcaccccctgaagcaacataagactgtagaatcagaggaaatctgcccacaaaaggcaacaatattaaagtaattgttaatcactttatcaatggaagaggtatcccttgagcagaggaaccaggaaagaacttgctatggattaaactgtaccacactctccccaatccttgcctaactattctgaagtcgtaactgcccagaaatgtgaatctgaccttatttttaaaaagagtcttgcagatgtcatcaagttaagatgaagtcatactgaattagaatggtcctgaaatccaatctgactagtctccatataagagggaattttgaacatagagacagagtcaagcagtagagagggccacatgtgaagatggaggcagagatgggagtgatgcatacactggccaaggaatgccacagattaatggcaactatcagaatagaagaggcagggaagaattcctcccctagaacactcagagagaagatggcactgctgacaccttgacttctgacttttagcctctagaactgtgagacaacacatttctgctgtttgaggccaccaagtttgcggtactttgttacgacagccctaggagactagtacagtgctttaactcctccctgccttacagagatccttctgctaacagctagtctagaaaatccaattcactaaaacgttgataacaaaaaacaaataaataaaactataccaattgtacaaagacactttactgaaaaaaaatacagcaaagcttaagagccaaagaagactcaccctaaaaatgtcatcacaaacagaagactgtaatgtcacatttcagtctaaatttaaaagagatctgctgtacgatacagtgcctctagttaacagtatggcattgcacactttacagtttaagagggtacatctcatgtaaagtgttcttacacacacatgcacacgcacacaagacacgaatagacacaagaaaattgaggtgatgagtatgtttatcatcttgattatggtgatggtattrtgggtttatgcatatttccaaacacttccaatagtatatattaaacaggtgcacagccacagcatcta

SEQ ID NO: 14610 - DNA, 535 bp, Homo sapiens
ttttcaagttaatgaatcactatcaaattcaaattattccaggaatgcaaaattgattcagcatttggaagtgtattaattcaccatattattactaattgtatatttatatgtgtacaatcatttcattatacaaaacatttgataaaattctaaatgtattaaacttttaaactaagagtagaagataacatggtcttttattgtttccataccactttgtcttaatcattatacttttacaaaatatattgttatctatgatggctaatacctctcagtctattttcctttttaggcaatttattattatttttggccctttgtttttcattaaacttrctaaattctatttaaaaccctagtggaattcttaatctaagtggtgagttcacttttagctttgctatttaatgtaaacatttgtgttatgtataggctattatatatatatatgacacacgacattaattgaaaaaaatcaaagtttcctaaaaatcggaatgatagattaacagatgcaaatcaactggcc

SEQ ID NO: 14611 - DNA, 660 bp, Homo sapiens
atggagtttgaatatatatgaggaatatatatggagtatgaatatatatggattttgaatatatatgaatacttatggagtaaatactgattgcatttatggcaacatattcattaataactgaaacctaacatgagcactgctgctaggttgtgtggtaattacagttcagttattttagaaattgctgaaatgttttccagagtgtctctatcattttacattcctyctagcaatgtatgagtgatgcagtttctccacatcttccctagcaagcaatattttcgctaatttttgtttgtttgttttagccattctttttgttgttgtcgttgttgttgttggagacaggatctcgctttgtcacccaggctggagtgcatgcagtggcatgatcatggctcactgcagccttggcctcccaggctcaaatgaccctcccacctcagcctccagaggagctggaactacaagcgcatgccaccacgcccagctaatttttgtatttttttgtagacacggggtcttaccatgtttctcaggctgatactgaactcttggactcaagagatccacctgccttggcctcccaaagggctggtattacatgtgtgagccactgcaatttttcctcttattgatggtgcttttttttttgag

SEQ ID NO: 14612 - DNA, 569 bp, Homo sapiens
cgattctcctgcctcagcctccggagtaggtgggactacaggtgcatgccaccacgcccagctaacatatatatatatatatwttttttttttttctgtatttttagtagagatggggtttcaccgtgttagccaggatggtctcgatctcctgacctcatgacccacctgccttggcctccccaagtgctgggattacaggcctgagccactgtgcccggccctagaatttttcaaaaactaatatccttctttagtttccaaagctattatagcattgagtaagttctgaaagcattttttcaaatttttcaaaaagtaatatccttcttcagtttccaaaactattatagcattgaataagttctgaaagagcatttttaggaaggaatacttatttgctatattaaacaaatattgccgcatacacaaatattttctgctacttaagaaaattttttaaaaagtgtaattctccagcattgagactttaagcagtgtttgcattatagactagttcaaatggagtaatatctaagagaaaatactacagactgaatgttaagata

SEQ ID NO: 14613 - DNA, 542 bp, Homo sapiens
gttctttgctctcattctctctctctctcttattttatttttttttacgctctttcctgtatgctgaagttgatgttttatatatacacatatatttttttagccaggtcttctcagtctgtcacaccctggctggagtgcaggtacatgatcagcagtgagctgtgaccacacacgttcactccagcctgggtttgacagtgtgacacacggagatcagggaagagagattcagaaagacagagagacagagacccagactaaaacagaaagacagagagaggcagagaaatagagacagagagagatacagttaattgtgattttaattaccttttatttttgttcactcccacttatttatttattggtaatattattgtccattatcatttctttcttattatttactgtcggttatttattaattttgaggcagatgttggctgccgagcattggacttggctgccagcttgccayttctaaggtctaccagatagctctcaccagtagtagtgttcaggtaaggcagagggatgca

SEQ ID NO: 14614 - DNA, 389 bp, Homo sapiens
attttgaatgggcctaattgctacgacgtcagttacaagacggaggagaaagaagacaagacatgaatttaaagaaacttgcttatccaaatcattcttcttttaagaaagctttgtattcattatagctgattataagagttaggacaaatttatgatgtggcagacttgtgttttagcttattagtgtgtctctgtgctgcactgaagcccttgtcatcactgcagtgtacgtagctcccatttatgtactttctatagaatctgaagcctaattttaacattgtatcgttttttatagttattgacactttgcttctatcctatcaattctatctgtaatttatttcaaatcaatttcttgaacaggcaggtaatagcytattata

SEQ ID NO: 14615 - DNA, 624 bp, Homo sapiens
tcacattttwaaacctaatatgaggaaagtattgccatttattctcttaaatgtaataaaaataaatacaacttccaccttgtctacagaaaatttggaggttttgtagcttagatctgaatgtataaaattgcaggaaataaatgtttatcaaaggtttcccaactaagatatgtggtgtttttcttacttacatacccacagacttccgtactcttcagttaccatcaaacttcaacaatgtggggattccacactatttcttactcacagttacttagacaagataacttctcctatttgataagtaagtttctaatatttagaaaactctttcttttgatttgactttcttttcccaccaatgataaaataaaatttttaaaaggcagattaaaaatatttttctgtactatttcttaaataaaaattcttcagtttgtcattaaaagcaaaaaaaaaagttgtttgatttaatcattgggcaggtaatgttaccttcatgagtgtcttttcctgtgctggaaagtgtaagcaactctgaaacgtgagctctgaaggaagctagaaagctcttttgtctgaataaaacatcagtgagcacctttggcagctcatgcttag

SEQ ID NO: 14616 - DNA, 563 bp, Homo sapiens
actaataagtagataatctctatgattgtatccttgcttgaaaaattttacgatgttctgttcagatctatttgttatccattgtggatcacagatacaaaaagaatctggttgctaagcaactagattatatatgatggaactccttgaaagaacttaagtgttaactctttagaaattgagaggtgtctgagacatcgtgaatcccttacttttaaaagtagatatgcattatgctcggaaaagaactacagtgaaaaactgcctcaaaagtagacaaaaatgatctcagaactatttgaataactgctttccaatttagaaaattcagtcattaaaaaaaaattgaaataattgcactgaaaatgataggttagtgctttcttttaagattcccatctctaatgggtttattagccacctcttttctctagtcattgtgtcgttaccaarctcccaaaaccaagtatgtaatgacgcacttagtttccttctgcctttctcacaaaggggctgatctttcaggctttgtttgttttgtctttttttttcatttttttcct

SEQ ID NO: 14617 - DNA, 575 bp, Homo sapiens
aaataatgtttactaaatatctggtcaccttgtgacccaatcaagttgacacataaaaatgaccatcagacacagtgtgcctttaattgcatttgcattgcacatatgaagtttctgcctgtaacaaaaatgttacaatcacttcaattctcacattcaggtattaaagttacttttaaaaatctagaagaatctcaaatccctttaagaatatggtatgaccatagttgkcatcaactgtgggaaaattcagaaaataattgaacaacaaatgtcagtggctgagcagaaatacagcaaaaccatgagccagaggaaaaattagttatgcctctttggtgaaagagaagaaaagaaactaagttcttagagaaactgagctttcagctaaattaaaaagcagttctaacttgactttaatttgagtatggtgaaaagacatatttacaaggatttacaatcctcgttgctgataaagtatgccagctaaggagcctaggcctaaattctaaatctcatctgacttaaagctttccaaagtagcctaattttaaatgtatttcagatctattttt

SEQ ID NO: 14618 - DNA, 816 bp, Homo sapiens
aagttaaaagagaaatttttttaaaaaagaaaatgtggtacatatataaaatggagtactattaagccataaaaaagaatgagatcctgtcatttgcaacaacgtagatggaactagaggacatttattaagtgaaataagccaggcacagaaagacaaacttcatatattctcacttatttgtgggagctaaaaattaaacaattgaactcatgaagatagagagtagagtgatggttaccagaggttaggaagggttccggggaggagtggagttgttaatggttgcaaaaatatacagaatgactaggacctagtatttgatagcaaaatagcatgactacagtcaactataatttattgtacttytcacaataactaaaagagtataactggattgtttataacacaaaggataaatggtcaggtgatggatatcctatttattgtgatgtgattgttacatattatatgcctgtatcaaaatatgtaccccataaatatatacacttactatgtacccctaaaattaaaaattaaaaagtgaaattatgagcaattcataaggtattaaatgtagaagtagaatatataaatgttatgtacatttttaaattattttatgtatttattaaaatagcatttagctatgttgcccaggctggtcttgaattacttggctcaagtaatcctcctgcctttatctttaatgttttcacatgagaggattgactttgtacttgtagttttctatatagcaaatttttacaaaaagtctaagcataatttgtattaaaaagtatttctaatttaaat

SEQ ID NO: 14619 - DNA, 816 bp, Homo sapiens
aagttaaaagagaaatttttttaaaaaagaaaatgtggtacatatataaaatggagtactattaagccataaaaaagaatgagatcctgtcatttgcaacaacgtagatggaactagaggacatttattaagtgaaataagccaggcacagaaagacaaacttcatatattctcacttatttgtgggagctaaaaattaaacaattgaactcatgaagatagagagtagagtgatggttaccagaggttaggaagggttccggggaggagtggagttgttaatggttgcaaaaatatacagaatgactaggacctagtatttgatagcaaaatagcatgactacagtcaactataatttattgtacttttcacaataactaaaagagtataactggattgtttataacacaaaggataaatggtcaggtgatggatatcctatttattgtgatgtgattgttacatattatatgcctgtatcaaaatatgtaccccataaatatatacacttactatgtacccctaaaattaaaaattaaaaagtgaaattatgagcaattcataaggtattaaatgtagaagtagaatatataaatgttatgtacatttttaaattattttatgtatttattaaaatagcatttagctatgttrcccaggctggtcttgaattacttggctcaagtaatcctcctgcctttatctttaatgttttcacatgagaggattgactttgtacttgtagttttctatatagcaaatttttacaaaaagtctaagcataatttgtattaaaaagtatttctaatttaaat

SEQ ID NO: 14620 - DNA, 573 bp, Homo sapiens
tacaataatgatttatttgtttggaattctgtgtcctaagtcaagcaaataagatataaaaaattacacaaacataaatttcaaaatgagagaaaacttacaactcttgacttccaagacatttagcaaagctaaagaagttggaatttaaaagtggaaaaacataagaaaaatagactaacaaattaagattttcatatctattagtattacatttttcttagattttcacatgctatggttttaatgctccaccaaaatttaygttgaaatttaattgctgttgtaagtattaagaggtaagacctttaggggacaactaggtcttgagagctctgtcctactaaatgggactaatgccattgtctcaggagtgggttagttataactggagtgggtttctgagaaaaggataaatttgggctagtgttctccctctgtctcatgagctttcttcatatgatgccttccatactaggatgactctagtcagaagctggcaccaaactcttggacctcacagcctccagaaccatgagtcaaataacctaatattttatataaattacccag

SEQ ID NO: 14621 - DNA, 611 bp, Homo sapiens
tctctgacttccaatcagaccaaaccagctagagctccacagttctatttagagccctatacttggttgcttctgctgctctcagaaacaatctatgcagtggcttgctataatgctaggccctccacttggctctatggatcaagtttcgctaggttattttgtgtccctctcagattctggctatagtagaaggcacaattcagaccaattctgctgaaatttaacattctgcttcctagaacagacccattatttcttaatattagcaaaaaaaaaaaaaaaaatcatttacatgagttaggaaacaccttaccacaaaatkacaagatgatcactgaacattcactaagataggacgcagtgacctaatacaactagaaatagaagaaatttgaccttacaaagaagtcttcacctccaaagaggggaagatgctaaaacaggaaggctaaaaggctaatggaatgctttttgcaaaaatggacgactctaatgagcatgttggtattgaaaggtgagagggagcgtgaaagcatgagcgaaggtgatttgggcttcacagttagtgagacctgggcaaggatgtctctccagggcgtgtgtgagag

SEQ ID NO: 14622 - DNA, 556 bp, Homo sapiens
cactgtatattttaatcagtatcttagaaaacttgttgtaccattttgtgcatgagtgccttaataaatattatctgataaatctcactgatataagtggtactaaacatttttcttttagtatttttgaggctaatattattagcatgagagattatggaggaaaaacagcttaaagcaaatacaaacattcaaaattatgcggactatgaaactttaaagtaaagcatgtaatttatttttcccctatgtttgatatctagcagaaaaaaaaatccaactgaattaagaatggtaatccagatagatgactgtccttttggccccagatggctctgacataaaactcatcccttcattggcttccaaacagcatctaataatagcagtataattgkttttttataattttattcaagatatgtggggttacaagaagggtcaaattgcattgtacactgaatactgcattttatttgaataattccattgtcattgttttttctctaatttgttatttatttatttatttatttatttatttatttatttattt

SEQ ID NO: 14623 - DNA, 535 bp, Homo sapiens
tttcctaggaatcatctgttatccatttcctataacccagctgtgtatttctgttggaaggtattacctttataatcagacagagcttcagggagccctgtggagtgggcagcatcccccagagggccaaggggagayattccagacagtcttccagcagagaagtttgggaagatgctgatttcatctgtccagtcctaaagcaatgcactaatccaaaattaaacgaaaacaaaaatattcaccaggcaaaggagtgtgaaaaatccccatttctgtctctctctcctcatcagcagtggaaaccggggcttcctagaagaaacgatgcactccccacctccctctgtttgtgctgcagtgaaaactgacacgagagattcattggaacatgtgccctcgttccactctcatcagcccaccgcggggacaggagctgttcatctttttggctctgctcgcagcctccagaacacttatgaggggcaccttgtgggcaccgtggttggatgaggcccctggggctcttccagag

SEQ ID NO: 14624 - DNA, 548 bp, Homo sapiens
tgaagcagcagaagatggtcaggacaaggaagtgcaaagccaggaaatgggaacaggatcccaggcagggctgaggtcccaagggagcaaggacagagccagagactggggctggggtcagagttccaactcatttggctgaggaggtgagcagtgggccaagactcctacactctctgcttttaggcaattaggcctcatttctgggagaaaaacacagctacaaatgggcctggttttgcaggtcaggagcacacaagggcgtgaatcccacagagcaggcccagaaatagcgtgggagagactctgattcactgtgtgcagtgaggtgccagcctagttaaagcaccctgtcggccaggcgcggtggctsatgcctgtaatcccagccttggggaggccaaggcaggcggatcacctgaggtcaggagtttgagaccagcctggccaacatggtgaaaccccgtctctactaaaaatacaaaaattagccgggcatggtggtgggtgcctgtaatccggaggctgaggcaggagaattgcttgaa

SEQ ID NO: 14625 - DNA, 1705 bp, Homo sapiens
agtactcctcccctcccacccctgcaggtcccatctcttatttaatcccaggaaattcactgtataagcaggggtgtggggagggtggctggggcatcccaggcacctggcctagccctccctcctccctcagggccccctcgctgcccagtggcttcaatccggaccaggcttctttaggtgacaggtctgagaggtgtgaggctgtgtttgtgtcatctcccgccctgatgccaggctctgtccctcctgggcacactatgaggaggcctcatagtggagctaccctgagagcaggctccctgcctttggagtcaccactcagagcttggggtgacctgtggaggcagcagcctggagaacaggcgtttcccctcttgccctgatcttccgagttaagctttggcctggctgtgatgtattattagtaataatgcaagcccccttatttattactttttagcagagcccagagctcaacgtattgaactcacatcaccaaatcttctcggccatcgcatgacgatgtttaattcccatttgactaatggagaaaccgagttttagagaggttaagtaacttctgcaaggtcacagagctggtaaataagcaggacacccaggattcccaccctcgactgactccaaaggccatccttttagtagcaggggccccactgtccccctggtcgcccccctgagcggtccacacgccccaccaccagcattacctggaagcttgttagagtcacagaatcccagctccaccctagaatatgaaattggcatccgcactttcatataragaccctggggactcagggtgcattacagtgacaattctccaggacaagtgctacgttcccggagggtggggggtgttggggtgaatggagggggatgagcatgtagaggctctaaggaacccagggaactgggggcaggtgcagagttcgtctgggccagtttggtccagcttaccagatgtttcacttgctgacctccagggccggatgacacctgtgtctagccacatcccggccttcactctggatattcgagaatgttgactccccacttgagaagttcccctacttccaactccctggaccccctcccctcctgctcgtggaggcagctggctgggtctgatctctaggcatttgtgttagccacattaccagaaggggccctgatccagacacccaagagagggttcttggatcctgcacaagaaaataatctggggcgagtccataaagtgaaagcaagttgattcagaaagtaaaggaaaaaagaatgcccttacccaaatgcggccagcaagggaacaccctctctggctgcagcccctctgaatggctcatgtcattgagccttactttctcattacaagtcccactggcagcatgaatggggggtctggagtcccctatatgtgactgtcagaggtgtttgaacaagagcaactccatcttgaatgggggctggataaactgaggctgagacctactggcgccagttatggttaaggcattgtaagtcacaggatgagacaggaggtcagcacaagatacaggttataaagaccttgctgataaaacaggttgcagtaaagaagctggctaaaagccaccaaaaccaagatggcaatgagagtgacctttggtcatcctcattgttcattatatgctaattataatgc

SEQ ID NO: 14626 - DNA, 1705 bp, Homo sapiens
agtactcctcccctcccacccctgcaggtcccatctcttatttaatcccaggaaattcactgtataagcaggggtgtggggagggtggctggggcatcccaggcacctggcctagccctccctcctccctcagggccccctcgctgcccagtggcttcaatccggaccaggcttctttaggtgacaggtctgagaggtgtgaggctgtgtttgtgtcatctcccgccctgatgccaggctctgtccctcctgggcacactatgaggaggcctcatagtggagctaccctgagagcaggctccctgcctttggagtcaccactcagagcttggggtgacctgtggaggcagcagcctggagaacaggcgtttcccctcttgccctgatcttccgagttaagctttggcctggctgtgatgtattattagtaataatgcaagcccccttatttattactttttagcagagcccagagctcaacgtattgaactcacatcaccaaatcttctcggccatcgcatgacgatgtttaattcccatttgactaatggagaaaccgagttttagagaggttaagtaacttctgcaaggtcacagagctggtaaataagcaggacacccaggattcccaccctcgactgactccaaaggccatccttttagtagcaggggccccactgtccccctggtcgcccccctgagcggtccacacgccccaccaccagcattacctggaagcttgttagagtcacagaatcccagctccaccctagaatatgaaattggcatccgcactttcatataaagaccctggggactcagggtgcattacagtgacaattctccaggacaagtgctacgttcccggagggtggggggtgttggrgtgaatggagggggatgagcatgtagaggctctaaggaacccagggaactgggggcaggtgcagagttcgtctgggccagtttggtccagcttaccagatgtttcacttgctgacctccagggccggatgacacctgtgtctagccacatcccggccttcactctggatattcgagaatgttgactccccacttgagaagttcccctacttccaactccctggaccccctcccctcctgctcgtggaggcagctggctgggtctgatctctaggcatttgtgttagccacattaccagaaggggccctgatccagacacccaagagagggttcttggatcctgcacaagaaaataatctggggcgagtccataaagtgaaagcaagttgattcagaaagtaaaggaaaaaagaatgcccttacccaaatgcggccagcaagggaacaccctctctggctgcagcccctctgaatggctcatgtcattgagccttactttctcattacaagtcccactggcagcatgaatggggggtctggagtcccctatatgtgactgtcagaggtgtttgaacaagagcaactccatcttgaatgggggctggataaactgaggctgagacctactggcgccagttatggttaaggcattgtaagtcacaggatgagacaggaggtcagcacaagatacaggttataaagaccttgctgataaaacaggttgcagtaaagaagctggctaaaagccaccaaaaccaagatggcaatgagagtgacctttggtcatcctcattgttcattatatgctaattataatgc

SEQ ID NO: 14627 - DNA, 675 bp, Homo sapiens
aaaacaacccatgttttctccaggtgaaggaattttaacaaaattatttaacatatgaaccttaccttactcaccttcaatcatcaaagtttctgccatagttcttaggaagtatagctagaaatgatgctatgggtcagtagtatgcattcacaaataataatttttrttttgttttgtttttttgagacggagtcttgctctgtcacccagactggagtgcagtggcgtgatcttggttcactgcagcctcctgctcccgggttcaagcaattctccagcctcagcctcctgagtagttgggactacaggcgcccaccaccacgcccagctaatttttgtatttttagtagacacggggtttcaccatattggccagactggtctggactcctgacattgtgatctgcccaccttggcctcccaaagtgctgggattataggtgtgagccactgcgcatggcccacaaataataattttttattccttgctgtattcctttctgccacatatcaacaacttgcctatggaattcagcaattgttcaatggttaaagtatgtgtatacagaaattgtgaattgggctcagtcgtgcactcttacctcccttgctctcttccttcctccctacttctctttctgcctttccttttctgctgaactctatgtaaat

SEQ ID NO: 14628 - DNA, 532 bp, Homo sapiens
tatgatgcaatgttttgttttgtttygtttttgtttgtttttttaatgtgcccttctagatcactctggggctttctcccttggctgtatgtttcagcaggctgatatgaatagactgtgaaactaagctttttttatctggttttcagtggggttcacccaataggagcccctggtaggaagctagaagacatgaagaaagaaaagtcggggtgtttgttccctcggttcatggattggcagtgtctgagctcctcttccatcggccccagctcctgttgggtggccttcccttcagactcaggctgcatggactctttaaacattcccttctctcttcacttcagacgtggtggtggttgggagcctcaggaatgcttgtttcaccctccttggttgaattcccttaaccctgcccatgctttgtgcctctgttgaaactctttaattgcttcttttgagttctgtttcttgccagaactctgcttaatgcaacttcttaaagcccgaaatgaagaaaacaatggaaaca

SEQ ID NO: 14629 - DNA, 531 bp, Homo sapiens
acatgttttaaataactgaggttatattcttaggccaactacacatctattgaatttatttacagtggccacagtgtctcatttggaagatcaatacctcaccaacactgagccayaaaacataaattcttttggataaaagaaagctgcttccctatcactttatggaacttggctcttagcatcatggacctgccatctctcccattggcatgagctttgataatttattttgccaagggcaagatttatacacatgaaccacttttattccaataatgaatgcattactttccctcaaaggtacagggaaaaattactatgaagtcattattctggctcagctgatgggactggggatgagaaaatagtcctttaaagcttgttcaaaattttttagctgtctcgaagccctcattctttgtcaggtatgggagatacacatgccagacattctaggaagaagccttagtcaatcttctgaagagaagtcttaccaatctccatttgatcctcctattggagaggtta

SEQ ID NO: 14630 - DNA, 531 bp, Homo sapiens
acatgttttaaataactgaggttatattcttaggccaactacacatctattgaatttatttacagtggccacagtgtctcatttggaagatcaatacctcaccaacactgagccacaaaacataaattcttttggataaaagaaagctgcttccctatcactttatggaacttggctcttagcatcatggacctgccatctctcccattggcatgagctttgataatttattttgccaagggcaagatttatacacatgaaccacttttattccaataatgaatgcattactttccctcaaaggtacagggaaaaattactatgaagtcattattctggctcagctgatgggactggggatgagaaaatagtcctttaaagcttgttcaaaattttttagctgtctygaagccctcattctttgtcaggtatgggagatacacatgccagacattctaggaagaagccttagtcaatcttctgaagagaagtcttaccaatctccatttgatcctcctattggagaggtta

SEQ ID NO: 14631 - DNA, 531 bp, Homo sapiens
acatgttttaaataactgaggttatattcttaggccaactacacatctattgaatttatttacagtggccacagtgtctcatttggaagatcaatacctcaccaacactgagccacaaaacataaattcttttggataaaagaaagctgcttccctatcactttatggaacttggctcttagcatcatggacctgccatctctcccattggcatgagctttgataatttattttgccaagggcaagatttatacacatgaaccacttttattccaataatgaatgcattactttccctcaaaggtacagggaaaaattactatgaagtcattattctggctcagctgatgggactggggatgagaaaatagtcctttaaagcttgttcaaaattttttagctgtctcgaagccctcattctttgtcaggtatgggagatacacatgccagacattctaggragaagccttagtcaatcttctgaagagaagtcttaccaatctccatttgatcctcctattggagaggtta

SEQ ID NO: 14632 - DNA, 615 bp, Homo sapiens
ggccaagggggctgtagcaggcgggtgagcagtgatgggggcctgagcgyggctggtggccccagaagtggagagcagtagacacaaccaagaggcccttccgggactgaactcaccggccctggttggggccagatctggactgaaggaggcagggaggcagatgctctggggcctgggtgtgtggtgcagcggctgcccagagcaggagcagatcatgctttaggtgtgagctaagtcaaagacagtacccagggctgccactggcaacagcaggtagttgcatttatgggcttggaggcctttaccttttctgtaaagggccagataataaatgtttttggcttggtggctcagatgatctctatggcaactactgaacttggctattgtaacaaaagcagccacaaattatatgcaaatgaatgggagaatggatatggctatgtgccagtaaaactttatttacaaaaacaggctgctaggggctatagtttgctgaccctttttttagagctcagaagtgagacctgagctaaaaatagacatacatttgggaggcacttgtactacgaatggaaatgaaaggcctgggaaataatttttatcatcatt

SEQ ID NO: 14633 - DNA, 1382 bp, Homo sapiens
ggaagtcagaattctatttttttaaattaatcactactattgatttcaatgccattagttttaccatttattaatgcactaaatattaattgagcacctactataacctaagcattagtatcggcactgcagatacagtgtgaactaaaaggatttttttttttttttttttttttttttgagacggagtctcgctctgtcgcccaggctggagtgcagtggcgggatctcggctcactgcaagctccgcctcccgggttcacgccattctcccgcctcagcctcccaagtagctgggactacaggcgcccgccactacgcctggctaattttttgtatttttagtagagacggggtttcaccgttttagccgggatggkctcgatctcctgacctcgtgatccgcccgcctcggcctcccaaagtgctgggattacaggcgtgagccaccgcgcccggccctaaaaggattttagttgcctttttgaggcttacgttctagaaacactgacttaaaatatctaatttttctgctgaatctggcataatcaccaaaaatggttgtacagattcaggaaagaggatgaccatttatttatattgtggcctacatgaatagtatgtttaggagttgtacagtatacagcatgaatggccctattcagtaaaactgacttttgttttaattctagatgatgtacatagcagacaaaacatgcctgttttcattgccttctattggtaaatagataaaccacagtgattccaaaaactgaaatacattcttacatagctaaatatataaataatttatggtaatttgctctgacttgatttccagatgtctcaaaagacttgcttgctttactgagtcttcttttaatatcatcatggccaaagtgaagcatagaaagtcataagaaatagatacagagatcccagataattggtgctaaatactgaaaattgggcactactgccattttctaaaattgatgtcatctgataatcaataagcctttctggctggtgttgattcacatgcttattcaaaatctgattggtagtctacagagagtttataggaataaatgcttcgctaaactcacgttttaaaaactgactggccactagccaaggatgtcagaattgagtcagtttaccatataattcagtataaagtgtattcacttggaaaatatatttttcgctatatattttgctatgtcttttggagaagcatacaaacttttgcttgaatgtttattttttagcccaaactttaaccttaataaatcattcattatctttactacagttgtcttaattggaagaaagagaaacccatacaaattaaagtacgttttttatttgttggcttg

SEQ ID NO: 14634 - DNA, 1382 bp, Homo sapiens
ggaagtcagaattctatttttttaaattaatcactactattgatttcaatgccattagttttaccatttattaatgcactaaatattaattgagcacctactataacctaagcattagtatcggcactgcagatacagtgtgaactaaaaggatttttttttttttttttttttttttttgagacggagtctcgctctgtcgcccaggctggagtgcagtggcgggatctcggctcactgcaagctccgcctcccgggttcacgccattctcccgcctcagcctcccaagtagctgggactacaggcgcccgccactacgcctggctaattttttgtatttttagtagagacggggtttcaccgttttagccgggatggtctsgatctcctgacctcgtgatccgcccgcctcggcctcccaaagtgctgggattacaggcgtgagccaccgcgcccggccctaaaaggattttagttgcctttttgaggcttacgttctagaaacactgacttaaaatatctaatttttctgctgaatctggcataatcaccaaaaatggttgtacagattcaggaaagaggatgaccatttatttatattgtggcctacatgaatagtatgtttaggagttgtacagtatacagcatgaatggccctattcagtaaaactgacttttgttttaattctagatgatgtacatagcagacaaaacatgcctgttttcattgccttctattggtaaatagataaaccacagtgattccaaaaactgaaatacattcttacatagctaaatatataaataatttatggtaatttgctctgacttgatttccagatgtctcaaaagacttgcttgctttactgagtcttcttttaatatcatcatggccaaagtgaagcatagaaagtcataagaaatagatacagagatcccagataattggtgctaaatactgaaaattgggcactactgccattttctaaaattgatgtcatctgataatcaataagcctttctggctggtgttgattcacatgcttattcaaaatctgattggtagtctacagagagtttataggaataaatgcttcgctaaactcacgttttaaaaactgactggccactagccaaggatgtcagaattgagtcagtttaccatataattcagtataaagtgtattcacttggaaaatatatttttcgctatatattttgctatgtcttttggagaagcatacaaacttttgcttgaatgtttattttttagcccaaactttaaccttaataaatcattcattatctttactacagttgtcttaattggaagaaagagaaacccatacaaattaaagtacgttttttatttgttggcttg

SEQ ID NO: 14635 - DNA, 574 bp, Homo sapiens
ttgagggttgttatccctctttcacacaaaaggaaccaagcaattcgtctcaagggaggccataaccatgcaaaagaaggttaaaataaaatytgaacatttaaattatcaactatttataaaactcttctctatagaatcacccattcaccgatggtttcagacagctgaaggtttccgtaagtacaatttccctttgagcatctacacaaaaagggagaactcttaaaacagtatgctgggcccctatgggtgtgtgttttggcctagtctctcatcgtgataagtctagttaccttggcagtcagacaaaggagttttagagaagacactcatttccaatttgggatctggcaaatacaagtcttctgcagtttgttttataaaatgaaacaattattcctgagcactgtgttaggtggagtacagggggttggaaaaccatgtgcctattcctagatttttagcctcaacagctggcaggcaaatccttggaacctgctgccaacactgcaggtccagggcaagctgatgcctcgaacccacttatcctcctttctccaagtgaccactg

SEQ ID NO: 14636 - DNA, 574 bp, Homo sapiens
ttgagggttgttatccctctttcacacaaaaggaaccaagcaattcgtctcaagggaggccataaccatgcaaaagaaggttaaaataaaatctgaacatttaaattatcaactatttataaaactcttctctatagaatcacccattcaccgatggtttcagacagctgaaggtttccgtaagtacaatttccctttgagcatctacacaaaaagggagaactcttaaaacagtatgctgggcccctatgggtgtgtgttttggcytagtctctcatcgtgataagtctagttaccttggcagtcagacaaaggagttttagagaagacactcatttccaatttgggatctggcaaatacaagtcttctgcagtttgttttataaaatgaaacaattattcctgagcactgtgttaggtggagtacagggggttggaaaaccatgtgcctattcctagatttttagcctcaacagctggcaggcaaatccttggaacctgctgccaacactgcaggtccagggcaagctgatgcctcgaacccacttatcctcctttctccaagtgaccactg

SEQ ID NO: 14637 - DNA, 574 bp, Homo sapiens
ttgagggttgttatccctctttcacacaaaaggaaccaagcaattcgtctcaagggaggccataaccatgcaaaagaaggttaaaataaaatctgaacatttaaattatcaactatttataaaactcttctctatagaatcacccattcaccgatggtttcagacagctgaaggtttccgtaagtacaatttccctttgagcatctacacaaaaagggagaactcttaaaacagtatgctgggcccctatgggtgtgtgttttggcctagtctctcatcgtgataagtctagttaccttggcagtcagacaaaggagttttagagaagacactcatttccaatttgggatctggcaaatacaagtcttctgcagtttgttttataaaatgaaayaattattcctgagcactgtgttaggtggagtacagggggttggaaaaccatgtgcctattcctagatttttagcctcaacagctggcaggcaaatccttggaacctgctgccaacactgcaggtccagggcaagctgatgcctcgaacccacttatcctcctttctccaagtgaccactg

SEQ ID NO: 14638 - DNA, 578 bp, Homo sapiens
caggcacaggcctccatgtcaggcaaatttatttatttatttatttatttatttatttttatttttgtagagataagatctgactctattgcccaggttgatcttgaactcccaacataaagtaatcctcttgcctcagcttcccaamgtgttaggattataagtgtgagccattgtgcctggccctgatgttaacttttagtcagtaaggaaaagtagcctcttcaaaattacttaaagccaaaagaaatatcattataacatgctaattttcatctttaatttgagaaacaaatgcaacgtatatataatagaagatacatccaccaaaataaaaaaatatattcagaagcttagaagttccatactatgtgctccttaagtcacatttgataagtttattatttccacagaggtatagtttgttcagctctatcttgacaaagaaatatcctgctttggaattactgtcttaatgaataattgcacagaatataaaaatagaatattatcataatgacagactaggaagtaactgattcatattcccctgtagcaacaagaattctgaacccatc

SEQ ID NO: 14639 - DNA, 918 bp, Homo sapiens
aaatggaaagatatatatatatctatggaggcacataaaattatgacattatgtaattgagccagaaaatgtaaggacatgttgatattatatttaaataactttacaatgttacaatcttctgcatctctaaaatgcaagatataaactagaatggtattgaattattttacagcgttattaccccatgattcctaagaaattaaatgtataaaaatgttatttgctagttgggagccacttactctcttttataaaatgttgcatctattttttttaagcaagcattcacaggttgtttcaaaaaacatgcttagaagtagttgtcccatgtaaacatagttgaggcataacagtaagttttcttgtcagaaagagatagaatatataacaacttagatactataaagtctttatacactgtctacattaaaattaaaatgacatgrttaattgcataagaatactttggatttctataacttaatattataggtttttaaaaataataatctgttaagaaaattgtaaagacacacgtaaaaaagtatgtatgcaggttttaggtataactattttctactattttgcaatcagaagcaaatatctatgtgtgcttttatgtgtgtgtatttgtgtgtgtatgttttattctaataggtttagcatatcttttgaattgtaatggttaattttataaattcaacagcccatcaaataaggttggcgagtaaaaagcagctaagtttattttggttactttagctaatgttgaaatgggttgcattggtagactatgttattgagatacaggtgaacttactgtgacacagaagattgctttgttttttgacagaattatgtttgcaggaggatctcaggagatgcctgtgtgtatgaaagacattggtaatacca

SEQ ID NO: 14640 - DNA, 533 bp, Homo sapiens
ttctggatgctaaatttatgctctgaaaatacataaagaaaagtccttgatcacagagaatattctggaaagaaaggtagatacatacatatttacatacatgcacataacaatataataagaataattttaaaatttggcttctgaggatttgtgtgatgtatagacagaaatgtcaagagataaaattatatctttcttagctcactttgagtttatrtacttaacttttgatctacaagttagcagtcatctgtccaattcaaaattaaattcacatatgccaactcaaagtagcaatcttctgtccaactaaaataccatctacagtctctttctcttcccaagtggtacattttgctcatttaccttgacttgtcttgctttaactctgttttcttgggtcactggtctctaccaatgttcaccagactgcagattactctctcttctccatctttttttctttcacgaagaatcattaatgaccactatccttacaaaggagaaatggtcttggaatcacaacctca

SEQ ID NO: 14641 - DNA, 533 bp, Homo sapiens
ttctggatgctaaatttatgctctgaaaatacataaagaaaagtccttgatcacagagaatattctggaaagaaaggtagatacatacatatttacatacatgcacataacaatataataagaataattttaaaatttggcttctgaggatttgtgtgatgtatagacagaaatgtcaagagataaaattatatctttcttagctcactttgagtttatatacttaacttttgatctacaagttagcagtcatctgtccaattcaaaattaaattcacatatgccaactcaaagtagcaatcttctgtccaactaaaataccatctacagtctctttctcttcccaagtggtacattttgctcatttaccttgacttgtcttgctttaactctgttttcttgggtcactggtctctaccaatgttcaccagactgcagattactctctcttctccatctttttttctttcasgaagaatcattaatgaccactatccttacaaaggagaaatggtcttggaatcacaacctca

SEQ ID NO: 14642 - DNA, 351 bp, Homo sapiens
acacacacacacacacacacagacacacacacacacacacagatttcctgttgtcctgtgaccctcccactccagtccctgactcaggacacagtagaacaaaagaactcacgatgccggtttcagtgtcataaacaatagatatgggccggcacagtggctcatgcctgtaatctcggcactttgggaggccgaggygggtggatggctcgaggccaggagttccagacccacctaggcagcatggccaaactctgtctctataaaaaatacaaagattagccaggtgtggtgacatgtacctttggtcccagatacttaggaggctgagcggggaggatcacctgagcc

SEQ ID NO: 14643 - DNA, 509 bp, Homo sapiens
caagtgaatacctgtatctgctctgggtgttagccagaaattacttgttccctttcacagtatttgcatgycatgatgtttaattttatgtgtcaacttgattgggtcataggatacccagatatttagaaaaatattattttcactatgtttgtgagggtgtttctggatgatattaacattttaattggtagactgagtgaagcagattgccctccttagtgtgggtaggcatcatccaatcagttgaaggcctgaatagaataacaggctgaataagtgggaacttctcctgcctgactaccttagagctaggacatcatttttcccatgcctttagactcgaactgaaccatcagtacttcctgggtcttgagcctgctggctgtcagactaggacatgccaccaattctcctggatctctagcttgctgactgcagatcttgaaacttttcagcctctacaatcatatgagccaatttcttatgacaaatctgtctgtcaatta

SEQ ID NO: 14644 - DNA, 516 bp, Homo sapiens
gttggccaggctggtcttgaactcctgtcctcaggtgatccaccygcctcagcctcccaaagtgctgggattacaggcgttagtcaccgcacccagccccttttgcctttaaaaacctgcttgtaacaaaggccgaaaggagcactccccaaggccactgggaagtgtgtcccaggtgacaatcctcaatcctggcccaaataaactctctatataatttaacctcagtttcttaaatatagctacttatttcaatagtttaacagaaacatcaaaaacagtgccttcatgcagagtaactggggtaaacatgtaatatttatggggtctaaggactgctggggcgttcgccatccattctcctggggatgagcccagcccagctttctggttgggtgagaaggtgtccccaactcttgcctccttcagcatccagggcttgtcctagctcccttgggacctatgaggcttgaggctgcctttgcttcttttaacttctttttatttcagtctctt

SEQ ID NO: 14645 - DNA, 516 bp, Homo sapiens
gttggccaggctggtcttgaactcctgtcctcaggtgatccacccgcctcagcctcccaaagtgctgggattayaggcgttagtcaccgcacccagccccttttgcctttaaaaacctgcttgtaacaaaggccgaaaggagcactccccaaggccactgggaagtgtgtcccaggtgacaatcctcaatcctggcccaaataaactctctatataatttaacctcagtttcttaaatatagctacttatttcaatagtttaacagaaacatcaaaaacagtgccttcatgcagagtaactggggtaaacatgtaatatttatggggtctaaggactgctggggcgttcgccatccattctcctggggatgagcccagcccagctttctggttgggtgagaaggtgtccccaactcttgcctccttcagcatccagggcttgtcctagctcccttgggacctatgaggcttgaggctgcctttgcttcttttaacttctttttatttcagtctctt

SEQ ID NO: 14646 - DNA, 674 bp, Homo sapiens
ttagactcaacaattgttaatttttgccatatttatgctcctctctatcttgctctctctctctctgtgtgtatgtgtgtgtgtgtatacgtgtgtgtcttctgcttcctcttcacattaaaatacatgaattttgctttgagggaaatggattacccattcttagtaatgtgcctttggggaattgacggcctcaattctggcaagctcttttgcaggaactatcagagaagacttcacttccttctctgcatgatgcagtacamggaagtgatgctcaaactgctgcagccattttacatccatgaacagagagctcagagctgccaagggcccactatgagacaggcagcactggaggaatcagattgtagagacaggcaggacttgggtgcttgatggcattgtttgcgtctcccctgaaatcatctttagacttttcttttaggtaagaaaataatttcctttttttggaaaatacttaagagtgtcagtaaaagaccagtggagaggacccacatgagtgccatgacatcttaggtgtgttaaatggcatttggtctgtgaatgatgacagagtgaatgatgctcatatatcatacccgtcttcttcatgtgccatcatcagttttataataatacagagagtgatgatttataataagagcactatc

SEQ ID NO: 14647 - DNA, 674 bp, Homo sapiens
ttagactcaacaattgttaatttttgccatatttatgctcctctctatcttgctctctctctctctgtgtgtatgtgtgtgtgtgtatacgtgtgtgtcttctgcttcctcttcacattaaaatacatgaattttgctttgagggaaatggattacccattcttagtaatgtgcctttggggaattgacggcctcaattctggcaagctcttttgcaggaactatcagagaagacttcacttccttctctgcatgatgcagtacaaggaagtgatgctcaaactgctgcagccattttacatccatgaacagagagctcagagctgccaagggcccactatgagacaggcagcactggaggaatcagattgtagagacaggcaggacttgggtgcttgatggcattgtttgcgtctcccctgaaatcatctttagacttttcttttaggtaagaaaataatttcctttttttggaaaatacttaagagtgtcagtaaaagaccagtggagaggacccacrtgagtgccatgacatcttaggtgtgttaaatggcatttggtctgtgaatgatgacagagtgaatgatgctcatatatcatacccgtcttcttcatgtgccatcatcagttttataataatacagagagtgatgatttataataagagcactatc

SEQ ID NO: 14648 - DNA, 534 bp, Homo sapiens
ccttgaccattatttctagtgttttcagcctagcgcaaaagtctgggtatgtgtgagaattctcccagatttttttttaaaagaagcaaaatttagtcatctgaacatcctgagagtgtcagtgtggcattgataattgtgagtacagtatatccagtgtgaatttttgtaggcctgaggatgagttgacccaatttaaatggaccaaagttaattcactccaatttactcagaaatgcttatgtataaaaccaagactccagggtccaagaatgagaatgtatttcccagtagtcagtttactttattaatggtatagaattagccatcaaagaactgccttccacatgrtcattgtatcctagacagttgcaaacaaaagaacttgcagtaaaatctgcaatcacttagtgaagtcagcagccgcttttgttaattattagccaatacaaagttaaggtgctatgaatctgcacccggaaaaccctaccacaaacaaaacagcactaacaagacggagctgaatgccattca

SEQ ID NO: 14649 - DNA, 582 bp, Homo sapiens
tttatgaggtaaacattgctatgaagctaacgtttaaaagaaatgggcttataagtgcctttttaaagctttgacgtaaacaatgtctaatttagttcaacccacgggtatgatttatcagcactgttctcattagctttttctatatttttaaaaataatttatttggtacagctttccataagcatttagagaactgtagcaaagaaagtatctccaaaatgaagtcaccaaggggcttttgtgcagtcacagaactaagcaaaactttcagatatttgctgttagaaaactggtcactattctggctagactacaaagctattttgctaagctgctattcacaacaaagttctgactctgataggtaccacagttctcctgttcacattctttggttctatcctcaccctcacccagactgctccccactaaatttcagaatatttctgggtgaaaaraggttttattagaaaaaataatacattaggtatacttctatcatgttgaaggaaatgagctgaaaataagaaaatattcaaatacttgctttatttgcttttatggattttttttattata

SEQ ID NO: 14650 - DNA, 633 bp, Homo sapiens
tttgtaggagttctcaggcctgctgatcattatatattcccccagaaagatgagcagagattgctggatacactgaagtcgccaataagccatcagaactggtgaggctttcagaagccagccacggcgtcagacatcaatcaaaactgacacagcttggaaaaatgccagtccttaagaacactrtgatatttttcttttcaaataattaattgcaccaatcaagggaagtcagtgtgcattaagttatatttttaaattcccattcaagtgacagccacgtgcagcagaacgagcacgcggcagaaaataggggtggggggggaacacacgtggccccagggcctggcccccgccgtgcaggacatggggtccccaagggctggccctcactgtgcaggacgtggggttctctgggccagcttctccccactacgctgggagctccgtgaaatgaggggcaaataaaattaaggtttggggctttttaaaaaaaaacctaattactgggccgggcatggtgctcacacctgtaatcccagcattttgggaggccaagacaagagaaacacttatgcccaggagcttgagaccagcctggacaacagagtgagaccccatctctagaaaaaa

SEQ ID NO: 14651 - DNA, 636 bp, Homo sapiens
ggctgcgcctgcgtcccctgccctgtgacggtagagaggtactgccatgtggacgacagaggtgtggggtgtcacgcctgcagcagacaggaagcccacaggcgtccacctcctgccaggactgaccaacagcctcggccagcccgagggcccttctagaagcctgcacagacctcaagcgcctccaggacgggacacacacccattgggtcattggtggaaggcggcacagctgtgtgcgagagcaccagcacacggaggcccaggcgcacggggaggcgggagagcggggycacggtgcttctgctgacacccagccacgcagacaccacggtgaggttttgcaaagtacaggggtttgccgaatccagcaacttttctccacactaaaagcatttcaacgagaatgatgactgcctgccgcccggcctgccggcggcctctccgcagttcctctttttaatgcacagtttaagtggctctcattaaagctctaacaaaggcgcacattttaagtgattagcaccaataaggcgccagcacattaatgctctctccataggctccacaactctcccggtgagcccatttggagcacagctattcattttccatattactcgcacaccccttcca

SEQ ID NO: 14652 - DNA, 539 bp, Homo sapiens
gaataatgcatttatggctgggcgtggtggctcatgtctgtaatcccagcactttgggaggctgaggcaggtgatcacttgaggtcagaagttcaagaccagcctggccaacatggtaaaaccccatctctactaaaaatacaaaatgtaggtgtggtggtacacacctataatcccagctactcgggaggctgaggcaggagaatcatttgaacccaggaggtggaggttacagtgagtgagatcacaccactgcactccascttggggaacagagcaagactgtcctgtctcaaaaataataaataaataaaagaataatatatttaggatacattaagcaaatatcagctatatttatcattatatgtgtattcttaccattgttatcatgctttgttctattagatgatattaccgacactaataacaacaacaggatcaagacatctagttttttactttggaaactgactggccaggacaattccaaagcaagtaacagaaagtggcccctcagtacattctagacattaatg

SEQ ID NO: 14653 - DNA, 505 bp, Homo sapiens
ttacttttcccttcccagcccctcacctcaagaaacactttaatagatatgtaagaacagtattttatgtagatttggtgggggggtgggtatagattttccagagagccgcttcagaatccaggactattttgtaagtactgttactgagctctgcttttgcctgatgacattttatctattaatagcrttcattagtgactgttgaatggatttttcatgtacttatacacgacataggaagtgaaaaaggagttgtctatgacatttgtctcatgatttatttgatatttattggagccagactagaatctggacatgttaaaaaaatcagctcattttgatgccacttattactagtcaagccaccttacttactgtagagaaattaataggctttatgtgcaaaggctactaatggtggcaaacagaaggcaaaagcagtgataagaagaagaacaaagctattgctagcactgcagctcacctattctaatagccactg

SEQ ID NO: 14654 - DNA, 505 bp, Homo sapiens
ttacttttcccttcccagcccctcacctcaagaaacactttaatagatatgtaagaacagtattttatgtagatttggtgggggggtgggtatagattttccagagagccgcttcagaatccaggactattttgtaagtactgttactgagctctgcttttgcctgatgacattttatctattaatagcattcattagtgactgttgaatggatttttcatgtacttatacacgacataggaagtgaaaaaggagttgtctatgacatttgtctcatgatttatttgatatttattggagccagactagaatctgracatgttaaaaaaatcagctcattttgatgccacttattactagtcaagccaccttacttactgtagagaaattaataggctttatgtgcaaaggctactaatggtggcaaacagaaggcaaaagcagtgataagaagaagaacaaagctattgctagcactgcagctcacctattctaatagccactg

SEQ ID NO: 14655 - DNA, 1864 bp, Homo sapiens
tcacttcattctttgtatttgtgtctatgcagtatactctcttggtgaaatgtgtatacatttttgtcagacttactgaaatatgattcacataccatacaattcatcattttaaagtgtacaattcaatagctttcagtctactcacagatatgtgcaaccatcaccatggtcaattttaagacatatttatcaccttggaaagaaagcaccaccccttagctatcacaacctgtgcattcttctccccagctctaagaaactactaatctaatttctgtctctatagacttgcctctactggatatgtcatataaatgtggtctttcgtgtttggcttctttcacttagcacatatttttaaggttcacccatgtagcatgtatcagaacttccttttttatggctgaataatattctatcatacatttactcttmatatctctgcctgttacagatatatgtataatatttagcaaaattttctgaactaaaatttaaatttagttagccttcaccttcccactgataaattctgagaggaatttaggcaatccactgtatattttatctacataacgtcatatgttcatcttttggaaacatctgcgttacagatagcaactgacagctcttacacggatgcctggtcttatataaatccaatattatggttatctatcttttgtccacagcatctatgggttttaacaatttaaagcatgtgaacatttaaagcttatattcctcttataccataacactctccataacagtatgcatatgattagtattttttctatatgccaatcagttatcccaaccacaaattttatgccatcgctaaacaacagaattcagtctcttgagccctgatgctcatgattatcccagacagacatgtttgtgcatcttcataaattattactgccttactagtttcaaataatctccaaatattgattattaaatgcaaacatgagttatgacatttggtaaacttaaatattgtttcatcagagaaatgaaaaacttaattagaaatcgtatctagtacaaaagccattaacatagaaaatctgagatccgtttaataattaatcgagccaacatggtgacttagggcttatggaaatattagaggcaagaaagctaattttattggtgcattacttgggataatttaatgtcattcagagggtggcagatttttcacttttagccttaggttagagtaactattagattttaaaaagtagcttttcataataacgagagttcattcaaatagatttccatgtcacttgaaattaccaatttgtataaatttcattaataaaattttatatcactttttgtaatctttctaaatgaaaacaagctgtttcattcattcagcgaaacatattcagaagcccctactctgtaagagcactatgctgagagctcagagacgcaaggatggagatcaactaaacaaggttgaattgacgtggtccttcctgctgtaccttccagccggccgtcaaagtgccataacttaggacagaaaatgagagttctaaacttaatttctcagtgccatgagaactcatagaaagaagtagtgttcagaaaagttgtgatatttaacttccatctaaggcgttcactcttggatgggaagaagggaaaaggaattctatacagaaggaacagcattagcaaataaataaaaataagaagtcagaggaataatgagtgcagtgccctttggcttgagcaaagtgtttatgaacagaagtagtggcttaaagctggaaagaaaggttgaagataatgatgaaggggcttgaatgccaagtgaaggccttgggcctttgca

SEQ ID NO: 14656 - DNA, 1864 bp, Homo sapiens
tcacttcattctttgtatttgtgtctatgcagtatactctcttggtgaaatgtgtatacatttttgtcagacttactgaaatatgattcacataccatacaattcatcattttaaagtgtacaattcaatagctttcagtctactcacagatatgtgcaaccatcaccatggtcaattttaagacatatttatcaccttggaaagaaagcaccaccccttagctatcacaacctgtgcattcttctccccagctctaagaaactactaatctaatttctgtctctatagacttgcctctactggatatgtcatataaatgtggtctttcgtgtttggcttctttcacttagcacatatttttaaggttcacccatgtagcatgtatcagaacttccttttttatggctgaataatattctatcatacatttactcttaatatctctgcctgttacagatatatgtataatatttagcaaaattttctgaactaaaatttaaatttagttagccttcaccttcccactgataaattctgagaggaatttaggcaatccactgtatattttatctacataacgtcatatgttcatcttttggaaacatctgcgttacagatagcaactgacagctcttacayggatgcctggtcttatataaatccaatattatggttatctatcttttgtccacagcatctatgggttttaacaatttaaagcatgtgaacatttaaagcttatattcctcttataccataacactctccataacagtatgcatatgattagtattttttctatatgccaatcagttatcccaaccacaaattttatgccatcgctaaacaacagaattcagtctcttgagccctgatgctcatgattatcccagacagacatgtttgtgcatcttcataaattattactgccttactagtttcaaataatctccaaatattgattattaaatgcaaacatgagttatgacatttggtaaacttaaatattgtttcatcagagaaatgaaaaacttaattagaaatcgtatctagtacaaaagccattaacatagaaaatctgagatccgtttaataattaatcgagccaacatggtgacttagggcttatggaaatattagaggcaagaaagctaattttattggtgcattacttgggataatttaatgtcattcagagggtggcagatttttcacttttagccttaggttagagtaactattagattttaaaaagtagcttttcataataacgagagttcattcaaatagatttccatgtcacttgaaattaccaatttgtataaatttcattaataaaattttatatcactttttgtaatctttctaaatgaaaacaagctgtttcattcattcagcgaaacatattcagaagcccctactctgtaagagcactatgctgagagctcagagacgcaaggatggagatcaactaaacaaggttgaattgacgtggtccttcctgctgtaccttccagccggccgtcaaagtgccataacttaggacagaaaatgagagttctaaacttaatttctcagtgccatgagaactcatagaaagaagtagtgttcagaaaagttgtgatatttaacttccatctaaggcgttcactcttggatgggaagaagggaaaaggaattctatacagaaggaacagcattagcaaataaataaaaataagaagtcagaggaataatgagtgcagtgccctttggcttgagcaaagtgtttatgaacagaagtagtggcttaaagctggaaagaaaggttgaagataatgatgaaggggcttgaatgccaagtgaaggccttgggcctttgca

SEQ ID NO: 14657 - DNA, 497 bp, Homo sapiens
ccaactagggctttagtcaaacatttkctagaatgaatattttttttttcttatggccttaaccaaaaattcaactagaatttctcaaaaacttacttatacttgtgtatgtagacacaattcaagatggtcctaaaatcatctaattaagcaccggcgaagtgtattttctattaatattttctggtactaagggatgatgttgtatgacacataaagccaaacgtaaatatctggagtcttacattcacttcagaaacacatgtaaatattcagaatctacactgtattcactaccatttggggggtataaaaaggggaaggaaagaaggaagaaacggagacaccgtagagctcacaggtttaaggggttgttttgagatcctattttaaaatacagcataaaagggagattagatttcaggatagattcatttcctattaatatggacagacccacataaaacttcacaaataggttagagcctaggaaaaaa

SEQ ID NO: 14658 - DNA, 513 bp, Homo sapiens
agccaggcttctctactgcataaaactgaaggctgaggaagaactccacttatgtgaaatctaaaacacatgggaaccactgcccagagtacagctccatagaaatgcttagctacagtggaagggagagcaatggcaacacctcaaacaggagcaaagtcaaatcccaccctggctgggtggtgaatgaatccattgtcattgagattgggattctgtractaccaggaggggatctgagtttagactgtacttcttgatggcttggagggaaccacaagatttctagacagaagagatcagtagaaaaagagagaggactaacatttcggttaaaatatgctctcaagctaaagttacaaatcatattaggaaaactgacagcaaggaagtcacaatatcaaaaataagaaggttaatttattcaaaatgaactttttctgaaagcacaatgctaaataactctaaaataaatatgctttgcatttttagaaagataaaaacatctgtaaa

SEQ ID NO: 14659 - DNA, 547 bp, Homo sapiens
atacatttctgcaggtgtcattatgtatctgtgtgtcctcagccccagatgggcccagacagggctttgggccagggattccagagtctgcatcaggggtccttggcctgaggtcggaccctcaagacgtccctccttggggagaaagatccatgaggcatcgagccagggctccaagccaaatgaaatgcaaactcacagagacgtgtttccaagacgggaatgcctaattttctcaggtgatactcatttatgcttttagggcacatttctattctttctctgtccctctcagaagagcctagagatgccgctgtcctctccgtcctcgctgcctctcagcactgcaggagggaaggtggaattcacacccagacccagggcttcaggtcttgtcccacygactggtcttaaactacaagttgcttcttctctttagcatcttctttgagttcccactgtccccagcttcactttcttgctgactcagccttttgctgcttaaaacagagaagaaaggcagccagttagaacgctgactccatgc

SEQ ID NO: 14660 - DNA, 503 bp, Homo sapiens
catctaaacatattcaaacaggaaaagtacagtaaaaatttggttttataattttatgggactgccattgtatatgcagtccattgttgacagacatcattctgcagcatatgactgtatttgaatgtgttgctctctggtttaaaacctagaaatcacctgtgaattacctctggcactataaaaaataatttccaggttctagtggaaggattaaatcagtcttttgtttgttggtgtgttggcagggaggggacttatttatgaaaagctctcratgttactttgttgtgaagttatgcagccagggctaactactggggtagagaataatgtccacccttcttagcaaacacacacaaatgcctgcaatctgaacctcctccacctatcgctctggccacatccagacatatggaggaactcaaaattccccaaataagtcggactcttgtggcctgggccttggctcatgctgtctgtagacctggaattcctgcctg

SEQ ID NO: 14661 - DNA, 491 bp, Homo sapiens
taaagcttgagaaattcatccaaactttatggtggcctgatttatgcaggtgatggaaagtagcaagagtagggcaaccatatttaaaccacccacaccagtggtatgccagacacctgtggaaattccatgctgggctttgagggcyggggactctaagattccagtgtgggctgggaaggaagaacacctgaaccagcagctattgttcccctctcttgctcactgacagctgcaaggtacactttcaggaccaccaggcaatggcatgctggtggcagaggaggtgacactcacctcataggaagttccttataaaagcaggtggacatgtcatctcaggctcatcaaatctacctgccatcatagatagaccacagccaggccaaccatgccttctagtatggaccttgttattttgagtttgcttttaaattagaaaaggggatttatttgacattgttttctctattatcctttatatttattta

SEQ ID NO: 14662 - DNA, 1792 bp, Homo sapiens
gcaatgttacaactattcttctctgtaaattgtcacaccttaagttccttaggatggctcaactctttcactcttccagcatgggaaataattgtttaataaaaataaaacataacaatggattcatgatccaaagaagacaaaatagaagattttttgttttctatttctcttgactcctcagctaattgtaccaccactaaacctttctttatctcccccacctcacagggttaatctctaatgctgctcaacattttatatctatgtggaaactaccatttaactaaattttgtttgatgtggaaaaaaaatcattctttcaatatttgataattttggatagctaagcacttttgttagatttttatgttcttcaagagaaataaaatagaggcagtggaaaggattacttctcagtccccaggggttgaatactcacccggggactcagtgcatttgattcctgatactcatttaagaccccttttcatgcttacttactaggacttcttaaatttgtcttcttccaggtgaaataattcaaaacaactcaagaatggaactactgattcattaataaagaacagaaaataaacaagggcaaaacttgagaacatmaatacacaaaaacacaaagactcacttaatttttatctcagataaaaaaggaaagtagtttgctgaatttgcctttctactaagaagtctttgctttcacttggttgggagggtacttaacatgaagaagcaggaattcctggaaaacaggccccttctaccctaacgtgttttctgtggggccgttcagttattgtccctaagcagaggtaactgggaaatagccttgggctgtaattttcccattttaccttaagcaatatcataactagcaacgtgtgacacccaggaggtttgttttctagataacactctctttacaatataagggctctttgagagagttaatataataaatcctcagagtaaagtctaggatactctttagaaattaaatattacttgaaacatatgaaagccattcagcaggtgacagagctatttacaaatagattaaacatctttcaagtaaattattataacattcattaatgttgttagtgtttatgcactaaaacatagcccaaaataacatattttatcctcatattgtaacataatttatgttacacttgaacaaaaatccctcaatgtgcagctgattttaaatccatcatcagttctactagtcaaaagtggagaatctttttgcatttgtacctctggtagccaaagtaatgtatcttctctccatgtttctttatccatccattcattaatgtgctgttttcacattgcttcgttttgaaattgtccatggcccagctgaaccaagcagaaagatttcccaggctggttgcattgtatttcaccttctgttgtcaattcctttggtctcgtaagaataaaatcctttggtctcataagaataaaatgagtttttttttcctttgagcatgtagaatatttttggttattgttcaaaagtgaagccacaaatcaaaaaatgtttttcttctttgtttatttgctcctctagcaatgtatatttcatatatgtgagtgcttatgtctaaatttcaggtctacattcagcacagcatcttcatggacagctaatgagattgcagatggtaaagcagaacatgtgtggtcatgggatgaaactactccaaatatcttattaaacccttacactcccctctctcacaggcctcctttgcataaacat

SEQ ID NO: 14663 - DNA, 1792 bp, Homo sapiens
gcaatgttacaactattcttctctgtaaattgtcacaccttaagttccttaggatggctcaactctttcactcttccagcatgggaaataattgtttaataaaaataaaacataacaatggattcatgatccaaagaagacaaaatagaagattttttgttttctatttctcttgactcctcagctaattgtaccaccactaaacctttctttatctcccccacctcacagggttaatctctaatgctgctcaacattttatatctatgtggaaactaccatttaactaaattttgtttgatgtggaaaaaaaatcattctttcaatatttgataattttggatagctaagcacttttgttagatttttatgttcttcaagagaaataaaatagaggcagtggaaaggattacttctcagtccccaggggttgaatactcacccggggactcagtgcatttgattcctgatactcatttaagaccccttttcatgcttacttactaggacttcttaaatttgtcttcttccaggtgaaataattcaaaacaactcaagaatggaactactgattcattaataaagaacagaaaataaacaagggcaaaacttgagaacatcaatacacaaaaacacaaagactcacttaatttttatctcagataaaaaaggaaagtagtttgctgaatttgcctttctactaagaagtctttgctttcacttggttgggagggtacttaacatgaagaagcaggaattcctggaaaacaggccccttctaccctaaygtgttttctgtggggccgttcagttattgtccctaagcagaggtaactgggaaatagccttgggctgtaattttcccattttaccttaagcaatatcataactagcaacgtgtgacacccaggaggtttgttttctagataacactctctttacaatataagggctctttgagagagttaatataataaatcctcagagtaaagtctaggatactctttagaaattaaatattacttgaaacatatgaaagccattcagcaggtgacagagctatttacaaatagattaaacatctttcaagtaaattattataacattcattaatgttgttagtgtttatgcactaaaacatagcccaaaataacatattttatcctcatattgtaacataatttatgttacacttgaacaaaaatccctcaatgtgcagctgattttaaatccatcatcagttctactagtcaaaagtggagaatctttttgcatttgtacctctggtagccaaagtaatgtatcttctctccatgtttctttatccatccattcattaatgtgctgttttcacattgcttcgttttgaaattgtccatggcccagctgaaccaagcagaaagatttcccaggctggttgcattgtatttcaccttctgttgtcaattcctttggtctcgtaagaataaaatcctttggtctcataagaataaaatgagtttttttttcctttgagcatgtagaatatttttggttattgttcaaaagtgaagccacaaatcaaaaaatgtttttcttctttgtttatttgctcctctagcaatgtatatttcatatatgtgagtgcttatgtctaaatttcaggtctacattcagcacagcatcttcatggacagctaatgagattgcagatggtaaagcagaacatgtgtggtcatgggatgaaactactccaaatatcttattaaacccttacactcccctctctcacaggcctcctttgcataaacat

SEQ ID NO: 14664 - DNA, 1792 bp, Homo sapiens
gcaatgttacaactattcttctctgtaaattgtcacaccttaagttccttaggatggctcaactctttcactcttccagcatgggaaataattgtttaataaaaataaaacataacaatggattcatgatccaaagaagacaaaatagaagattttttgttttctatttctcttgactcctcagctaattgtaccaccactaaacctttctttatctcccccacctcacagggttaatctctaatgctgctcaacattttatatctatgtggaaactaccatttaactaaattttgtttgatgtggaaaaaaaatcattctttcaatatttgataattttggatagctaagcacttttgttagatttttatgttcttcaagagaaataaaatagaggcagtggaaaggattacttctcagtccccaggggttgaatactcacccggggactcagtgcatttgattcctgatactcatttaagaccccttttcatgcttacttactaggacttcttaaatttgtcttcttccaggtgaaataattcaaaacaactcaagaatggaactactgattcattaataaagaacagaaaataaacaagggcaaaacttgagaacatcaatacacaaaaacacaaagactcacttaatttttatctcagataaaaaaggaaagtagtttgctgaatttgcctttctactaagaagtctttgctttcacttggttgggagggtacttaacatgaagaagcaggaattcctggaaaacaggccccttctaccctaacgtgttttctgtggggycgttcagttattgtccctaagcagaggtaactgggaaatagccttgggctgtaattttcccattttaccttaagcaatatcataactagcaacgtgtgacacccaggaggtttgttttctagataacactctctttacaatataagggctctttgagagagttaatataataaatcctcagagtaaagtctaggatactctttagaaattaaatattacttgaaacatatgaaagccattcagcaggtgacagagctatttacaaatagattaaacatctttcaagtaaattattataacattcattaatgttgttagtgtttatgcactaaaacatagcccaaaataacatattttatcctcatattgtaacataatttatgttacacttgaacaaaaatccctcaatgtgcagctgattttaaatccatcatcagttctactagtcaaaagtggagaatctttttgcatttgtacctctggtagccaaagtaatgtatcttctctccatgtttctttatccatccattcattaatgtgctgttttcacattgcttcgttttgaaattgtccatggcccagctgaaccaagcagaaagatttcccaggctggttgcattgtatttcaccttctgttgtcaattcctttggtctcgtaagaataaaatcctttggtctcataagaataaaatgagtttttttttcctttgagcatgtagaatatttttggttattgttcaaaagtgaagccacaaatcaaaaaatgtttttcttctttgtttatttgctcctctagcaatgtatatttcatatatgtgagtgcttatgtctaaatttcaggtctacattcagcacagcatcttcatggacagctaatgagattgcagatggtaaagcagaacatgtgtggtcatgggatgaaactactccaaatatcttattaaacccttacactcccctctctcacaggcctcctttgcataaacat

SEQ ID NO: 14665 - DNA, 1792 bp, Homo sapiens
gcaatgttacaactattcttctctgtaaattgtcacaccttaagttccttaggatggctcaactctttcactcttccagcatgggaaataattgtttaataaaaataaaacataacaatggattcatgatccaaagaagacaaaatagaagattttttgttttctatttctcttgactcctcagctaattgtaccaccactaaacctttctttatctcccccacctcacagggttaatctctaatgctgctcaacattttatatctatgtggaaactaccatttaactaaattttgtttgatgtggaaaaaaaatcattctttcaatatttgataattttggatagctaagcacttttgttagatttttatgttcttcaagagaaataaaatagaggcagtggaaaggattacttctcagtccccaggggttgaatactcacccggggactcagtgcatttgattcctgatactcatttaagaccccttttcatgcttacttactaggacttcttaaatttgtcttcttccaggtgaaataattcaaaacaactcaagaatggaactactgattcattaataaagaacagaaaataaacaagggcaaaacttgagaacatcaatacacaaaaacacaaagactcacttaatttttatctcagataaaaaaggaaagtagtttgctgaatttgcctttctactaagaagtctttgctttcacttggttgggagggtacttaacatgaagaagcaggaattcctggaaaacaggccccttctaccctaacgtgttttctgtggggcygttcagttattgtccctaagcagaggtaactgggaaatagccttgggctgtaattttcccattttaccttaagcaatatcataactagcaacgtgtgacacccaggaggtttgttttctagataacactctctttacaatataagggctctttgagagagttaatataataaatcctcagagtaaagtctaggatactctttagaaattaaatattacttgaaacatatgaaagccattcagcaggtgacagagctatttacaaatagattaaacatctttcaagtaaattattataacattcattaatgttgttagtgtttatgcactaaaacatagcccaaaataacatattttatcctcatattgtaacataatttatgttacacttgaacaaaaatccctcaatgtgcagctgattttaaatccatcatcagttctactagtcaaaagtggagaatctttttgcatttgtacctctggtagccaaagtaatgtatcttctctccatgtttctttatccatccattcattaatgtgctgttttcacattgcttcgttttgaaattgtccatggcccagctgaaccaagcagaaagatttcccaggctggttgcattgtatttcaccttctgttgtcaattcctttggtctcgtaagaataaaatcctttggtctcataagaataaaatgagtttttttttcctttgagcatgtagaatatttttggttattgttcaaaagtgaagccacaaatcaaaaaatgtttttcttctttgtttatttgctcctctagcaatgtatatttcatatatgtgagtgcttatgtctaaatttcaggtctacattcagcacagcatcttcatggacagctaatgagattgcagatggtaaagcagaacatgtgtggtcatgggatgaaactactccaaatatcttattaaacccttacactcccctctctcacaggcctcctttgcataaacat

SEQ ID NO: 14666 - DNA, 1792 bp, Homo sapiens
gcaatgttacaactattcttctctgtaaattgtcacaccttaagttccttaggatggctcaactctttcactcttccagcatgggaaataattgtttaataaaaataaaacataacaatggattcatgatccaaagaagacaaaatagaagattttttgttttctatttctcttgactcctcagctaattgtaccaccactaaacctttctttatctcccccacctcacagggttaatctctaatgctgctcaacattttatatctatgtggaaactaccatttaactaaattttgtttgatgtggaaaaaaaatcattctttcaatatttgataattttggatagctaagcacttttgttagatttttatgttcttcaagagaaataaaatagaggcagtggaaaggattacttctcagtccccaggggttgaatactcacccggggactcagtgcatttgattcctgatactcatttaagaccccttttcatgcttacttactaggacttcttaaatttgtcttcttccaggtgaaataattcaaaacaactcaagaatggaactactgattcattaataaagaacagaaaataaacaagggcaaaacttgagaacatcaatacacaaaaacacaaagactcacttaatttttatctcagataaaaaaggaaagtagtttgctgaatttgcctttctactaagaagtctttgctttcacttggttgggagggtacttaacatgaagaagcaggaattcctggaaaacaggccccttctaccctaacgtgttttctgtggggccgttcagttattgtccctaagcagaggtaactgggaaatagccttgggctgtaattttcccattttaccttaagcaatatcataactagcaaygtgtgacacccaggaggtttgttttctagataacactctctttacaatataagggctctttgagagagttaatataataaatcctcagagtaaagtctaggatactctttagaaattaaatattacttgaaacatatgaaagccattcagcaggtgacagagctatttacaaatagattaaacatctttcaagtaaattattataacattcattaatgttgttagtgtttatgcactaaaacatagcccaaaataacatattttatcctcatattgtaacataatttatgttacacttgaacaaaaatccctcaatgtgcagctgattttaaatccatcatcagttctactagtcaaaagtggagaatctttttgcatttgtacctctggtagccaaagtaatgtatcttctctccatgtttctttatccatccattcattaatgtgctgttttcacattgcttcgttttgaaattgtccatggcccagctgaaccaagcagaaagatttcccaggctggttgcattgtatttcaccttctgttgtcaattcctttggtctcgtaagaataaaatcctttggtctcataagaataaaatgagtttttttttcctttgagcatgtagaatatttttggttattgttcaaaagtgaagccacaaatcaaaaaatgtttttcttctttgtttatttgctcctctagcaatgtatatttcatatatgtgagtgcttatgtctaaatttcaggtctacattcagcacagcatcttcatggacagctaatgagattgcagatggtaaagcagaacatgtgtggtcatgggatgaaactactccaaatatcttattaaacccttacactcccctctctcacaggcctcctttgcataaacat

SEQ ID NO: 14667 - DNA, 507 bp, Homo sapiens
atatcttgccagaattgtaaacttcaaattaggatgcaaactcaatgtcactcaagaaagtggtcatgaggctggacttagtcattggtaattattctggattcatcagcaagggcagagctgattttaccatttcataacacaccacttctgaacagtttcctcccaggtgcttaagaatgaagaagtggctgtcaggactgcactggcaatatttttcaaaatgtggatccctggtcatattaaaataaaagtttttcccccatcaggttagcagaaatgtaaaatggagattggaatttagatgtagagttttgtgtcagaaccacgtttgatagtcagttacacacatctggcccacagttaagaatgtaaactaacagcattaagagccagacatcctgggttcaaataccagctctgctrtataaggcttggcctttctgtgcctcagttgtctcacttgcaaaatcaggatgatatcatcctccaaggattactgtgagg

SEQ ID NO: 14668 - DNA, 521 bp, Homo sapiens
cccctgaaaacccaactgccagttctaggtagagtccacaaccggagtgagaacatcctctatgccttttaaccaataaatggtgctttttccaagacctcccccggcccaatcagcatgcactcccccattctgagcccttaaaaatcctatactcagccacacagatggctgccggctttcaggccccctttcacacagaagtctacccacttcaggtcccctcttgtgttgagagcttttctgccgctcaataaaattcttctctgcctttctcactctctgctgtccamacaccttattcttgttggttgtgggaactccccaagctgcgggtggcagtaacaaaggagatgtaaggcacccctgttcactgggctgcaggcagcaggaaccagagagaactgtaacatttccagggggctcagacctcaggactccccaagcaaaagctgtaacaccctttggggctttgcagttgctgtcatctccaagtattctggcgccaccacctccccttc

SEQ ID NO: 14669 - DNA, 521 bp, Homo sapiens
cccctgaaaacccaactgccagttctaggtagagtccacaaccggagtgagaacatcctctatgccttttaaccaataaatggtgctttttccaagacctcccccggcccaatcagcatgcactcccccattctgagcccttaaaaatcctatactcagccacacagatggctgccggctttcaggccccctttcacacagaagtctacccacttcaggtcccctcttgtgttgagagcttttctgccgctcaataaaattcttctctgcctttctcactctctgctgtccacacaccttattcttgttggttgtgggaactccccaagctgcgggtgrcagtaacaaaggagatgtaaggcacccctgttcactgggctgcaggcagcaggaaccagagagaactgtaacatttccagggggctcagacctcaggactccccaagcaaaagctgtaacaccctttggggctttgcagttgctgtcatctccaagtattctggcgccaccacctccccttc

SEQ ID NO: 14670 - DNA, 1179 bp, Homo sapiens
ggagaaagaagcctagttgctgcttaggaagacaaggagtaatagctgaagcatgtggcttttttttctttctttttttttcttaagatggagtcttgccctgtcacccaggctggaatgcagggttcaagcaattctcctacctcagcctcccaagtagttgggactacaggcgcgtgccacagtgcctggataatttttgtatttttagtagagacggggtttcaccatattggccaggctgatctcaaactcctgacctcgtgatctgcccgcctcggcctcccaaagtgctgggattacaggcgtgagccactgcgcccggccatggcttttatttctgaggtgataaaaatgttcaaaagttgactgtggggatggttgcacatatctctaaaacactaaaaaatattgaattgtaaattttatatgggtgaattgtacggtgcatgagtcgtacctcaatgaagctaggtagaaagtaaactctattgtcttctctttcccctggcgaaacacctcagcttagggcaagtctgaacagaaaccttgcctctcagtgaaggaaataggagtcatctcaacttcacttgtagtccatctaatcatctatgccaccacagctctctgatatctttaaaacgattacatttccaatttctttactttttgaactacttgttccagtgggagtgatgcagtgccactgcctcctatattctacctagaatcagaacttcagctccaatccctttggcctgatttctgctcctcaagtaccccaaagyctttcccacttcactgtacttaccatttcctcctcttgaaatggttttctttcaaatagccgctaggcattttctcattacattcatttcttcagggttaatgccaccaaaaagccttccttcccagactaccctaactagctggcgcacttttaccttctatcactctgtaactcccttccctgctttattttcttcgtggcacttgtcactctctgacaccctatatagtatatatgtttaatgactatttcccttactagaatgtaagtgccaggggctactttgtctttcttgctcttcactgaattcccaacacaagcattggaactagtgtatagtgcattcccagtgaatactgagtgaaagaatacactccactttcaatggg

SEQ ID NO: 14671 - DNA, 414 bp, Homo sapiens
cccccacacacacacacaatgcctgcagagttcaaagactgaagaaagtaagtgccctgtgcattttctaataaagaggctttgttgaccctggaagggaccgctgcagtagaatagtggagaagatgccaaactgcaggaggctggagagagaatgaaatgaatgaggaggggagcatggacaactrtaccgcgggtctgaagaatgtagaagatatagggaaatacttagaagcaaacatgatggttgagagtggtcatattgattggttaaagataggacagaaataaataagtgtaagtgttgctggggaagtgagccggtaggatggagaattttcaggtagaggagagagggataagctaactgaggtaatggctgagctaacagagtacaggtagaatggttgggca

SEQ ID NO: 14672 - DNA, 535 bp, Homo sapiens
gctatgctagggcccacaagggctgacaggcaggttttcatgaagacaaatagcctgatacaatgtgcaatgctacattctgtcctcaaaaccttttcctcacaccatatagacccaagctcaatgtgttgtatcccagattgtctttacagtatcggggcctgcaaaagtgatgtactcagataaggagattcttctgaggtcagtctctttagcaacttaatacttcccaatgtctatctctgacagtcatagccacacaactgccacactcctacatgaataaggacttggttaagatttaagacctctaagtcctgcagtggtcataacttgatccctgtttctgacagccatctgtctgyggggaagaagcaaccttaacatattaaatgacagaaagtgtttaagatttattctgtcttaagctcatattttcttggctcccacagctgaacttttgcattttcattttaatcctacaggctatgttatattttgcttacctattttgaaatgtgatttttatttatct

SEQ ID NO: 14673 - DNA, 523 bp, Homo sapiens
tgttggttctaggaattctcaaaccttgcaatcctgagctcacttctagagcaaactcctctatctsctcacactgccattgtaaaataccatatgctgggtggtttaaatgacagaaattgatttctcacaggtcttgaggctgggaagttcaagatcaaagtttcagccaactcagtttctggtgaggtcctcttcttgacatgcagatggctgtcttctcactatgtgcagacatggcaaagagagaaaaaaagcacactctgatgtcactttctcttttataaggataacacttttaccagttcagggcttatggatggttaactttatgtgtcaacttgaatggggcatcagaatgtccagacaactggtaaaacattacttctgggtatgtctgtgaggatgtttccaaaagagattacatttaaatcattagactgagtaaagaagatttgccctcaccagtgtgggtgggcatcatccaatctgttgagggcttgaatagaacaaaaaggcaaag

SEQ ID NO: 14674 - DNA, 578 bp, Homo sapiens
taaaataaaataaaaataaaaataaataaaaacaaaaagagaaagtaatagtgcaccaaggaaccatgaagaaaagaaaaagaaaaatgtccaggcctcttgacatccactttgtttaaattctcatcattggcattccaagaaagaaagtctcttctcattcatatttgctagcttcagttcatgtatggatcaccaataacaaaactgttagagcrtaatttattttatatatttatctatttaaatttagagatatcactatgttgcccaggctggtctggaactcctcaagcaagactcctgcctcagcctccgagtagctgggactacaggtgcgcaccactgtgccgggctaacagtatattttaagtagcaaagaaaaacatgcaagtcagctagcatctatcctccaacagtacagtatctttcctctaataaatatattgatgcctccctcttcctgaactgtccctccctgaggatttttctgttcaaagctccacttctaactgagtgtttgtgggtcacctcacttgctctcaacaataactgcagaattccaaaacaaactgttt

SEQ ID NO: 14675 - DNA, 531 bp, Homo sapiens
tggaactgcaacaatatttctcaagagtttacaattgtcttacaccaccaatcagaaatatgtttggggaggcatgggtggcagggggcaacatgagccatttccatactgctccccatactacctgtgttggttccttaagcaaaaaggcctccagccttcattaaatcctataaacaaacattacatcccatgaatcattatcaactttcttcctttactccacctcccccattttatcttcaattctcaggctatagaatagacaagttttagaatatacttcagccaaagcagaargattttcatagatccaatatgcaaatagttctgctgtgacatagatcagaaattgtctgttccttaatatttgggggtggaggcaacaaaactgaagcatatttctgattggttagccattttggcctgtttcctcttgcatgttttttagggagagagggaaacagtcctgtatttcttctgatgccctttggggaagccgacgaccactgggcatttctcactgttact

SEQ ID NO: 14676 - DNA, 978 bp, Homo sapiens
ttgaagaccaagggagaccccttcgctacaaaaaacaaacaaacaaacaaacaaacaaaatttgccgggcatggtggcacgtgcctgtagtcccagctgctgggaggctaacgtgggaggattgcctgggcctgggagttcaaggctgcagtgagctgccctgtctcaaataaatagataaataaagccttagaactgcatactcctcaacccaacaactccacttcttggaatctattcaaaagtgataaataaggatatacaaagatacttatgccaaaggatagtcactgaagagctgcttattaaaaacaaaaacaaacmaacaaaaataaacctgtaaataaactaaatgccccaaagttgaggattggttaaattaagtatgatatatccgtgcgaaaagtaccacttggcctttcaaaattataagtaaatatttgctcacatggaaagatggtcttcttttctttatgtattctgattgattctatacttcactgttacaaaataaagagaccacccagtgttgctgagtcccagcctagctacaactttctgtccccttccctaccaaatagaattagccagaccttgaaggacttgagtgtcacttgaaacttcttgcctcagaggaaacaaaataatggggggaaacaaagaattcatgggttccagaattccaaaaatattcagccaacactcggagcgtggagtgaaaagagcgagttgctaaacagcaccatcctctgctcccattcttataaatatgtgtacaaatatatattaacttaacaaatatttaatccacaactataaaggagagctgtgctgggtgccaagaatatcccaggaaacaagacagccatggcctcagaatccagggagattggtacctgtctgtctgagcacctgtgtgtacatgggatgaggtacaaaacagtgaccctaaagcaagggtcttccgacaggattgag

SEQ ID NO: 14677 - DNA, 978 bp, Homo sapiens
ttgaagaccaagggagaccccttcgctacaaaaaacaaacaaacaaacaaacaaacaaaatttgccgggcatggtggcacgtgcctgtagtcccagctgctgggaggctaacgtgggaggattgcctgggcctgggagttcaaggctgcagtgagctgccctgtctcaaataaatagataaataaagccttagaactgcatactcctcaacccaacaactccacttcttggaatctattcaaaagtgataaataaggatatacaaagatacttatgccaaaggatagtcactgaagagctgcttattaaaaacaaaaacaaacaaacaaaaataaacctgtaaataaactaaatgccccaaagttgaggattggttaaattaagtatkatatatccgtgcgaaaagtaccacttggcctttcaaaattataagtaaatatttgctcacatggaaagatggtcttcttttctttatgtattctgattgattctatacttcactgttacaaaataaagagaccacccagtgttgctgagtcccagcctagctacaactttctgtccccttccctaccaaatagaattagccagaccttgaaggacttgagtgtcacttgaaacttcttgcctcagaggaaacaaaataatggggggaaacaaagaattcatgggttccagaattccaaaaatattcagccaacactcggagcgtggagtgaaaagagcgagttgctaaacagcaccatcctctgctcccattcttataaatatgtgtacaaatatatattaacttaacaaatatttaatccacaactataaaggagagctgtgctgggtgccaagaatatcccaggaaacaagacagccatggcctcagaatccagggagattggtacctgtctgtctgagcacctgtgtgtacatgggatgaggtacaaaacagtgaccctaaagcaagggtcttccgacaggattgag

SEQ ID NO: 14678 - DNA, 472 bp, Homo sapiens
tttactatgaacgtatgtattgttctttaatgacatctatttgttcattccaaaaatatttattgagcacggactctgtgccagttattagttagagtaataatagctgctgtggcaaatgartttcctcacctaagaaaaataaaagttaattattttttctccacataaaggtctagaatgttctgccgcatgccttccatgtcatgattcagggacccaggctccttccatcttgtggctgccccatccactaggttctcagactctttcatttccaactggtggttgttgaaagagagggtgatgaaggtgtaccccacttacatcttacccactttcacctagaagtggcacatatcacttttattgacgtttcattagcaagaattgtcctgcaacacacttgtaggaaggcagctgggaaatgctgtccctggctgtgcacagggacatatgtattttatgtatt

SEQ ID NO: 14679 - DNA, 529 bp, Homo sapiens
aagatgggcatctgtttggaagggaaatttttatacactgtagtaatataaataaactacaagtgccacaggaaagartcagacaagtatcataaaggaatctcattgtaaatcatctgaaaagattcattcattaatttgaggaaagccacggaaggtgtttatgagaggtcgccacagaagatggagatttatagccagatatttttctcttcatcttttaaaatcaggcctgtgtatcagttccatgtggaggaattcctgacctctcagtcataccagggtaggttcaatacctctcctcagtttccataataatgtgatccacatttttaaaaaccccaaaaccttgttatgccattgtgtacttttaggcagaaaattgtcttctttatgcaggtatcatattgtaacgtatttcattgaagttgctcaataaactttgaatcaataaaaggatttaaagtcagtgaagagctgatgaatggaagtgttctaaaaatatgtgagacaataagtatgtttgcta

SEQ ID NO: 14680 - DNA, 529 bp, Homo sapiens
aagatgggcatctgtttggaagggaaatttttatacactgtagtaatataaataaactacaagtgccacaggaaagagtcagacaagtatcataaaggaatctcattgtaaatcatctgaaaagattcattcattaatttgaggaaagccacggaaggtgtttatgagaggtcgccacagaagatggagatttatagccagatatttttctcttcatcttttaaaatcaggcctgtgtatcagttccatgtggaggaattcctgacctctcagtcataccagggtaggttcaatacctctcctcagtttccataataatgtgatccacatttttaaaaaccccaaaaccttgttatgccattgtgtacttttaggcagaaaattgtcttctttatgcaggtatcatattgtaacgtakttcattgaagttgctcaataaactttgaatcaataaaaggatttaaagtcagtgaagagctgatgaatggaagtgttctaaaaatatgtgagacaataagtatgtttgcta

SEQ ID NO: 14681 - DNA, 176 bp, Homo sapiens
gccttatgtccaggtaacatttataaatgctataataatattgcttcaaaatatamcctatactaagaaaacaaacttattatatagacattgagccgtgataaattgaatttacaataaaattattttgttattatgtggaaatttttctcttacaccaatttactaatggaaga

SEQ ID NO: 14682 - DNA, 550 bp, Homo sapiens
gaacaactcttctaattgcaaattgcagaaacctgacttaattaccttgaaaataaaaaacaaaacatagtggatgacacaacagaaacacaaaactgcagagtttaagctgaatttagaaacgacataattcaagggcttcagagcatcgatttctctcttttctctgtctcaaattcttttgcttttaatacatatagactttctcaaggcagaagaaacatgccatgaatcacttcatttgtacaaacatagaacttgcsatcacaaatgtgggaaaaaaatcattccctaccaactcacacccaagaaattcatgggaatgtccctgatccagctggagacaaatgcctatccataaaaaaaaaaaattcaggaaaatgggggaccataattagccccacctaagtcctgaaatgcttatgtctagtaatgatgcattttctgtctcctaaagaaagacagagaaagaagtattgggttgagacaatttctatttttcttttacctcagttttctcatctgcaaattgcagataatggtacttatt

SEQ ID NO: 14683 - DNA, 550 bp, Homo sapiens
gaacaactcttctaattgcaaattgcagaaacctgacttaattaccttgaaaataaaaaacaaaacatagtggatgacacaacagaaacacaaaactgcagagtttaagctgaatttagaaacgacataattcaagggcttcagagcatcgatttctctcttttctctgtctcaaattcttttgcttttaatacatatagactttctcaaggcagaagaaacatgccatgaatcacttcatttgtacaaacatagaacttgcgatcacaaatgtgggaaaaaaatcattccctaccaactcacacccaagaaattcatgggaatgtccctgatccagctggagacaaatgcctatccataaaaaaaaaaaattcaggaaaatgggggrccataattagccccacctaagtcctgaaatgcttatgtctagtaatgatgcattttctgtctcctaaagaaagacagagaaagaagtattgggttgagacaatttctatttttcttttacctcagttttctcatctgcaaattgcagataatggtacttatt

SEQ ID NO: 14684 - DNA, 2720 bp, Homo sapiens
tgagggccctagagctggaaggggctgtaaagattgtttaatccaatcctctyacttcacgaatgaagaaactgggattcgagaagtaaagtaatacagtttccatccaaatacatgcctgtggtcctcttcctgggaactgatatagttgcaaggccatagccagaataaaaagtgacctaaatgggctgtactgtatgaaattgtcatctaaagatgtatgcatctttaacagaggttaacaggatggaaaataatccctacccgggttaagttaaaaatccattttttaaaaagaaagaaactcagcttttacaaagtgatgagaaatgatagggattggaatattttcagaggtaagctgtgcctccacttctgactaagacttaatggaacaaatgcattcagggagatgcatggaatttaaacacaattcaacatcagttaattctaagagtaaaggcccttcggtccagttcccttccacctcaatgttaaaggaagctagaaagccaattacattcacagcagggcctctcccctactgcaagggaagaatgtactgcaaattctatgtgtgctttacaagctagtaaaactataattgcaggtgggaaggaacatggcgtctctttgtttctgccaacatttcagtctggtaagcttctctccgcagctgtagaaagagtgtggactccatggttttctttaagcacaaaaatgtgtactccaggattctacaaaatttacagaaagactgctttttgttaaaattgaaaagatgtctgtgcatagcccaccaaaaggtcatgcattcttgcaagaaacaagtggcaagattcagagggtaggtagtaccactcactcaagcgcaggcctagggagagttccttggctcaagagggtgggggctctccaggtgcaattcccctatggagccactggggaggtctggtctaggatcatcctggaggcaaaaggaaatgaagctattctgcattccctaccaaggtgctgctccatatggtgactatatagctgcagctatagcaggtttctatggcctagattcccctacggaacatgagggggaaaactgagacatagcaagcattgcttttgtggcaatggttgtggtttagtgtccacagatgcagtgtcttgatgacgctgaagaaaactcccaggagccgtttatacaaggtccacacctcacagcaacactaatagcaatactctacccctagtaaagtgcctatctcctaagcccttaagtgtcaggcaaagttctaagtgctttatgcatactaactctaaggcctcacaacaaccttcgggggcaggtactattattctcacttcagagatgaagtgcttaaggcacaaagagaagtgacttgcccaaggtcacctaatatttctggggtgagtcggcatttgaacatagacaggcagcctccaaagctgcagtgtgtgaccgctgcagcggccagcacctctgcaatgcccaatgttggatatcatcatcccttaggagacctttgctccaggcagaaactccatcccatgttcacctcacactggcgtgctggcctcctaaaagctcctgacagccatcttaattttgatttctatttaattttctacctcacaaagcaatgtcagggtgagggagtctggtgatacctttagaatatgatttatcaaccaacagcttaagggaatgtagggcttccttgctgccacctgacctttgtcttcagccttcctaatgtttgcattgctgccctgaccttgcaaagtgacctggaatagcttggctgtttccttgtgtgtgtccactttcagagtccagctgtcagcctgtgcaagtctgccaattagtatctcaagggtttgggatggggtctgccgccttttgaggagcacaatctaacactaacctccaaattccttctcgtaattcagcattcattagtttgacggaacaaaagcaggcattctctattataaagcagaggtcaaaactggtggctgtgttttgtttggcctgcagagtgtttaaatattgagaaatttcacataaaaatacagatttccggcttctcttggaaaacgggaagagcagacaactctggggctactgagtaacagctgcccctttcagatatggaagctctctctggttcatctgcacaacctgtctccccttgggcctgcttcagggacagatgccatttgcctggtctctgcaggaataccaatcaacatagctctattctagagccagaattccctcctttaaaacgtgaaatggaccaggcgtgctggctcacgcctgtaatcccagcactttggaaggctgaggcgggcaaatcacttgaccccaggagttcgagatcagcccgggcgacatggcgaaaacacatctctaccaaaaaaccccacaaaaattagctgggcatggtggtgcaagcctgtagtcccagctacacagggggctgaggtgggaggattgcttgagtccaggaattcaaggccagcctgagcaacatagggagactcctacctctataaaacattttaaaaatcagccgtagcgtggtggcgcgtgcctatggtttcagctacctgggaggctgagatgggaggattgctcgggctcaggaggtcaaagctgcagccagccatgatcatgcccctgcactccagcctggcca

SEQ ID NO: 14685 - DNA, 2720 bp, Homo sapiens
tgagggccctagagctggaaggggctgtaaagattgtttaatccaatcctcttacttcacgaatgaagaaactgggattcgagaagtaaagtaatacagtttccatccaaatacatgcctgtggtcctcttcctgggaactgatatagttgcaaggccatagccagaataaaaagtgacctaaatgggctgtactgtatgaaattgtcatctaaagatgyatgcatctttaacagaggttaacaggatggaaaataatccctacccgggttaagttaaaaatccattttttaaaaagaaagaaactcagcttttacaaagtgatgagaaatgatagggattggaatattttcagaggtaagctgtgcctccacttctgactaagacttaatggaacaaatgcattcagggagatgcatggaatttaaacacaattcaacatcagttaattctaagagtaaaggcccttcggtccagttcccttccacctcaatgttaaaggaagctagaaagccaattacattcacagcagggcctctcccctactgcaagggaagaatgtactgcaaattctatgtgtgctttacaagctagtaaaactataattgcaggtgggaaggaacatggcgtctctttgtttctgccaacatttcagtctggtaagcttctctccgcagctgtagaaagagtgtggactccatggttttctttaagcacaaaaatgtgtactccaggattctacaaaatttacagaaagactgctttttgttaaaattgaaaagatgtctgtgcatagcccaccaaaaggtcatgcattcttgcaagaaacaagtggcaagattcagagggtaggtagtaccactcactcaagcgcaggcctagggagagttccttggctcaagagggtgggggctctccaggtgcaattcccctatggagccactggggaggtctggtctaggatcatcctggaggcaaaaggaaatgaagctattctgcattccctaccaaggtgctgctccatatggtgactatatagctgcagctatagcaggtttctatggcctagattcccctacggaacatgagggggaaaactgagacatagcaagcattgcttttgtggcaatggttgtggtttagtgtccacagatgcagtgtcttgatgacgctgaagaaaactcccaggagccgtttatacaaggtccacacctcacagcaacactaatagcaatactctacccctagtaaagtgcctatctcctaagcccttaagtgtcaggcaaagttctaagtgctttatgcatactaactctaaggcctcacaacaaccttcgggggcaggtactattattctcacttcagagatgaagtgcttaaggcacaaagagaagtgacttgcccaaggtcacctaatatttctggggtgagtcggcatttgaacatagacaggcagcctccaaagctgcagtgtgtgaccgctgcagcggccagcacctctgcaatgcccaatgttggatatcatcatcccttaggagacctttgctccaggcagaaactccatcccatgttcacctcacactggcgtgctggcctcctaaaagctcctgacagccatcttaattttgatttctatttaattttctacctcacaaagcaatgtcagggtgagggagtctggtgatacctttagaatatgatttatcaaccaacagcttaagggaatgtagggcttccttgctgccacctgacctttgtcttcagccttcctaatgtttgcattgctgccctgaccttgcaaagtgacctggaatagcttggctgtttccttgtgtgtgtccactttcagagtccagctgtcagcctgtgcaagtctgccaattagtatctcaagggtttgggatggggtctgccgccttttgaggagcacaatctaacactaacctccaaattccttctcgtaattcagcattcattagtttgacggaacaaaagcaggcattctctattataaagcagaggtcaaaactggtggctgtgttttgtttggcctgcagagtgtttaaatattgagaaatttcacataaaaatacagatttccggcttctcttggaaaacgggaagagcagacaactctggggctactgagtaacagctgcccctttcagatatggaagctctctctggttcatctgcacaacctgtctccccttgggcctgcttcagggacagatgccatttgcctggtctctgcaggaataccaatcaacatagctctattctagagccagaattccctcctttaaaacgtgaaatggaccaggcgtgctggctcacgcctgtaatcccagcactttggaaggctgaggcgggcaaatcacttgaccccaggagttcgagatcagcccgggcgacatggcgaaaacacatctctaccaaaaaaccccacaaaaattagctgggcatggtggtgcaagcctgtagtcccagctacacagggggctgaggtgggaggattgcttgagtccaggaattcaaggccagcctgagcaacatagggagactcctacctctataaaacattttaaaaatcagccgtagcgtggtggcgcgtgcctatggtttcagctacctgggaggctgagatgggaggattgctcgggctcaggaggtcaaagctgcagccagccatgatcatgcccctgcactccagcctggcca

SEQ ID NO: 14686 - DNA, 2720 bp, Homo sapiens
tgagggccctagagctggaaggggctgtaaagattgtttaatccaatcctcttacttcacgaatgaagaaactgggattcgagaagtaaagtaatacagtttccatccaaatacatgcctgtggtcctcttcctgggaactgatatagttgcaaggccatagccagaataaaaagtgacctaaatgggctgtactgtatgaaattgtcatctaaagatgtatrcatctttaacagaggttaacaggatggaaaataatccctacccgggttaagttaaaaatccattttttaaaaagaaagaaactcagcttttacaaagtgatgagaaatgatagggattggaatattttcagaggtaagctgtgcctccacttctgactaagacttaatggaacaaatgcattcagggagatgcatggaatttaaacacaattcaacatcagttaattctaagagtaaaggcccttcggtccagttcccttccacctcaatgttaaaggaagctagaaagccaattacattcacagcagggcctctcccctactgcaagggaagaatgtactgcaaattctatgtgtgctttacaagctagtaaaactataattgcaggtgggaaggaacatggcgtctctttgtttctgccaacatttcagtctggtaagcttctctccgcagctgtagaaagagtgtggactccatggttttctttaagcacaaaaatgtgtactccaggattctacaaaatttacagaaagactgctttttgttaaaattgaaaagatgtctgtgcatagcccaccaaaaggtcatgcattcttgcaagaaacaagtggcaagattcagagggtaggtagtaccactcactcaagcgcaggcctagggagagttccttggctcaagagggtgggggctctccaggtgcaattcccctatggagccactggggaggtctggtctaggatcatcctggaggcaaaaggaaatgaagctattctgcattccctaccaaggtgctgctccatatggtgactatatagctgcagctatagcaggtttctatggcctagattcccctacggaacatgagggggaaaactgagacatagcaagcattgcttttgtggcaatggttgtggtttagtgtccacagatgcagtgtcttgatgacgctgaagaaaactcccaggagccgtttatacaaggtccacacctcacagcaacactaatagcaatactctacccctagtaaagtgcctatctcctaagcccttaagtgtcaggcaaagttctaagtgctttatgcatactaactctaaggcctcacaacaaccttcgggggcaggtactattattctcacttcagagatgaagtgcttaaggcacaaagagaagtgacttgcccaaggtcacctaatatttctggggtgagtcggcatttgaacatagacaggcagcctccaaagctgcagtgtgtgaccgctgcagcggccagcacctctgcaatgcccaatgttggatatcatcatcccttaggagacctttgctccaggcagaaactccatcccatgttcacctcacactggcgtgctggcctcctaaaagctcctgacagccatcttaattttgatttctatttaattttctacctcacaaagcaatgtcagggtgagggagtctggtgatacctttagaatatgatttatcaaccaacagcttaagggaatgtagggcttccttgctgccacctgacctttgtcttcagccttcctaatgtttgcattgctgccctgaccttgcaaagtgacctggaatagcttggctgtttccttgtgtgtgtccactttcagagtccagctgtcagcctgtgcaagtctgccaattagtatctcaagggtttgggatggggtctgccgccttttgaggagcacaatctaacactaacctccaaattccttctcgtaattcagcattcattagtttgacggaacaaaagcaggcattctctattataaagcagaggtcaaaactggtggctgtgttttgtttggcctgcagagtgtttaaatattgagaaatttcacataaaaatacagatttccggcttctcttggaaaacgggaagagcagacaactctggggctactgagtaacagctgcccctttcagatatggaagctctctctggttcatctgcacaacctgtctccccttgggcctgcttcagggacagatgccatttgcctggtctctgcaggaataccaatcaacatagctctattctagagccagaattccctcctttaaaacgtgaaatggaccaggcgtgctggctcacgcctgtaatcccagcactttggaaggctgaggcgggcaaatcacttgaccccaggagttcgagatcagcccgggcgacatggcgaaaacacatctctaccaaaaaaccccacaaaaattagctgggcatggtggtgcaagcctgtagtcccagctacacagggggctgaggtgggaggattgcttgagtccaggaattcaaggccagcctgagcaacatagggagactcctacctctataaaacattttaaaaatcagccgtagcgtggtggcgcgtgcctatggtttcagctacctgggaggctgagatgggaggattgctcgggctcaggaggtcaaagctgcagccagccatgatcatgcccctgcactccagcctggcca

SEQ ID NO: 14687 - DNA, 558 bp, Homo sapiens
ctctttgatgggggtgttggggtgggaatcaccatacacctgactggctgagtgtatttcagggatgggacaggsttctcagcacagcatggcaggtcaggcctgggagggccccccagacctccttgtctctaacagcgggtcatggtgagggaggcctctctgtgcccaaggtgaccttgccatgccggtgctctccagctgggtatctgtcccctgcagtggtgggcttcctctaagtggatgttaaaggcccatccagttcatggagagctagcaggtcaccaggtttaaggtgcagaggccctgctctctgtcaccctggctgagcccagtgtgcgggttcctgagggctgggactcccggggccccatgggaaagtgtagcctgcaggcccatacctccccctgtgaatcacgcctggcgggacaagaaagcccaaaacaccccaaacaatgagtttccagtaaaatatgacagacatgatgaggtggaggagaggagggacctggctgggagttggcgctagcctgtgggtgatgaaagccaaggggaatg

SEQ ID NO: 14688 - DNA, 558 bp, Homo sapiens
ctctttgatgggggtgttggggtgggaatcaccatacacctgactggctgagtgtatttcagggatgggacaggcttctcagcacagcatggcaggtcaggcctgggagggccccccagacctccttgtctctaacagcgggtcatggtgagggasgcctctctgtgcccaaggtgaccttgccatgccggtgctctccagctgggtatctgtcccctgcagtggtgggcttcctctaagtggatgttaaaggcccatccagttcatggagagctagcaggtcaccaggtttaaggtgcagaggccctgctctctgtcaccctggctgagcccagtgtgcgggttcctgagggctgggactcccggggccccatgggaaagtgtagcctgcaggcccatacctccccctgtgaatcacgcctggcgggacaagaaagcccaaaacaccccaaacaatgagtttccagtaaaatatgacagacatgatgaggtggaggagaggagggacctggctgggagttggcgctagcctgtgggtgatgaaagccaaggggaatg

SEQ ID NO: 14689 - DNA, 558 bp, Homo sapiens
ctctttgatgggggtgttggggtgggaatcaccatacacctgactggctgagtgtatttcagggatgggacaggcttctcagcacagcatggcaggtcaggcctgggagggccccccagacctccttgtctctaacagcgggtcatggtgagggaggcctctctgtgcccaaggtgaccttgccatgccggtgctctccagctgggtatctgtcccctgcagtggtgggcttcctctaagtggatgktaaaggcccatccagttcatggagagctagcaggtcaccaggtttaaggtgcagaggccctgctctctgtcaccctggctgagcccagtgtgcgggttcctgagggctgggactcccggggccccatgggaaagtgtagcctgcaggcccatacctccccctgtgaatcacgcctggcgggacaagaaagcccaaaacaccccaaacaatgagtttccagtaaaatatgacagacatgatgaggtggaggagaggagggacctggctgggagttggcgctagcctgtgggtgatgaaagccaaggggaatg

SEQ ID NO: 14690 - DNA, 558 bp, Homo sapiens
ctctttgatgggggtgttggggtgggaatcaccatacacctgactggctgagtgtatttcagggatgggacaggcttctcagcacagcatggcaggtcaggcctgggagggccccccagacctccttgtctctaacagcgggtcatggtgagggaggcctctctgtgcccaaggtgaccttgccatgccggtgctctccagctgggtatctgtcccctgcagtggtgggcttcctctaagtggatgttaaaggcccatccagttcatggagagctagcaggtcaccaggtttaaggtgcagaggccctgctctctgtcaccctggctgagcccagtgtgcgggttcctgagggctgggactcccggggccccatgggaaagtgtagcctgcaggcccatacctccccctgtgaatcacgcctggcgggacaagaaagcccaaaayaccccaaacaatgagtttccagtaaaatatgacagacatgatgaggtggaggagaggagggacctggctgggagttggcgctagcctgtgggtgatgaaagccaaggggaatg

SEQ ID NO: 14691 - DNA, 558 bp, Homo sapiens
ctctttgatgggggtgttggggtgggaatcaccatacacctgactggctgagtgtatttcagggatgggacaggcttctcagcacagcatggcaggtcaggcctgggagggccccccagacctccttgtctctaacagcgggtcatggtgagggaggcctctctgtgcccaaggtgaccttgccatgccggtgctctccagctgggtatctgtcccctgcagtggtgggcttcctctaagtggatgttaaaggcccatccagttcatggagagctagcaggtcaccaggtttaaggtgcagaggccctgctctctgtcaccctggctgagcccagtgtgcgggttcctgagggctgggactcccggggccccatgggaaagtgtagcctgcaggcccatacctccccctgtgaatcacgcctggcgggacaagaaagcccaaaacaccccaaacaatgagtttccagtaaaatatgacagacatgatgaggyggaggagaggagggacctggctgggagttggcgctagcctgtgggtgatgaaagccaaggggaatg

SEQ ID NO: 14692 - DNA, 544 bp, Homo sapiens
gataacactttataccaagcaaattggcaaatctaagaagtctcacgacatttgtgttaatgaggaagtgaaacaacagaaagcagtgttcactgatagtggcagtgtacatttgtacaaccatttgggaaataatttctgctaaaagtgaaaatgcttgtactcagcacttctcttgctgaatgctagaggtgtttgcatacatgcataagaatattcactgtagcattttgtaatagtagtagaacaattgggagaaaaaaattttatgtcgattagtaaaaatataaagtargccagatgcagtggctcacgcctataatcccaacactttgggaagccgaggagggtggatcacctgaggtcatgagtttgaagccagcctggccaacatggcaaaacccggtgtctactaaaaatataaaaattggccaggcgtagtggcatgcgcctgtaatcccagctacccaagaggctgaggcaggagaatcactggaacgtgggaggcagaggctgcagcgagccaagatcccgccactgaact

SEQ ID NO: 14693 - DNA, 560 bp, Homo sapiens
ttaagtgagacaaaagtcctcttgggctttcctcagttgtttcttactaaaagttgtccatatccatgaaaattacttttgaaccacagacctgtttttcttctaatgcggatggactagattaatagatgaatgtttaagatgagaagcacttgtacagaagaataagctccacaaacacatacatctaaattattgcctaaaaacaatatcacagtgaaatagactcagattttttcagaagcatgctcatgaacacatgtatgttttagaaagcagattacatgtaaaggacagatttacattgtgagaaattagcttacaaaatgacaaagtggaattaaggtaattattttcytgccttctcagcatacttcctgggcaacttttttaccttttgttcccaagtaccagccctgtatctcttgctttctcatccccagaattctttgggtaccagtgcagagagagaccattttttaatcgttgtgaagggggaacttcaatgtgtatatatttgtttccatataaaatcagaggattagcagtgattgcaacat

SEQ ID NO: 14694 - DNA, 544 bp, Homo sapiens
gggtaaaacatctgaaactgaagaaatattttacatgcaaattcttgctttatacacaacaatttgtcacagggtttgaggatatagrgataaaagatacagaccctgccctcaagaagatttttgtttagataggaaaaattattatcatccaataataccatgtcacaaatgctgggatagagtcaaagattcttgaaaccagtaaatgtttaaagtgagttttcaagatgaccagggttaatgtggtgaggcagaggaggggtgtttccaagggaagagcagtgtgtgggaaagcacggaagagtgagaaggaaacaactacattttatttactttctatgagtataagtccataggatctttatataaagtttccaattcagttgagaaatatataattttttcagttacatattatttttggtttctattgttttacagggtggcctcacaccacttttgcttgctgtacatggacaaaaacagcgaatggtgaaatttttaatcaagaaaaaagctaatttaaatgcacttgataggt

SEQ ID NO: 14695 - DNA, 564 bp, Homo sapiens
caatttgtgagcaaaccttagatttttgcatggcttgaacctactgatacctagtgtctccccaagtggtgcgttgaagtttcagataactagaagtatttcttaaagatgtaaatattccagtaaacattaagctttatttaaactctcaatttataaaataagagtatatattattttgtatcaatttttataaagattatagtcgttatctaacygttctaagtcactcattttaattaaacatgtggatttgtcagcagaacacgacttaaaagtggcttcagaggaaaagcaagaaaggcttgaaagatgtgaaaataaacagccacaggtatataaaaatttaaattttaatttctggcttactattggtttgtttgtttctttttctttaataacatggtatagtccaaatgaagtgaccttctggactatcccttttagaatccaacagataatcatttcatatttaattttaaaacattttaaccagttataaaatttaaaaaattcttacagtctgtagtaactcatagctatctttacccttggaattgaggc

SEQ ID NO: 14696 - DNA, 564 bp, Homo sapiens
caatttgtgagcaaaccttagatttttgcatggcttgaacctactgatacctagtgtctccccaagtggtgcgttgaagtttcagataactagaagtatttcttaaagatgtaaatattccagtaaacattaagctttatttaaactctcaatttataaaataagagtatatattattttgtatcaatttttataaagattatagtcgttatctaaccgtwctaagtcactcattttaattaaacatgtggatttgtcagcagaacacgacttaaaagtggcttcagaggaaaagcaagaaaggcttgaaagatgtgaaaataaacagccacaggtatataaaaatttaaattttaatttctggcttactattggtttgtttgtttctttttctttaataacatggtatagtccaaatgaagtgaccttctggactatcccttttagaatccaacagataatcatttcatatttaattttaaaacattttaaccagttataaaatttaaaaaattcttacagtctgtagtaactcatagctatctttacccttggaattgaggc

SEQ ID NO: 14697 - DNA, 564 bp, Homo sapiens
caatttgtgagcaaaccttagatttttgcatggcttgaacctactgatacctagtgtctccccaagtggtgcgttgaagtttcagataactagaagtatttcttaaagatgtaaatattccagtaaacattaagctttatttaaactctcaatttataaaataagagtatatattattttgtatcaatttttataaagattatagtcgttatctaaccgttctaagtcactcattttaattaaacaygtggatttgtcagcagaacacgacttaaaagtggcttcagaggaaaagcaagaaaggcttgaaagatgtgaaaataaacagccacaggtatataaaaatttaaattttaatttctggcttactattggtttgtttgtttctttttctttaataacatggtatagtccaaatgaagtgaccttctggactatcccttttagaatccaacagataatcatttcatatttaattttaaaacattttaaccagttataaaatttaaaaaattcttacagtctgtagtaactcatagctatctttacccttggaattgaggc

SEQ ID NO: 14698 - DNA, 564 bp, Homo sapiens
caatttgtgagcaaaccttagatttttgcatggcttgaacctactgatacctagtgtctccccaagtggtgcgttgaagtttcagataactagaagtatttcttaaagatgtaaatattccagtaaacattaagctttatttaaactctcaatttataaaataagagtatatattattttgtatcaatttttataaagattatagtcgttatctaaccgttctaagtcactcattttaattaaacatgtggatttgtcagcagaacacgacttaaaagtggcttcagaggaaaagcaagaaaggcttgaaagatgtgaaaataaacagccacaggtatataaaaatttaaattttaatttctggcttactattggtttgtttgtttctttttctttrataacatggtatagtccaaatgaagtgaccttctggactatcccttttagaatccaacagataatcatttcatatttaattttaaaacattttaaccagttataaaatttaaaaaattcttacagtctgtagtaactcatagctatctttacccttggaattgaggc

SEQ ID NO: 14699 - DNA, 514 bp, Homo sapiens
tggccggtcttggtggctcatgcctgtaatcccagcactttgggaggccaaagcaggcggatcacaaggtcaggagttcgagaccagcctggccaatatggtgaaactaaaaaaaaaaatacaaaaatagccgggcgtggtggcaggcgcctgtagtcscagctactcaggaggctgaagcaagagaatcgcttgaaccggggaagtggaggttgcagggagccaagatcgcaccactgtactccagcctgggtgacaagcaagactccatctcaaaaaaaaaaaaaaaaaaagaagaagaagaagaagaaaaggaaataatgaatatgaaagtggacttatagtaacccaccagcctccttgtggattgccttcttccactcagaaaagttgtcatttatttatttgtatgacattgccaattatccctcttgtgttatttttaaaattttcccaccagccgtctaaatgactgtcacctcctccccacgccctaaggcagcaatttctgatt

SEQ ID NO: 14700 - DNA, 513 bp, Homo sapiens
atttacttcattctgctccaagtacctaagggtacaaggaattggaatcttctgccttcctttttaggggacagatgagaaatagagaaagggaagcctctgagaacggggaggtagaagggagagcaaagggtctgttgtaaggggtgtgggagagacagcagrtttggaagcagggtacatccagccctctctggccttcttggatgagcctctctcctcccatctttgggactacaatggggattacctcgtttttgtttttttgaagaaagcatggttacatttgtcttatatattttttaatttgtatgaatttatgggtaacaagtgcaattttgttacatacatagtggtcaaggcagagcttttagggtatccatcacccaaatgctgtagattgtacccattagtaatttctcatcatccccccacaattctgagtccccactgcctatcattccactgtctacatccaggcagacactttttttagcactcacttatgagcga

SEQ ID NO: 14701 - DNA, 513 bp, Homo sapiens
atttacttcattctgctccaagtacctaagggtacaaggaattggaatcttctgccttcctttttaggggacagatgagaaatagagaaagggaagcctctgagaacggggaggtagaagggagagcaaagggtctgttgtaaggggtgtgggagagacagcagatttggaagcagsgtacatccagccctctctggccttcttggatgagcctctctcctcccatctttgggactacaatggggattacctcgtttttgtttttttgaagaaagcatggttacatttgtcttatatattttttaatttgtatgaatttatgggtaacaagtgcaattttgttacatacatagtggtcaaggcagagcttttagggtatccatcacccaaatgctgtagattgtacccattagtaatttctcatcatccccccacaattctgagtccccactgcctatcattccactgtctacatccaggcagacactttttttagcactcacttatgagcga

SEQ ID NO: 14702 - DNA, 351 bp, Homo sapiens
aaaatgctatgttctgagcccaatgtgcctctttggtccataagtatcatttacaagaataatcatgattctctgattccaaactgttgcccccattatgagccgattgctcatacctgtggcaccagtcactccatcaaacctttattctgggctgcacactcctggaaggaaccataaaggaggtctgagggcaaatatcctttgtgttaggatctggctcatgtccacatcccccttgctggtgccatattcaatccatgaggacctactggattctagaccttagtagtagayataaaattccagaacagtttatggaattttactatgtggtccttctgtttctta

SEQ ID NO: 14703 - DNA, 539 bp, Homo sapiens
tataaactcttaacattgtatacactaagttcctattaatagtcttaattcttacatttcatgagggttgggaccaggactgtggagcccagtgcaaaagtaaaatgcttagtaatttcctcccaaattattaagcttatcaggagggtggaaacacggcattaaaccaagtatggggcccttgtaaggttctgagcttggaccttgtctgactgcactggtggagcccacattgtattaaaagcaaggatttaaggttaagagaaaggaagggaattatacttcccctctagtataattcaaggaacttgaaaagtgaacatgtattcagcttgctatccatgaaacctatgtctctttttcactaagaacaagtattgaagtgtttttttttaccagacctatgtagtagaatatttmtatctaaatgcatacgtccacacatatctctgataaacgtaagtgtgccaacttgtatccaccaccagtatgtcagatttcttctagcacctgattttcaaccaagatttctttttatc

SEQ ID NO: 14704 - DNA, 1111 bp, Homo sapiens
gaaaaaaaagaagtagggatttaggatggttaaaaaaaggaggagatgagggcatatttcaatgaagctccatatactttattattcattctgagagaaaaaaattagaggagaaaattctctaagaggaaagactaataagatatcaagctggaggatttccttctatttgaatttgggaaacagatgaaatagaaagcaagtttttatttatatagtgaaaattaaacctagattttagaagattaatattggtaatttgttatacagaaaaacaaatccagacttcccttgttgtctatgggtcgaaacaatttcacctggacccgccagagctgcatcctcttttggagtagttgaggctcatgtggaacataaataatgccattccttaagctctgatccacccagggcccccactcagggtttttccttaatgttcgtaaaagaaataaacatctggataaagtaacaaagcaaaaaatattgactcattatttattttcatttacagaaggaaaatcaaaattgttcttagcttttgctttttttgtttgtttgttttttggatgtgaggcagaagtctgagattcatactgaacagtgcacttactaggaaaacaggtggaagtttctagaagcaggatggttgtgatttgctctttttgaaacaaaggtgacttgatttatatgaaagtaaagttgaaagaaattgccctagcacaggcctgatgagactttggtcctccctaaaaataacctcacagggtcctaaatggagtattatagctactttgaaatgtttctggagggtcyattctatggagattgtgtgccccgtttcactaggcatggtgctcaggattggtgccggcatctgcgcatttcacaagtagtattgtgtaaataaccctaggcccattaatctggcagaaacagtcaagaaccgagttcctgctgctgcggcagggggagggcgcggtcacagcgctaccaatgtcctactaacaccagcctctggcatctgaaccctaacctctttgacaccctcagcacactgcagttttccattagaacttttctttagatccaaagatcaagcaatacaatg

SEQ ID NO: 14705 - DNA, 1111 bp, Homo sapiens
gaaaaaaaagaagtagggatttaggatggttaaaaaaaggaggagatgagggcatatttcaatgaagctccatatactttattattcattctgagagaaaaaaattagaggagaaaattctctaagaggaaagactaataagatatcaagctggaggatttccttctatttgaatttgggaaacagatgaaatagaaagcaagtttttatttatatagtgaaaattaaacctagattttagaagattaatattggtaatttgttatacagaaaaacaaatccagacttcccttgttgtctatgggtcgaaacaatttcacctggacccgccagagctgcatcctcttttggagtagttgaggctcatgtggaacataaataatgccattccttaagctctgatccacccagggcccccactcagggtttttccttaatgttcgtaaaagaaataaacatctggataaagtaacaaagcaaaaaatattgactcattatttattttcatttacagaaggaaaatcaaaattgttcttagcttttgctttttttgtttgtttgttttttggatgtgaggcagaagtctgagattcatactgaacagtgcacttactaggaaaacaggtggaagtttctagaagcaggatggttgtgatttgctctttttgaaacaaaggtgacttgatttatatgaaagtaaagttgaaagaaattgccctagcacaggcctgatgagactttggtcctccctaaaaataacctcacagggtcctaaatggagtattatagctactttgaaatgtttctggagggtccattctatggagattgtgtgccccgtttcactaggcatgstgctcaggattggtgccggcatctgcgcatttcacaagtagtattgtgtaaataaccctaggcccattaatctggcagaaacagtcaagaaccgagttcctgctgctgcggcagggggagggcgcggtcacagcgctaccaatgtcctactaacaccagcctctggcatctgaaccctaacctctttgacaccctcagcacactgcagttttccattagaacttttctttagatccaaagatcaagcaatacaatg

SEQ ID NO: 14706 - DNA, 1230 bp, Homo sapiens
atggccagttcacacagggtgaagaactgtatcactcagcaacaatggtaagttaaaatcccagttaactatcagttatctgttaaacagatgccctgagagaaatggcatacataattcctcccccaccaccaaaagctactataacattagtgttaaaaatcactgagttagggctctactactcattctaaaaacatgaagctttaagtttccaagtgaagggtttttaagacattttgtaataatctttacttttagtcactttgccaggtttttctttgagattttattttcctccaaaatctattaataggccttctttaccattattcctatgaggatattgcttgtgacccttttcttgagctgccccagggtcctcatgtgtgatctcctcactacactgaaaacccaacttgtttaactacaggtttgttgccagtggtctctgcctgaagggtgttaacagaattatggcatctcccaaattaactgatattataggtcacataaaaaagtaattgcagtcattttattttacagactaaaaaaaaaaaaaaaaacccaagacagtatactgtagtttgttagaaataattttttatacactaggttataacttattcacatatataagcttattatcataataagaaaaggtttatatattttgggttttcttgttttaataaaataaatgtgctaaggttcctttttaatactttttgggaatatgttttgatgacagtagaaaatattcaacattaattcactaaacaaccaaagaagtaaaattttgatactacctccaaagttaaagatagcaggcatatcttaactacttcccaaaaagactagggagttaggtaaaagagtgaaggcatttgaggatttttcaagttccagatgaccagacagaaactgtaagccattggctacagaatgaatgatagcaaacactaaggtttttatgcactagacagtgtatgtaaacacttacttatcacagctcctgatatgagctgttaaccaataaatgagttccattcaggcattataaactaytagatccttaaggcaattcctattttatggttttaggcaaatacttatagatacagcaatataaatgttagtttcctagatttggcaactgctaaaaacagtcttcagaactacattagatgctaatgatagaactacaaagactaattttaaagtgcatat

SEQ ID NO: 14707 - DNA, 1230 bp, Homo sapiens
atggccagttcacacagggtgaagaactgtatcactcagcaacaatggtaagttaaaatcccagttaactatcagttatctgttaaacagatgccctgagagaaatggcatacataattcctcccccaccaccaaaagctactataacattagtgttaaaaatcactgagttagggctctactactcattctaaaaacatgaagctttaagtttccaagtgaagggtttttaagacattttgtaataatctttacttttagtcactttgccaggtttttctttgagattttattttcctccaaaatctattaataggccttctttaccattattcctatgaggatattgcttgtgacccttttcttgagctgccccagggtcctcatgtgtgatctcctcactacactgaaaacccaacttgtttaactacaggtttgttgccagtggtctctgcctgaagggtgttaacagaattatggcatctcccaaattaactgatattataggtcacataaaaaagtaattgcagtcattttattttacagactaaaaaaaaaaaaaaaaacccaagacagtatactgtagtttgttagaaataattttttatacactaggttataacttattcacatatataagcttattatcataataagaaaaggtttatatattttgggttttcttgttttaataaaataaatgtgctaaggttcctttttaatactttttgggaatatgttttgatgacagtagaaaatattcaacattaattcactaaacaaccaaagaagtaaaattttgatactacctccaaagttaaagatagcaggcatatcttaactacttcccaaaaagactagggagttaggtaaaagagtgaaggcatttgaggatttttcaagttccagatgaccagacagaaactgtaagccattggctacagaatgaatgatagcaaacactaaggtttttatgcactagacagtgtatgtaaacacttacttatcacagctcctgatatgagctgttaaccaataaatgagttccattcaggcattataaactactagatccttaaggcaattcctattttatggttttaggcaaatacttatagatacagcaatataaatgttagtttcctagatttggcaactgctaaaaacagtcttcagaactacaytagatgctaatgatagaactacaaagactaattttaaagtgcatat

SEQ ID NO: 14708 - DNA, 390 bp, Homo sapiens
tttcattttcaaatcaatcgtttctctggtagtcccctgtcatttactgtactggctggcaaattgcctcccttatgcaacagaaaattgtttaaattcaaaaatctgaatcaatgccttcctctactgagctggataatacattcatgtctgtaacctctctggtttgactttgaggatatgagaaaccctcttccataaaagtattattycttccatctcagctacagggagcaaaaatttcccattagttatttttcagattgtttctaaaatgtaaacatgtattcttgttgtgcaatagtaaacacacaccccaggaaataattcacttattagatcaaagaatataaaggaaaaccctaaatgagataaaaggtgagttaaaat

SEQ ID NO: 14709 - DNA, 390 bp, Homo sapiens
tttcattttcaaatcaatcgtttctctggtagtcccctgtcatttactgtactggctggcaaattgcctcccttatgcaacagaaaattgtttaaattcaaaaatctgaatcaatgccttcctctactgagctggataatacattcatgtctgtaacctctctggtttgactttgaggatatgagaaaccctcttccataaaagtattattccttccatctcmgctacagggagcaaaaatttcccattagttatttttcagattgtttctaaaatgtaaacatgtattcttgttgtgcaatagtaaacacacaccccaggaaataattcacttattagatcaaagaatataaaggaaaaccctaaatgagataaaaggtgagttaaaat

SEQ ID NO: 14710 - DNA, 580 bp, Homo sapiens
atttctccacaaattgtctcatgagaggtcattaaaaacaatgaaaaggaaaaatcgcacagttcagtgtttctcttttaaaagtactgatgacctctgcttctcagacagaatagccagactgcaacttttctgagaaattctgctaaacaaaaattgattcctgtccgggcacagtggttcatgcctgtaatcccagtgctttgggaggccaaggtgggtggatcacctgaggtcaggcattccagaacagcctggccaacatggcgaaaccccatctctactaaaaatacaaaaattagctggacatggtggcgtgcacctgtaatcccagctactagagaggctgaggcaggagaatcacttgaacccaggaggtggaggttgcagtgagccaagatcgcgctgctgcactccagcctgggagacagagcaagactccatctcgaaaaaaaaaaaaaaaaatcagttcctctttcmttcatcctcaaatgtcctcaatccagtgacatttgcaaaaactattgtctttcatatgtaatgtgtacatttcaatgtctctacatttcctctttgaata

SEQ ID NO: 14711 - DNA, 602 bp, Homo sapiens
atcacatacttgcttattataagtacttatgtgtatgtacagaataaacacaataagcctatgagattaggcattgttaccatcatccttggtgagaaaatggaaataagtaaactttctaaggttacgtaacaagtaaaagacagagttgggatccaagctaggcagcctggccccagaatctacactttgatcacaacattttactcttttcatagttgtttaagtgtccttcatgacaaccattttatcttgaatttaagtgataatcacttaaggtgctatgactagaattggctgcaatgtcaggatgtaaaataagcagtaactggccatgagcttcagtgtctgaagrtccaacccaagagatagattctgcaggcaaaaatggattttaatactattctagggcctggtaaccatggcaccattatataagtttctaaataggcaggggaaattaaagcaagaagcaataggctaaatatacataaacctggtaacatgcatgattggaaacaggaggcagttgggagagcctggagaattccttaggtcagacagagtatacattagtttactgagtctgtcaaaacgaagtg

SEQ ID NO: 14712 - DNA, 512 bp, Homo sapiens
tgaaggagtgaaggatgtgccatccccaaatatgctgaattggtatattcattatttttagttgaaaacactggagaaattaatttcaaaaacaactagttatctgtctcttgcatgcagcaagccataaagattttctggaagtactaacatctctgaaccaaggtgagaaakcccttctcaccagagactgggaattggaggcagcaatggatctgagtagataaactgtctgaaggaacccatatcttccactagttttacactcccccgtgtatctcctagtgactcccgtagaaatttactgcccctaggcagatccctcttcttctgtcgttccttctcaaattcttcatcctttgtcaaacaattatgaaaatatctttatagcagcatgatttatagtgcatattctcactcataggtgggaattggacaatgagaacacatggacacaggaaggggaacatcacactctggggactgttgtggggtggggggaggggggaggg

SEQ ID NO: 14713 - DNA, 512 bp, Homo sapiens
tgaaggagtgaaggatgtgccatccccaaatatgctgaattggtatattcattatttttagttgaaaacactggagaaattaatttcaaaaacaactagttatctgtctcttgcatgcagcaagccataaagattttctggaagtactaacatctctgaaccaaggtgagaaatcccttctcaccagagactgggaattggaggcagcaatggatctgagtagataaactgtctgaaggaacccrtatcttccactagttttacactcccccgtgtatctcctagtgactcccgtagaaatttactgcccctaggcagatccctcttcttctgtcgttccttctcaaattcttcatcctttgtcaaacaattatgaaaatatctttatagcagcatgatttatagtgcatattctcactcataggtgggaattggacaatgagaacacatggacacaggaaggggaacatcacactctggggactgttgtggggtggggggaggggggaggg

SEQ ID NO: 14714 - DNA, 680 bp, Homo sapiens
gaatgagctgtggacgttgctgctatcactgggatgaggagtgtcaagctctgcactctgggggccatttggggcatcccatttgcrctgcaaagtaagtagagggagtactcggttacatattctctcattcagtcatttgtccagttaacattagttgaacacttacatactctgtggcattctaagtaggccggaagaataaaatgcttctcacatccgtgctgccctggattgctgagggtctgctggggaagttaagcatgcacagaaagagtaatgatacaaggtggagttggtgcattttggtttcagcaatgagatacctacttagacatggtaatcattaaacctattattttcatgatgaaattaatctgcacagagacagagagcttttataaaatatcaattacggaatgtgagaccaaagacaatagtatgttatagagactgcacagataagtctaacatgcagctagagttgagaactcattgctgtcaacaatttattaaaaagtagagaaatagtatagatagttgttacatgttttaaaagcaaatttgggctacatagcttatcagaggattcctttctgccttgtgaattaattcatgtggaaaaaaagtttttgtcaggcaattgatttaaatcaataagtctcagttttttagtctca

SEQ ID NO: 14715 - DNA, 511 bp, Homo sapiens
tatcctttccccaatgtgtttttggtgcctttgtcaaacattagttggctgcagaagcatgaatttatttctgggttctctattctgttccattggcctcattgyctgtgcttttaaaattcaaaatcattattcctaaataaacagtatttcttgaatgcttacaagtcattacagcttcaattttgcatctctgctgacttgaattctaaaatagctcatagtcagatctcctcttgagtgattttccataggaagaagaataggctgtgactatcaagcaatatggtggtttagatacacctgtaaatggaatagtcaattggaagtgacttaaggaacatttcaagtggccataagctctgtctttaaaaaaatacacatatacacatgtgtgtgtgtgtgtatgtgtatgtatccctgacacctcagtaggcagattctttctaactcttaatgtcttcattgtctttggtgaagggagaaggtctgagctaattttacttgtaca

SEQ ID NO: 14716 - DNA, 511 bp, Homo sapiens
tatcctttccccaatgtgtttttggtgcctttgtcaaacattagttggctgcagaagcatgaatttatttctgggttctctattctgttccattggcctcattgtctgtgcttttaaaattcaaaatcattattcctaaataaacagtatttcttgaatgcttacaagtcattacagcttcaattttgcatctctgcygacttgaattctaaaatagctcatagtcagatctcctcttgagtgattttccataggaagaagaataggctgtgactatcaagcaatatggtggtttagatacacctgtaaatggaatagtcaattggaagtgacttaaggaacatttcaagtggccataagctctgtctttaaaaaaatacacatatacacatgtgtgtgtgtgtgtatgtgtatgtatccctgacacctcagtaggcagattctttctaactcttaatgtcttcattgtctttggtgaagggagaaggtctgagctaattttacttgtaca

SEQ ID NO: 14717 - DNA, 518 bp, Homo sapiens
tatgattaggcctgcaatatgatttcccattttgtttcctagtcctctcttatatgcatgctgtgatctaggcaaagtraattcctgagtgcctcccacttacccatgtatgacagacaccatgatgctatgagaaaagcattagatttggatacagacagatttgttcagatccccaactctgcccttaactaaccgttttacctcagaaaagtaactaaagccctctgagccccagtttttaaaatcaatgcattcatttaaaaaatacttattggtgaacaaagagacttagttcttgtagctctgcagctcaccctctgggttggagtggagggatgagggagttgctcaatctgggtgctggtccagtgagtggtgggcagtcagagggaggtacagaggagagaactgaaagactttgagtaactggaggctggaggtgcaatggagaatggtcccaaatgaggctggagaaggaagcagaggttggattatgaaggctttttaagctttgt

SEQ ID NO: 14718 - DNA, 518 bp, Homo sapiens
tatgattaggcctgcaatatgatttcccattttgtttcctagtcctctcttatatgcatgctgtgatctaggcaaagtaaattcctgagtgcctcccacttacccatgtatgacagacaccatgatgctatgagaaaagcattagatttggatacagacagatttgttcagatccccaactctgcccttaactaacygttttacctcagaaaagtaactaaagccctctgagccccagtttttaaaatcaatgcattcatttaaaaaatacttattggtgaacaaagagacttagttcttgtagctctgcagctcaccctctgggttggagtggagggatgagggagttgctcaatctgggtgctggtccagtgagtggtgggcagtcagagggaggtacagaggagagaactgaaagactttgagtaactggaggctggaggtgcaatggagaatggtcccaaatgaggctggagaaggaagcagaggttggattatgaaggctttttaagctttgt

SEQ ID NO: 14719 - DNA, 518 bp, Homo sapiens
atagaacccatgcctgattgacctctgaccctcacawtggcatttggtaataaacaataatatttatataataataaaagaattgttatatatgtaataatatatattgcaatataccatttacaatgtatagtatattataataaaatataatcatattagtgtaataattcagggagccaatacagttattactgaatgaatctgtatattttgccagaccatttttctcctgaaagtagtaaagagtggtggggaaaagagcgtcggtttctgaataaaactgacttcagtaaatagttctttcatttcctaatagtgtgacttcaaataagttaacctaatatctctgaccctcaatttctttatctggaaaatggtaatagaattacctgactctggaggtaaccatggaaatagatgaactacagtaagtaaagtgtccaggacagtatctggcccttcgacactaaattctggcttcttcacactcccactgttagcattcactgaagatc

SEQ ID NO: 14720 - DNA, 418 bp, Homo sapiens
tgagaaatctgctgtaatttgtcttttctttcygaccacttgtaatacctcttgtttgtctctaatgttctatagtctctgggataggcctgattgtgtgttcaaaaggagatttcttattattcctgtttgaattttgggaaggattcttgacactgaagttttctatcttttaataattttatatattttaataatatatatatatagcagtctttatttcttcaaacattcttagttatcaaatcctcatattcttgctcctaaccctttgacattcacccctacatgccaaaatctgttagctggatcttgctattctctgcctgattactttttgcttgatcctaagggcacactcagcccaggcacaaagaaaattcaaagggtgaatgacctaatgtttccagaagcatcc

SEQ ID NO: 14721 - DNA, 418 bp, Homo sapiens
tgagaaatctgctgtaatttgtcttttctttccgaccacttgtaatacctcttgtttgtctctaatgttctatagtctctgggataggcctgattgtgtgttcaaaaggagatttcttattattcctgtttgaattttgggaaggattcttgacactgaagttttctatcttttaataattttatatattttaataatatatatatatagcagtctttatttcttyaaacattcttagttatcaaatcctcatattcttgctcctaaccctttgacattcacccctacatgccaaaatctgttagctggatcttgctattctctgcctgattactttttgcttgatcctaagggcacactcagcccaggcacaaagaaaattcaaagggtgaatgacctaatgtttccagaagcatcc

SEQ ID NO: 14722 - DNA, 543 bp, Homo sapiens
cttgcctggtataaatctgaagaacttgggttgttatgctattttggcttttgattatcactgatttcagaaggtaggatagatgggttcaaaaggaacatgttttccagtgacttaagagtggcccttaagaacatatccttgtaaaaaacataaacaaaacttgtaaacagtcacctaactgaattacttctattgactgtctgctgtgctaatccctaagaattgaaatagatgtttcaatgaaagaacagccccatttataagtatgccattaaactaggtagagaaggaagtgatgaatacttgagctgacmtcaatgtggttttaattctttgaattgtgacaaagtagggtgaaggctggagaggagaggaaatcaggagagtggtgtgtgtgagtggaaattgtaaaagctgcttcccttgagtgaacactgtttgcgccggtcttacctgggagtttctatgtttgcacatcaaatgtatctgtggactggtgatgaatttttatgagctcgtacaaaatgaatatttacatat

SEQ ID NO: 14723 - DNA, 938 bp, Homo sapiens
tggagggaagtggaggactgttggggagtggagagtcagggtgtttctggccaggtcatgtttgagatacctgttagctgtcccatgaccacagcagcagcaggaaggacatcagatacaggaatgtgcagctccagggagacagtgacaaagacttcccactgctttgtgtttcctgaacgtttgtgctgctactcatccacgtccacttagaaccctcaaatcagcgaagaaggcaaaggctgccaggaattggcagaaagcagcagccttctgggagctacctgcataggagggacagcccgagctgctaagccgggtctgcacaggactgagggctggctgatgacaggagggcctttcgctggggctgctgggtcttggtttctcgggctggttttcctgtcgttggaaactgcattgccctgagctctgcgtgctgaaataaatctaagggcaagtccagctgttggaggaatgtagttgtgtttggaataagtagcatcggtagcgtgccttttcctcatgtgaatcaccagggctctttcttgctcaggaagttggaggcacaaatcctgtatcccctcacccccgccccccgttttttttttttttttcattaaaaattctgttttgccaatagttttgcaccttttcaatttttgtgaatcgtctctagaggtttgcagttggctaccattctggcccttgctctgaaactccatacagctggttaccatcgagccgcatgtgcctggtacattgccagctcctctgtcagtgctgataaattcctaaagttacacgagytcagctggacggagcaggtttttgttgtttttgttttctggcacccagtgtgaactgacatttaagaagtcttttccaaggagacagttcttttggctcattgttgaataaaattgatctgaaattcc

SEQ ID NO: 14724 - DNA, 606 bp, Homo sapiens
tgcatatccccaaatgttaactcttgtactttctgttcaggtgtttgtctttcttcaaggactagtacgcagttgatacttcagttgtcttaaaggataagcttggatggatggttgccaaatagactaaacttgttctgtcctgttcttggatttaaactttatcattgaatatggcatagtagccttaagacataatactgccaccgatttcacttctctctagagatttttgctctycagaattcagtaaaccaagactcatgctggattaatggagctggaccctagatattttaatttgccttaatatagacaaaggatgaatcagattatgctcatctccaggcttgctgacaagccacctgggtgttttttccctcttgaccaaggcagaaattacttgaaataaaatatacacattatgtttcagaaaggtaattgtgggtataatacttaatgtataataagcactactataaaggaaagttgtgctatcatatcaccttttacatttccactgtatatgaattcgtctcatataatcagtcccctcctatcctgatatgtgcctagttcactagatttacaaaggtttataggaag

SEQ ID NO: 14725 - DNA, 645 bp, Homo sapiens
tggcatttgtcagaaatacatttggtatatgtagctggggtcacatgcttgacatgcctattgaaagcttctgggtaggaagagaacaatcatcacagcatcacggcctggtataactgtctcccaggacaggtctccctggggagactgagaccacaactctgaaatcagagctcaaatccacgttctacatttccctcagtaatgtacatgatgtaagacagtttttatattagttatctgttgctgtgcaacaatattactgcaaactttgtgacttgagacagcacacagttatcactgcacagtttctgtgggtcaggaatccaggagtgactcagctgggttcagtgcaaggctgcagccatagtgtcagccagggttcggtactcatctggaggcttgactggtgattgatctgcttcccatctcatctgattgttggcagcattcagttccttgcaggctgttggacacagggccccagtttcktgctgccctcagcttcttgccatatgggcctctccatctggccgctcatgacatggcagctcacatcttcaaagccagcaagacagacagcctcctagcaagacaacttaacgtcctatctgacgtaatcactacatcccgtcacctctgcca

SEQ ID NO: 14726 - DNA, 645 bp, Homo sapiens
tggcatttgtcagaaatacatttggtatatgtagctggggtcacatgcttgacatgcctattgaaagcttctgggtaggaagagaacaatcatcacagcatcacggcctggtataactgtctcccaggacaggtctccctggggagactgagaccacaactctgaaatcagagctcaaatccacgttctacatttccctcagtaatgtacatgatgtaagacagtttttatattagttatctgttgctgtgcaacaatattactgcaaactttgtgacttgagacagcacacagttatcactgcacagtttctgtgggtcaggaatccaggagtgactcagctgggttcagtgcaaggctgcagccatagtgtcagccagggttcggtactcatctggaggcttgactggtgattgatctgcttcccatctcatctgattgttggcagcattcagttccttgcaggctgttggacacagggccccagtttcgtgctgccctcagcttcttgccatatgggcctctccatctggccgctcatgacatggcagctcacatcttcaaagccagcaagacagacagcctcctagcaagacaacttaacgtcctatctracgtaatcactacatcccgtcacctctgcca

SEQ ID NO: 14727 - DNA, 539 bp, Homo sapiens
aggataattctttggtgtgaacagcatccccggattttgtccrttaaatgccaatagcacttccaatcattgtgacatctaaaggtactcctacagaatctaaaatgcctcttgagaagttttagctgtgttgagaaccacagttttaatgaaaatgttattgttttgttttgtttttgagacagagtttcactctgtcacccaggctggagtgcagtggtgcgatctcgcctcacttcaacctccgcctcccaagttcaagcaattctcctgcctcagcctccctagtagctggactacaggcgcctaccaccactcccagctaatttttgtatttttagtagagacgggatttcgccatattggccaggctggtctcgaactcctgacctcaggtgatccacccacctcagcctcccaaagttctgggattacaggcgtgagccaccactcccggctgagaaccacagttttaatgaaaatgttattgttatgtatgtttttattatatcagggcaagtgcactcaaaacttcccag

SEQ ID NO: 14728 - DNA, 539 bp, Homo sapiens
aggataattctttggtgtgaacagcatccccggattttgtccgttaaatgccaatagcacttccaatcattgtgacatctaaaggtactcctacagaatctaaaatgcctcttgagaagttttagctgtgttgagaaccacagttttaatgaaaatgttattgttttgttttgtttttgagacagagtttcactctgtcacccaggctggagtgcagtggtgcgatctcgcctcacttcaacctccgcctcccaagttcaagcaattctcctgcctcagcctccctagtagctggactacaggygcctaccaccactcccagctaatttttgtatttttagtagagacgggatttcgccatattggccaggctggtctcgaactcctgacctcaggtgatccacccacctcagcctcccaaagttctgggattacaggcgtgagccaccactcccggctgagaaccacagttttaatgaaaatgttattgttatgtatgtttttattatatcagggcaagtgcactcaaaacttcccag

SEQ ID NO: 14729 - DNA, 551 bp, Homo sapiens
tttgaggcacttgagagagagagtgtgtagttgtcacagaaggaaggtcacagagtcctttgtctagaatgatgggtcctaccaagatcttttgctttcaaaacacagttagatgatagttgataatgcttctgtatgtcctcttttgggtaataggrttgcagtccgtccagttccccaaactagaagcctggattctttcttggctccttctcattcttctctgatgtgtaattagccactgagttgtgccgactatatttactaaaatctttcttggttccagctcctcctttccatccaaactaccatccttgtacaggtcctgaaatcagttcccaggacacctacaacagctttctaatttgctcctgaattgcttccctcaaatccacccctacacaacacagccaccagagtagtctatctaggtagggcacaagtctaattctttttgttttgttgaaacagagtctcactctgttgcccaggctggagtgcagtggcgtgatctctgctcactgcaacctccgccttccgggttcaagcga

SEQ ID NO: 14730 - DNA, 551 bp, Homo sapiens
tttgaggcacttgagagagagagtgtgtagttgtcacagaaggaaggtcacagagtcctttgtctagaatgatgggtcctaccaagatcttttgctttcaaaacacagttagatgatagttgataatgcttctgtatgtcctcttttgggtaatagggttgcagtccgtccagttccccaaactagaagcctggattctttcttggctccttctcattcttctctgatgtgtaattagccactgagttgtgccgactatatttactaaaatctttcttggttccagctcctcctttccatccaaactaccatccttgtacaggtcctgaaatcagttcccaggacacctacaacagctttctaatttgctcctgaattgcttccctcaaatccacccctacacaacacagccaccagagtagtctatctaggtagggcacaagtctaattctttttgttttkttgaaacagagtctcactctgttgcccaggctggagtgcagtggcgtgatctctgctcactgcaacctccgccttccgggttcaagcga

SEQ ID NO: 14731 - DNA, 551 bp, Homo sapiens
tttgaggcacttgagagagagagtgtgtagttgtcacagaaggaaggtcacagagtcctttgtctagaatgatgggtcctaccaagatcttttgctttcaaaacacagttagatgatagttgataatgcttctgtatgtcctcttttgggtaatagggttgcagtccgtccagttccccaaactagaagcctggattctttcttggctccttctcattcttctctgatgtgtaattagccactgagttgtgccgactatatttactaaaatctttcttggttccagctcctcctttccatccaaactaccatccttgtacaggtcctgaaatcagttcccaggacacctacaacagctttctaatttgctcctgaattgcttccctcaaatccacccctacacaacacagccaccagagtagtctatctaggtagggcacaagtctaattctttttgttttgttgaaacagagtctcactctgttgcccaggctggagtgcmgtggcgtgatctctgctcactgcaacctccgccttccgggttcaagcga

SEQ ID NO: 14732 - DNA, 444 bp, Homo sapiens
tttgaatacccactttttaaatttcaactttaaatgttgtaacctcagtcaaattcattaagatctctgttcttcatttattcatctagcaagttgtacctaccttgtagtgtgttatcaatgagaaaagtatcccttgctttcttacgtttgtttctatgatttccattattgtttccatgactgtaaacatattttacaggcattgcatggataaaaattacgtggctcttcatttayatcaggacatagcaactgttgtttaatatattttataaacataattcttgaaattactgctctatttctgtcattttcttcacatcaagcagccttctttggcttttagatacaagtattacacagctccataaaaacctcgatttttctctcatttattttattctattataaaatttactgagaaaaaataaatggcacatt

SEQ ID NO: 14733 - DNA, 642 bp, Homo sapiens
cattatatgaataatttgtcccctagtgatatcatgtttctgggattatttctctttaaagctcacgcttttttactttagcagagtaaaaragctttatctataaaaatgccctcttctctatgctggtaattacatatctgaagtaaaatatttaaacatttattctttatattgcagccctaaattttacttaaaacagtcatgtcccttgctgacaatattcttcaaaatttcaattcaaaaattaataactcaaatagtttgataacttgtaactgcaagctcttcttcagagatattaaatattataaagtacatttgtatggtactttgtgaggcaattttaccttttattatttaggtttcactacaatctagagaaataggcaaagttgattattctagtttcatcatccttgaaagtgaagctaagaaaataaaacagctttttggattacatgcctagcagacatacaaaccagagaacataaactgagatctgattcctaattgatcacttttgactacttatgtagcttctgcagcaaaaaaaataaaaaataaagaattaaaaaattaaaaaataaaaattcacattctgaaaaggagacttcactttcaaaatatccagctctttcc

SEQ ID NO: 14734 - DNA, 486 bp, Homo sapiens
tattgctaatttattaaagcactgttttttgttgagtcaggatgcagccacagaattctcctgaagacaatcctccaagcataatatgtataacataactaacatttctgacaagcatgaataggggatatttgagcatctgcatgtaatagaagactttgaggtagtgatagaagaaaccataagaaaatgagataaaacccttattttctaaatgaatyaaaaaatacatttttatttattttattagcaagaatttcatcaagaggaatacattcaggaaatcctctttgtccagcatatagctaagagcagtgggggtataggagggtaggaaactgtctaacatggtggttgggatcatgggctatggaatcaaaatgtctgtatccaaatcctagctatgctactcactgtatgtgatgctgggcaagttttacttaccacatgttttttagtttttctcttccagtaaaatggaacaaa

SEQ ID NO: 14735 - DNA, 916 bp, Homo sapiens
tggtgttaggaggtggatgttttgcgaggtgactgggtcatgagggcagaactctcatgaacaggatcagggcccccataaaagagactcacaagagagctcaccagccccttccactatgcgaggacacagcaagaaacactgtctatgataagcgacccctcatcagatcccaaatctgcctgtgcctcaaggcctcaatcttggacttcccagcttccagaactgtgagtaataaaggtcagttgttcataagctgcctggtctatggtgtatcgttacaggtgcccaagctgactaagatgctggggctctctcacaacatgcccagcttgacccgagtcaccagggagtatggtacctgtggcataagcgaggcacagaaaatacaaagcttcgacacccactccccatcccagctgctgcgccacctcaggaggtgctcgttctgagggacaaaatgggagcatggagtcacctctgctaccccaggctaggagccccacctggggagggtaagggctacaggtggccctcagcttgggcagggttaatgcaggtggagggtaagcttccttccttcttctcgcattccttttttttttccccccgagacggagtcttgctttgttgcccaggctggaaggcagtrgcgtgatctcagctcaccgcaacctccgtctcccaggttcaagcaattctcctgcctcagcctcccgagtagctgggattacaagcgcatgccaccatgcccggctaatttatgtttgtatttttagtagagactgagtttcaccctgttggccaggctggtcttgaactcctggtcttatgatcttcctgcctcggcctcccaaagtgctgggattataggcatgagccaccgcacccggcctctctttcttcacttaaatgg

SEQ ID NO: 14736 - DNA, 916 bp, Homo sapiens
tggtgttaggaggtggatgttttgcgaggtgactgggtcatgagggcagaactctcatgaacaggatcagggcccccataaaagagactcacaagagagctcaccagccccttccactatgcgaggacacagcaagaaacactgtctatgataagcgacccctcatcagatcccaaatctgcctgtgcctcaaggcctcaatcttggacttcccagcttccagaactgtgagtaataaaggtcagttgttcataagctgcctggtctatggtgtatcgttacaggtgcccaagctgactaagatgctggggctctctcacaacatgcccagcttgacccgagtcaccagggagtatggtacctgtggcataagcgaggcacagaaaatacaaagcttcgacacccactccccatcccagctgctgcgccacctcaggaggtgctcgttctgagggacaaaatgggagcatggagtcacctctgctaccccaggctaggagccccacctggggagggtaagggctacaggtggccctcagcttgggcagggttaatgcaggtggagggtaagcttccttccttcttctcgcattccttttttttttccccccgagacggagtcttgctttgttgcccaggctggaaggcagtggcgtgatctcagctcaccgcaacctccgtctcccaggttcaagcaattctcctgcctcagcctcccgagtagctgggattacaagcgcrtgccaccatgcccggctaatttatgtttgtatttttagtagagactgagtttcaccctgttggccaggctggtcttgaactcctggtcttatgatcttcctgcctcggcctcccaaagtgctgggattataggcatgagccaccgcacccggcctctctttcttcacttaaatgg

SEQ ID NO: 14737 - DNA, 526 bp, Homo sapiens
tgcttctccttcaccttctgccatgattgtaagttccctgaggcttccccaataatgaggaactgtaaataaattaaacctctttcctctatcagttacccagtcttgggtagcatctttatagcagtgtgaaaatggactaatatagccgtcaatggagtactcaggaaaacatagtaaaattaaatacaggacaagtgttagagacaattttaacagagcaaaargaattcttataaatgtaataatagatgttgggcagattatgctacaaacgtgtaaccatagagtcatgccttattttattgtgcttccctttatctgtgcttcacagataactgccttttttaatacaaattgaaggtttgtggcaacaatgtgttgagcaagtctattgaggccattttctcaacaccatgtgcttactttgtgtccctgtgttacatttggttattctttcaatatttcaaaatttgtattattattatatctgttataatgatctacgatctttgatgttactatt

SEQ ID NO: 14738 - DNA, 488 bp, Homo sapiens
gggcaacatagcgagattccatcttaaaaaaaaaaaaaaaaaaaaagwataccagagttgatatgtagggtttagtttgacttatgtttttaaaaaattagataagtataacatctaaatggcaaatagaacaattaaagatggtctcatttaggaaatgttaaaaactaattatcctcaattatgttttaaatttgtggaatgacatagcagatattttgagcatcattataggatccaattaaaattatgcatactgctattttcacttttttttttcgagatgagatcttgcttctgctgcctaggctgaagtgcagtggcacgatcatagctcattgcaacatcaaattcctgggctgaagcgatcctcccatctcagccttcagagtagctaggactacaggcacatgccaccatgcccagctaatttttttttttttttggtagaggctgaatctcactatgttgcccaggctggtctccaa

SEQ ID NO: 14739 - DNA, 599 bp, Homo sapiens
tgaacattttcagaacaatgctgcagttgtgagttactccaaaagtttgtcctctctgcatacgattcaactgstacactgcagtcagactaattctcttgaaatactacctgtattgaattattctatttctcaagaacatatgatgatttacttttggtaagtgaaaactgctaagttttcagtgtagttttcaaggctgtcaaatatccaaccctgtccaattgcttctactttttaatttagtagcccaccgcagaaatcaagtcagactatacactctgtgtgttttggtagactcgtcttggctagtttcttatatctttgctgctgagactctagaaccttttgcctaagcatctttgataataggatgggacttagtccaagtagtagaacacttctctcatgattttctcagggcttggggtggctttaaactcattaaccagtaagaaggaattttacttaaaagctgtagaaaataaatctaaatagggagtaaactgatttcatcttactttttgcctgaagctttcgtgtataaatcacggcagaaatttcatatgaataaagcatttccttcctcgcatctgaat

SEQ ID NO: 14740 - DNA, 607 bp, Homo sapiens
atatctgaaacaaaagatgatgagttctgccttacaatcctaatatgaaattaaataagagatgaaatagtatgtaaaacatattgaacactgtattgacagaatcccgtgggacattgttcaccatgcccaccatcattcactcttccccttcgccattcattttattttgaaatacatcttgagtacagaagagtgtataaaatctttgtgtataatcacaagagtaaacaataaaatgaacacctgtaccttgactgccagattaaggtattgaccattygcagaacctaagaaatcccctgagtgtacttccctttcattgttctcttcttgggctgggttgtgaaacctcaggatgcacttgcttcctcaggcctcttctgcgtaagattatttctggaagcggcctgataaaactcttattggcattcccatctaacatctacctctctttgtgtgctggctttttctccaagtgctcagaccacagttgtgccacattccgccttctagacatccaatcccacctattttgcatctatatcagtcagggttccagcaagaaatagatagcacattcacattttgaggataatttttaata

SEQ ID NO: 14741 - DNA, 607 bp, Homo sapiens
atatctgaaacaaaagatgatgagttctgccttacaatcctaatatgaaattaaataagagatgaaatagtatgtaaaacatattgaacactgtattgacagaatcccgtgggacattgttcaccatgcccaccatcattcactcttccccttcgccattcattttattttgaaatacatcttgagtacagaagagtgtataaaatctttgtgtataatcacaagagtaaacaataaaatgaacacctgtaccttgactgccagattaaggtattgaccattcgcagaacctaagaaatcccctgagtgtacttccctttcattgttctcttcttgggctgggttgtgaaacctcaggatgcacttgcttcctcaggcctcttctgcgtaagattatttctggaagcggcctgataaamctcttattggcattcccatctaacatctacctctctttgtgtgctggctttttctccaagtgctcagaccacagttgtgccacattccgccttctagacatccaatcccacctattttgcatctatatcagtcagggttccagcaagaaatagatagcacattcacattttgaggataatttttaata

SEQ ID NO: 14742 - DNA, 607 bp, Homo sapiens
atatctgaaacaaaagatgatgagttctgccttacaatcctaatatgaaattaaataagagatgaaatagtatgtaaaacatattgaacactgtattgacagaatcccgtgggacattgttcaccatgcccaccatcattcactcttccccttcgccattcattttattttgaaatacatcttgagtacagaagagtgtataaaatctttgtgtataatcacaagagtaaacaataaaatgaacacctgtaccttgactgccagattaaggtattgaccattcgcagaacctaagaaatcccctgagtgtacttccctttcattgttctcttcttgggctgggttgtgaaacctcaggatgcacttgcttcctcaggcctcttctgcgtaagattatttctggaagcggcctgataaaactcttattggcattcccayctaacatctacctctctttgtgtgctggctttttctccaagtgctcagaccacagttgtgccacattccgccttctagacatccaatcccacctattttgcatctatatcagtcagggttccagcaagaaatagatagcacattcacattttgaggataatttttaata

SEQ ID NO: 14743 - DNA, 642 bp, Homo sapiens
tttttgtaagacaggtctgatggtgatgagttatctcagcttttatttttactttttggtctgggaaactatcttcatttctgaaagataacttttttggatacagaatgcttagttggcaatatttttccttcagcattttgaatatatcattccaccccctctggtctgtgtgttttctgtgagcagtatattgccaggtgaattagaattctcatatgtagaatttgcttattttcccttgctgatttcagaatcctctctttgtctttgaaatttgagggcctgattacaatatgtctcagggcagacttatttgcactaaatcttagcggcccttgacctttatgaccctggttccaggagtattatgtttttgttgtttcacttttttgaaattttctaagtcatattattcacaaaaacactttcatttattcttctcaatctgtataccttttattttcattttctcttaatattacataaactaggacttccaacacaatgttaacagaagtggtgaaaaaggcagtttgccttacttacgatcttgagaaaaaagcatctagtttcttttcattatatgtgaggttagttctaagtrttttgtaggtgttctttatcagcttgagaaatttg

SEQ ID NO: 14744 - DNA, 570 bp, Homo sapiens
taaaaattatttgatttgtcataatataaaaatattattatcatataacaatttcaaaagcctaaacttttgtaggttttgtctttctttctgatataacatatcatttatatgcatgtatcttacatattttatatattactctcaagaatctaagtttgaatgtttctatatattgctacatctgtttcctcagatgtgtattttctttttaccccaccagtataatttgrttttcatggttggttctttgttcttctgtaacccctaattctctctaacattttagaaaatctggccaagacagcatacttatttctttgattttttaaaaaatctgctttgctccattttagggcaatgttataaactttttttttttttttttttgcatacaagaacctatttatagcatcaacatactttaaatagcttgtgttgtaaatagttgaatatttactgtctgttagttgagaatattcaaacatgcctgcgcattcatggatctaattgctgcatgcctatcatgggtctgttagaaattggggtgcgaaggaaattgctgatatt

SEQ ID NO: 14745 - DNA, 607 bp, Homo sapiens
gagatcgagaccatcctggctaacgcggtgaaaccctgtccccactaaaaatacaaaaagttagcctggtatggtggcgggcacctgtagtccaagctactggggaggctgaggcaggagaatggcgtgaacccaggaggcggagcttgcagtgagctgagatcgtgccactgcactccagcctgggcaacagagtgagactttgtctcaaaaaaaaaaaaaaagattgcatctttgatgctcttgtatatagaagactgaacatctaattagacacagatcttcactgcttacgttacycagagtgtattcttaaagaagaatacatgcccataattacatgtatagcatctttaaaaaattgtggagattttggggagtaggtaataggcctaaggaaaagtcctcagtttggaaaatcaataaaaagaaaagtttttctcaggttctagtaagttatacattttgaaaacatgtttgttgagtaataatttccacaataaaaattctccattgtaagtgtacagttcaaagagttttaaaaacagagaacacttgatgtatttccatgtcattcttgtgtagggtcatgctaatcttcatcaag

SEQ ID NO: 14746 - DNA, 561 bp, Homo sapiens
aatacttatataattagaagtattatacttataagtctatagaagtatatatacgagtatatgtacttatatactcatacatacttttttacaggagaataaacagaactgctgtgaaggattttctaatatatacatatatatgtatacacttatatatacttataagtatatatacacatatacttaaaagtatatatatacacttatatacttataagtatatatacacttatatacttataagtatatatacacttatatacttataagtatatatacacatatacttataagtatatatatacacttatatatacacttatatacttataagtatatatatacacttatatacttataagtatatatatacacttatatacttataagtatatatatacacttatatacttataagtatatatatacacttatatacttataagtatatatrtacacttatatacttataagtatatatgtacacttatatacttataagtatatatatacacttatatacttataagtatatatatacacttatatacttataag

SEQ ID NO: 14747 - DNA, 561 bp, Homo sapiens
aatacttatataattagaagtattatacttataagtctatagaagtatatatacgagtatatgtacttatatactcatacatacttttttacaggagaataaacagaactgctgtgaaggattttctaatatatacatatatatgtatacacttatatatacttataagtatatatacacatatacttaaaagtatatatatacacttatatacttataagtatatatacacttatatacttataagtatatatacacttatatacttataagtatatatacacatatacttataagtatatatatacacttatatatacacttatatacttataagtatatatatacacttatatacttataagtatatatatacacttatatacttataagtatatatatacacttatatacttataagtatatatatacacttatatacttataagtatatatgtacacttatatacttataagtatatatrtacacttatatacttataagtatatatatacacttatatacttataagtatatatatacacttatatacttataag

SEQ ID NO: 14748 - DNA, 1266 bp, Homo sapiens
ttaacatttctaaatctctttttttgttaagtgactatctagtataaagaaaaatgttaggtgtttttgtttgtttgtttttttctgataccaaatctgagactaattcttctcccctagtgtttccagttaccctttggttggctgaagttcattctattgaagtttcttccgtaggattcatgggaataatatttccgtggatattacatatgcaaaattctctgcatgcagtatttatactagcatgacaacttgattagatataaatctcacatctacttctaccattaacagaatgttggtgcctcctsaaacttcatatgttgaaacctaatccctgatgtgatggtattaggatgtagggtcttcaggaggtagttaggtcacaagggtaaaaccctcatgaatgggattagtgcccttctaaaaaacggccccagaaagctcccctgttccttctgctgtatgaaaacacagcaagaaggtactgtctatgaaccaagaggagaggcctcaccaaaaaatgaatctgatcgcacgttgatcttagacttggcaacctctagaactttgggacataaattcctactgtttataaaccaacgagtatggcactctcttttaggatcctaaagggactaaggcaatttcctttgagggtcttgtaggttctcttgcaataaatgtcactcttgcaaagtctgtggacagcctgaattttctcaacacatagatgcttgatgttttttgcctgcctgtccaaacaatttgttctctacatttgatgtccaatatatttactagttcaagcctcgatatcaattttggaggttaaatttgcagtatatggtgcaaagtgcattcttatatttagattcaagttttttgaattgttaaactcttaagctctgcattagctactatattttgttggatcatatgaatagaagacaaatcttcaagtctgaacaaagaaaacaccttgataagttcagagctgatatgatactgtctaactcattattaccatcaattatccctgaaactactgagattgatatatgctatgtaattgggccttattcctggcagaccatgtcaaactcaaacctttaccatcagagtgaacagggaacctacagaatgggagaaaatttttgtaatctactcatctgacaaagggctaatatccagaatctacaaagaactcaaacaaatttacaagaaaaaaacaaacaaccccatcacaaagtgggcgaagga

SEQ ID NO: 14749 - DNA, 1266 bp, Homo sapiens
ttaacatttctaaatctctttttttgttaagtgactatctagtataaagaaaaatgttaggtgtttttgtttgtttgtttttttctgataccaaatctgagactaattcttctcccctagtgtttccagttaccctttggttggctgaagttcattctattgaagtttcttccgtaggattcatgggaataatatttccgtggatattacatatgcaaaattctctgcatgcagtatttatactagcatgacaacttgattagatataaatctcacatctacttctaccattaacagaatgttggtgcctcctgaaacttcatatgttgaaacctaatccctgatgtgatggtattaggatgtagggtcttcaggaggtagttaggtcacaagggtaaaaccctcatgaatgggattagtgcccttctaaaaaacggccccagaaagctcccctgttccttctgctrtatgaaaacacagcaagaaggtactgtctatgaaccaagaggagaggcctcaccaaaaaatgaatctgatcgcacgttgatcttagacttggcaacctctagaactttgggacataaattcctactgtttataaaccaacgagtatggcactctcttttaggatcctaaagggactaaggcaatttcctttgagggtcttgtaggttctcttgcaataaatgtcactcttgcaaagtctgtggacagcctgaattttctcaacacatagatgcttgatgttttttgcctgcctgtccaaacaatttgttctctacatttgatgtccaatatatttactagttcaagcctcgatatcaattttggaggttaaatttgcagtatatggtgcaaagtgcattcttatatttagattcaagttttttgaattgttaaactcttaagctctgcattagctactatattttgttggatcatatgaatagaagacaaatcttcaagtctgaacaaagaaaacaccttgataagttcagagctgatatgatactgtctaactcattattaccatcaattatccctgaaactactgagattgatatatgctatgtaattgggccttattcctggcagaccatgtcaaactcaaacctttaccatcagagtgaacagggaacctacagaatgggagaaaatttttgtaatctactcatctgacaaagggctaatatccagaatctacaaagaactcaaacaaatttacaagaaaaaaacaaacaaccccatcacaaagtgggcgaagga

SEQ ID NO: 14750 - DNA, 574 bp, Homo sapiens
agaaaaacagggaaaggggaaggccaatagttattgaagacagctggtgctcaaatctgccaggacctcctgtggaatcaaatagaatatgcttcggaattttagctgatggggacgagagatgcattcatcattagtttttgtctcccttggtcaaggctgccccatgggttattcactcttcccacttccaggctgggcaggaatgaatgccaggtcgcttcccacatccctcccaggtagtaacttcagagaagcccgagtcccaaggwgagaagctaagtcaagatggttgtggaaggaataactggaggaaaatgaaactcagcgactatgagactggagaccagagctgtttaatatgcttacctgcatgctacatatgttcttgtgtgtgcatcaaacccatttaaatagttaacctattttaatattattattaaaaaataagaggaaacagttgcatataccttcctttcttcccagatggaatattaatacataacagatagtgtagtgtctgtaacacggcctcaagaacttccattatctggcccttgtgacttttcagacc

SEQ ID NO: 14751 - DNA, 574 bp, Homo sapiens
agaaaaacagggaaaggggaaggccaatagttattgaagacagctggtgctcaaatctgccaggacctcctgtggaatcaaatagaatatgcttcggaattttagctgatggggacgagagatgcattcatcattagtttttgtctcccttggtcaaggctgccccatgggttattcactcttcccacttccaggctgggcaggaatgaatgccaggtcgcttcccacatccctcccaggtagtaacttcagagaagcccgagtcccaaggtgagaagctaagtcaagatggttgtggaaggaataactggaggaaaatgaaactcagcgactatgagactggagaccagagctgtttaatatgcttacctscatgctacatatgttcttgtgtgtgcatcaaacccatttaaatagttaacctattttaatattattattaaaaaataagaggaaacagttgcatataccttcctttcttcccagatggaatattaatacataacagatagtgtagtgtctgtaacacggcctcaagaacttccattatctggcccttgtgacttttcagacc

SEQ ID NO: 14752 - DNA, 540 bp, Homo sapiens
gaatgtgttcaatcaatccaaattcatgaatacttatggatatggaggactgactgtattaagcttcttttcactttcttacacattrctctctcagaagagattctcttctctccttatctggccaacatctgctcagccttaacaacttaaaatttcagcttacgtcagcataaatacatctttatcattgcaaacaagaaaaaaaagctatccttttttttgactttacacactactcaatttccaccataattttttgcaacttttcacagcatcttattttaaaagctatttttactgtctccctattctcccttttcatttttactttaataaactccaaatgaactgttttttccaactttgcagcgaaatagctcttgcatgttaccaatctcttgataactcctttgtcttcatcttcatctttcagcagcagtagatggttaaccattattgatttcttgggtcaccttattgtcttaacttctctactactacacttcagtggcttctacttctcatcctacttttctg

SEQ ID NO: 14753 - DNA, 540 bp, Homo sapiens
gaatgtgttcaatcaatccaaattcatgaatacttatggatatggaggactgactgtattaagcttcttttcactttcttacacattactctctcagaagagattctcttctctccttayctggccaacatctgctcagccttaacaacttaaaatttcagcttacgtcagcataaatacatctttatcattgcaaacaagaaaaaaaagctatccttttttttgactttacacactactcaatttccaccataattttttgcaacttttcacagcatcttattttaaaagctatttttactgtctccctattctcccttttcatttttactttaataaactccaaatgaactgttttttccaactttgcagcgaaatagctcttgcatgttaccaatctcttgataactcctttgtcttcatcttcatctttcagcagcagtagatggttaaccattattgatttcttgggtcaccttattgtcttaacttctctactactacacttcagtggcttctacttctcatcctacttttctg

SEQ ID NO: 14754 - DNA, 540 bp, Homo sapiens
gaatgtgttcaatcaatccaaattcatgaatacttatggatatggaggactgactgtattaagcttcttttcactttcttacacattactctctcagaagagattctcttctctccttatctggccaacatctgctcagccttaacaacttaaaatttcagcttacgtcagcataaatacatctttatcattgcaaacaagaaaaaaaagctatccttttttttgactttacacactactsaatttccaccataattttttgcaacttttcacagcatcttattttaaaagctatttttactgtctccctattctcccttttcatttttactttaataaactccaaatgaactgttttttccaactttgcagcgaaatagctcttgcatgttaccaatctcttgataactcctttgtcttcatcttcatctttcagcagcagtagatggttaaccattattgatttcttgggtcaccttattgtcttaacttctctactactacacttcagtggcttctacttctcatcctacttttctg

SEQ ID NO: 14755 - DNA, 540 bp, Homo sapiens
gaatgtgttcaatcaatccaaattcatgaatacttatggatatggaggactgactgtattaagcttcttttcactttcttacacattactctctcagaagagattctcttctctccttatctggccaacatctgctcagccttaacaacttaaaatttcagcttacgtcagcataaatacatctttatcattgcaaacaagaaaaaaaagctatccttttttttgactttacacactactcaatttccaccataattttttgcaacttttcacagcatcttattttaaaagctatttttactgtctccmtattctcccttttcatttttactttaataaactccaaatgaactgttttttccaactttgcagcgaaatagctcttgcatgttaccaatctcttgataactcctttgtcttcatcttcatctttcagcagcagtagatggttaaccattattgatttcttgggtcaccttattgtcttaacttctctactactacacttcagtggcttctacttctcatcctacttttctg

SEQ ID NO: 14756 - DNA, 540 bp, Homo sapiens
gaatgtgttcaatcaatccaaattcatgaatacttatggatatggaggactgactgtattaagcttcttttcactttcttacacattactctctcagaagagattctcttctctccttatctggccaacatctgctcagccttaacaacttaaaatttcagcttacgtcagcataaatacatctttatcattgcaaacaagaaaaaaaagctatccttttttttgactttacacactactcaatttccaccataattttttgcaacttttcacagcatcttattttaaaagctatttttactgtctcccyattctcccttttcatttttactttaataaactccaaatgaactgttttttccaactttgcagcgaaatagctcttgcatgttaccaatctcttgataactcctttgtcttcatcttcatctttcagcagcagtagatggttaaccattattgatttcttgggtcaccttattgtcttaacttctctactactacacttcagtggcttctacttctcatcctacttttctg

SEQ ID NO: 14757 - DNA, 503 bp, Homo sapiens
gatagaaaatcaccattgtgccattcccccaagataattaaattagacaaggatcaagaaagtctactaagaccattagattaaacgtwggtggaaaataaagcattattgtgatgccaaatggcatcttacacacgacttgccaatccaaaggaaaaacataactttactatagaaatatcctgtggttgcactttgatcatatgaccaaatttagcgttgttatagtgggatcccttgatattgtgcaatatgaagtatgtaacatcatctgtggaatatttttgccaaaacaatttaaccaaaatctaaacaagcccttgtttagatatttccaatggaaatatatgggatagtcataagttaaatctcaccacaaggaaacaaacaaacaaatctaacatgtgggacattatacaagaaaactaatgtggtatgtttttaaaaagtcaaagttaagagcaaaaaaaggttgaggactgttcttgaataaaatagctaaa

SEQ ID NO: 14758 - DNA, 556 bp, Homo sapiens
ggcaatcttatccctaaaagctatgctctaaatcactatgctatgctataacatatgctttttaaacattatcataaagtcactttatatgtttatatgtgatttttagtgattgtatagtataccaggaggctccatttaccatrtatctatatttcattctatgcaaatatgccttagggaggtgtgtaaggtggaaaccctgtactataacattatataaatgacctaatatcttttaaagtcatttctttatttctggacatcaagtgttattgtttatttgttcttccaatcacacttttggtagagttaaaagagcactaaatatctcatcagatagacctgggtttggatcccaactctgcaacttactactggtgttttcttagagaagcaccttaatctgtctatatctcaggaaagatagggtgttgcaaaaattaaataagatgtcatgggtgttaactgtttagcacagttgctgacacatggggagcggctaatatctagtaatccttttcattattaatcattatttatgacagctctaatg

SEQ ID NO: 14759 - DNA, 541 bp, Homo sapiens
taataataggcttttattggggtgggggagtattcaatagtcatgctaacttgggatacattatacacacttagaacttacaataatacccattarcatattaaagactcagagatcctacagagaaaaaaataacaaaaaactaaactcaactatctaggctgggtgcagtggctcacgcctgtaattccagcactttgggaggccaaggtgggtgcgtcgcttgaggtcatgagttcgagaccagcctggccaacatggtgaaaccccctgtctctaccaaaaatacaaatttagctgagcatggtagcgcatacctgtaatcccagctactcaggaggctgaggcaggagaattgcttgaaccttggaggcagaggttgcagtgagctgagatcatgccattgcactccagtctgggcgacagagcaagactctatctcaaaaaaaaaaaaaaaaaaaaaaatatatatatatatatatatgtagggtgaaggctttaaaccatgctaactaaacttcctgactcctaggaacataaa

SEQ ID NO: 14760 - DNA, 528 bp, Homo sapiens
aattttgctttatgtggagatatatcttcatttgaaagtacctttgtgggccagagggtgtacaccttgatcattgctgaaacgtgcttttccgtagagagagacaaaggagttggtttttactcccaagccctttgctacttaaataaagttattggctgcctaatgaatgttagctgcagtactccctgtggtcagygggcctgttgtttaatgaattgcttaatgtgcttgattactgttacaatgttgaatgaggaaaaggcaagagagatttgaaagattcactggaggatatgatgaaaatgaattggatcaataggaactttttgctcatctctgaacagcacattataggctgcattgttagagtttggggataatgcaattttgtggcttgttgtctttttataattcacaaatataaatctccttcaacagtgagttttagggccggccttcctggagttataaatgatccccagactctagccctggttacttacacggacagataaattaattagg

SEQ ID NO: 14761 - DNA, 1042 bp, Homo sapiens
tttttttaattcttcaatgtcctgcctttctcagaagacgaagagacttaaatgtgttgttagttatcctgttagattctcctcatcttgtgttcctgagacacgacttggggtgactgttctgtttccaggggcacagtatattaaggatagaattctaatcataccaagtcccacagagtaactactctttgagggaatatttacttctatatatttatttttatttgttccattctctttcacaccagaaaaagatttaaggaatccgaggcaggtttttgtgttttttttttgttttgttttgttttgttttgttttgttttgttttgtttttgagacagaatctcgctccgtctcccaggctggagtgcagtggcgtgatctggactcactgcaagctccgcctcctgggttcacgccattctcccgcctcagcctcccgagtagctgggactacaggcacccgccactaggcccggctaattttttgtatttttagtagagacggggtttcaccgtgttagccaggatggtctcgatctcctgacctcgtgatctgcccgccttggcttcccaaagtcctgggattacaggcgtgagccactgtgcccagccggcaggttgttttaaagtatccctgtgtccatttggtgacaaaagaaaaacctaaatttaaaaaaagaaaaaagaaagaaagagaaagagaaggaaggaaggaaggaagkaaggaaggaaggaaggaaggaaggaaggcaggcaggcaggcaggcaggcaagcaagcatttgtcatgtcagacacctccttcaaggtttgcaaagcaaatttgggtaaaatgaagtgcctagatttgctctttacagaagtatccaaaacactttaaagaatggctcctctttccctctctttctctctctccctcatcttctctttccctctttctctccctcttcctctccctttctttctgtctctcctctctctcatccaaaaagtaaccactatatatttgatatcttatttggtttactggatgttct

SEQ ID NO: 14762 - DNA, 1042 bp, Homo sapiens
tttttttaattcttcaatgtcctgcctttctcagaagacgaagagacttaaatgtgttgttagttatcctgttagattctcctcatcttgtgttcctgagacacgacttggggtgactgttctgtttccaggggcacagtatattaaggatagaattctaatcataccaagtcccacagagtaactactctttgagggaatatttacttctatatatttatttttatttgttccattctctttcacaccagaaaaagatttaaggaatccgaggcaggtttttgtgttttttttttgttttgttttgttttgttttgttttgttttgttttgtttttgagacagaatctcgctccgtctcccaggctggagtgcagtggcgtgatctggactcactgcaagctccgcctcctgggttcacgccattctcccgcctcagcctcccgagtagctgggactacaggcacccgccactaggcccggctaattttttgtatttttagtagagacggggtttcaccgtgttagccaggatggtctcgatctcctgacctcgtgatctgcccgccttggcttcccaaagtcctgggattacaggcgtgagccactgtgcccagccggcaggttgttttaaagtatccctgtgtccatttggtgacaaaagaaaaacctaaatttaaaaaaagaaaaaagaaagaaagagaaagagaaggaaggaaggaaggaaggaaggaaggaaggaaggaaggaaggaaggcaggcaggcaggcaggcaggcaagcaagcatttgtcatgtcagacacctccttcaaggtttgcaaagcaaatttgggtaaaaygaagtgcctagatttgctctttacagaagtatccaaaacactttaaagaatggctcctctttccctctctttctctctctccctcatcttctctttccctctttctctccctcttcctctccctttctttctgtctctcctctctctcatccaaaaagtaaccactatatatttgatatcttatttggtttactggatgttct

SEQ ID NO: 14763 - DNA, 1887 bp, Homo sapiens
gcattgactgtttttgttatgcagatgaaaggacttttaattaaataaaggtaaaatttacaaatataaaaattaagtgtcttatatggttagcatcttaaaagatccacaaaaaatggaaattcgaaacaatatgactcagtctaattactgaagcacatgcagacatatttccatttacttttactattgcagacctaacagttgctaaaaatgagccactcttctaagggtaaaagaccacattttctcacgcacttaagattattaggtctctgtgaaaatgtttaagacatagacattcaatccgtcagctatggaattggctccaagttcatttttaaacattacattgttttactaatttcagttcttgcaacatctgctttatatctccattatttttcctacagtttcttatgaatggttagctgagtaaaattgcaaatgagaactgaaaaacagacacttgaaattgtctttacttgatgggacttgttatcattagttttgtatctttgttggtttaatgaaacaactgaaaagctgtgtagtccctaactcatacctgctttcaagggttcctatctttcagccttgttccccttctgtgagagaagtcctctcccacaggaggataaagggcaaggacccaggaagcagactcagccactaatgcctgaaggtggggaagctggagccagtcaatcacattgtaatttaggattcttgaatatcatctcacacttcaaaaacaatgccttaaagaaatggctggtacacaattctctaaacatattacctctttgttccttggagatttttgaaacgacaactggaatgttatgttctgctcctccctgaaaagagaaaatcatatattgtactttttaatctaaaaaaaatgctgcttttagctaagaaaccatacaggctctgaagggaatgttaagtggatattaggcagaatttaaataaacttgtggaatttctcctctaagtagatagtgctcccatgaaaattatctacctgtttagaattttgctgagacatccaataataacaattggctttgaaagttttcatttatcaacaaatattgattatgtatttagataggcattctcctcaatgtgtagcaatgctatccaatagaaattcttatttaggattccaaacaccagataattatatattactgttatcctgctaagttattctgtgctggcagctaagggcttttggtggtgcagtgacccgttgggataccaaggaagtagagagacctttaccagaacaaatggataaacaaaatcagaatgcacatatgcatgaaaaatgagggattcatctgcatttccttccttagtattgaattcctccttgtgtgaaagcacatactaaacaatttgcagagtaaaacatactgccaagaatattgaagtagtactatttttattatttatttatttatgtatttatttattttattttttgagacggaggagactcgctctgttgcccaggctggagtgccatggcgcgatcttggctcactgcaacctccacctgccgggttcacgccatcctcctgcctcagcctcccgagtagctgggactacaggtgcgccatgcccagmtaatttttgtatttttagtagagacggggtttcaccatgttagccaggatagtttccatctcctgacctcgtgatccaactgcctcggcatcccaaagtgctgggattacaggggtgagtcaccgcacccggcctgcagtagtactatttattagttgactaaatgagatatgaaaaaagaaagacaagtaagctaaacttatgtgaaagaaaataaaataaatccttaaaaacggaaaaagaatc

SEQ ID NO: 14764 - DNA, 565 bp, Homo sapiens
gtgtctaagatgaccctgcctctgacctgarcagagatagtgatttgtggctgacagtgtggtggaaatcaagtgcttatttagcacacagtaaacactgaataaaggaaggctattatgctaacacagcccatgtattaagatttatgaggaaactcacatagcattaaagtggtaaataagattaggactaatcccttctaagacccttaatatttatgagttagaactccaaattcccaatccccttttatctgttctattttgtcccattacagttatcagtgtctaacatgttattttttcatttctcacacttattgttttctttcttcttcccattcctaactaaaatgcacatttcttcagggtgcagacattttttggtagtttgttttgtgcatcgatgtaaacccagtgcctggaataatgtctggtctatctttgacatgtttgttgagttgaatgaatgaatgaatgaatgaagtctacggcttttccaggcccagcgtaaggtcactgatagcctctagagacacttggaaattagaaaggatgttaagga

SEQ ID NO: 14765 - DNA, 565 bp, Homo sapiens
gtgtctaagatgaccctgcctctgacctgaacagagatagtgatttgtggctgacagtgtggtggaaatcaagtgcttatttagcacacagtaaacactgaataaaggaaggctattatsctaacacagcccatgtattaagatttatgaggaaactcacatagcattaaagtggtaaataagattaggactaatcccttctaagacccttaatatttatgagttagaactccaaattcccaatccccttttatctgttctattttgtcccattacagttatcagtgtctaacatgttattttttcatttctcacacttattgttttctttcttcttcccattcctaactaaaatgcacatttcttcagggtgcagacattttttggtagtttgttttgtgcatcgatgtaaacccagtgcctggaataatgtctggtctatctttgacatgtttgttgagttgaatgaatgaatgaatgaatgaagtctacggcttttccaggcccagcgtaaggtcactgatagcctctagagacacttggaaattagaaaggatgttaagga

SEQ ID NO: 14766 - DNA, 565 bp, Homo sapiens
gtgtctaagatgaccctgcctctgacctgaacagagatagtgatttgtggctgacagtgtggtggaaatcaagtgcttatttagcacacagtaaacactgaataaaggaaggctattatgctaacacagcccatgtattaagatttatgaggaaactcacatagcattaaagtggtaaataagattaggactaatcccttctaagacccttaatatttatgagttagaactccaaattcccaatccccttttatctgttctattttgtcccattacagttatcagtgtctaacatgttattttttcatttctcacacttattgttttctttcttcttcccattcctaactaaaatgcacatttcttcagggtgcagacattttttggtagtttgttttgtgcatcgatgtaaacccagtgcctggaataatgtctggtctatctttgacatgtttgttgagttgaatgaatgaatgaawgaatgaagtctacggcttttccaggcccagcgtaaggtcactgatagcctctagagacacttggaaattagaaaggatgttaagga

SEQ ID NO: 14767 - DNA, 538 bp, Homo sapiens
agagagatagtttagaaagctgtgtaggaatccaggcaacaggtggtagttgcttcgtttttggagttggtggaggagataaaatgaagcaaatataagaaatcaagatatttaggtaccaagatatttggaaagtaacattgagcagattcagtaactggtcaagtataagaggtgtaaaggattaattcaagtttttagccttgtgaatctgcaytggggcggaggtgggtgttggggagtggggtggcatgttgcctttccttgaacgtgtccagagaagagatcaagtttggagtgggtgctggagggggcagatcttgagtttagttttgagtagttgttgaattgtcatacctttgccagccaaagaaatgacgttaacttagtgatctattgcaacctcttcgttttctaattgataaaactgagactcggagaactgtctgataatgtatagactcaggcatgttcaggatcaaaaaccatgtccctcactttttcttatcaccatttttacaaacaagacctctgttcc

SEQ ID NO: 14768 - DNA, 538 bp, Homo sapiens
agagagatagtttagaaagctgtgtaggaatccaggcaacaggtggtagttgcttcgtttttggagttggtggaggagataaaatgaagcaaatataagaaatcaagatatttaggtaccaagatatttggaaagtaacattgagcagattcagtaactggtcaagtataagaggtgtaaaggattaattcaagtttttagccttgtgaatctgcactggggcggaggtgggtgttggggagtggggtggcatgttgcctttccttgaacgtgtccagagaagagatcaagtttggagtgggtgctggagggggcagatcttgagtttagttttgagtagttgttgaattgtcatacctttgccagccaaagaaatgacgttaacttagtgatctattgcaacctcttcgttttctaattgataaaactgagactcggagaactgtctgataaygtatagactcaggcatgttcaggatcaaaaaccatgtccctcactttttcttatcaccatttttacaaacaagacctctgttcc

SEQ ID NO: 14769 - DNA, 494 bp, Homo sapiens
tgagggaaaaatctgtataaggaaccattaaattagtttccacccccacagcaaacaacractctcttgtctcagcctcccaagcagataggaggtttattttctggtgaaactgaccctggaaagaggcctagggctcacaaacaccaggcagagagccggcggcaaaggtaaaaggccgacgacaacggacttggtccaggtgaacccacctgacaggcgcacgaaaacttcccttgccctccccggctactcgttgtccaccgaaattcattctcctgacttccacgacaattgagttgtagctaggcaggtaggatgtcaggttgggagcacacagccagctcactgcaggtaagtgtgaccacacaaggaagctctaccggaggaatggacacaaacacattcttgctcctcaactgctccttactactcttttctcctgcttaagcatacgctagcctgaggccctgtttctaccacaaaaaggacaa

SEQ ID NO: 14770 - DNA, 565 bp, Homo sapiens
gtctttaagttcattgatgctttttctgtggtgtccaatttgctattaagctcatccaatgaattttatatatatatatatatatatatatatatatatatatatttagttcatatatatatatatatttagttgtagaatttccatttggttcttttttagagtttacatttctttactaaaataaccctctcttcaaccatcatagctatcttttcctgtgaactttaacatattcatattaatcgttttaaagcttttgtctgctaactccaataactggatcatgtgtggatctgcttctctattttctcttgattatggatcacatgcttcttttccttactctcctgtttctcaaaactgtattccagaaattttgtataaaagaacagtagaaatgaaaatatatctttttgtttacttcycagaaattgcagttcctttcccctgtctggtggttaggttgaagctgatcactgggactcctcggacagtggaattgaggtaaggctgcactgcagctttaattagattgtgttcacctgtaagtagcccaatccca

SEQ ID NO: 14771 - DNA, 609 bp, Homo sapiens
catcagaacccttttttctcaaacatgaacttgcatatacacacctatacacatgctcaaagagacactgaggattagaggagggtatagcaagaagagctggaactaaacaagctaaggaaaaacagccttctcccaaatggtcttgcctttcctcgcatagaagcatctggaaatgtctgaagccccatttccctgctctcaaagcccacctgttatcaggtggagtagacagagctctgggctagtgtggccaggtgcagtagctcatgtctatttatcccagcactttgggaagccaagccaggaagattatttgatgccaggggaatcacttaagaccagcctaggcaacatagtgagaccctttctctacaaaacatttaaaaattagctagacatggtggtgcacgcctatggttctagctacttgggaggctgagacaggagaatcacttgagcctaggagttgggggatacgattgcaccactgcactccagggtgagtgacagagtgagaccctgtctcttaaaaaacaaaaamcaaaaacaaacaaaaaaacagaaagagctctaggctagatgtcaggagatctggattcagctccc

SEQ ID NO: 14772 - DNA, 516 bp, Homo sapiens
tgtagaaaatcctaaatgttagtgtaattacttttatctggaaaccccagtacatccacatcagcctttaaacatcaccagatataagcatggtgccactatagcttaattgattgatcttctagatttcagcacgaaagcagttctctttgctcagctactatcaaatctgcactatcaaatgtttcaaacactcttggtagccttccactgccatcatttataagtaaaaatgagaaaaaacatgttttctactccttgagtaaatgaaaattaaccrgtcttttctcaaaagaggataatttgaaactcttcctgacagctgaaatgttttattcctgctgagaactgtttaaaactcttctccaacaaaaataaccatccataatttcgttatctgtgctactgtttataaaataataaagtggaaacttaaataaacaaagataaataaaaagcagatgtttgactaaagccttacataattctgcagaacagagatttttaggggcaaag

SEQ ID NO: 14773 - DNA, 632 bp, Homo sapiens
ttttttctttaatctaggcaaacaatgatgttggcttggacttattggtaacagtamagttagaaatattggaaatatttgggatatattttagaggtagaactgacagaattcatggatatgtcagatatgaaatttgagagaaagtggatccacagtgataaatagattttgacttcaacaacttggaacaaattgtattgaaatacactgagatggaggaaattaaacaaagattagatgtagggaatggagagagaaacctatggtttttttgaccttgtcgagttcagtgtaccttggatattcttgtggagttttaaaatcagcacctggttacaagtatctggagtttggaggttgcaatcagatatggattcactgacatgattaaaggcttggaactgggtaaggtcctagggaaaacctgtggatagagaaagagttcaaacatagggccccaggacagtccagcgtttagaatttaaagagagcaaggggcctgagcaagtagaagaagagcagctttattgggcaaatggtaaaggtcttatatttatcaacttttagaatgtcttctagaaattttcgattcaagtattctgcctccttcccttacattttctagtgag

SEQ ID NO: 14774 - DNA, 536 bp, Homo sapiens
caagagctattttttaatctttatccttgggctggccacaaagaggaggtctgatcattaaattggattggggctcatttttataaagccacttttaagtaagtgaaaactagacaacgttccctaaggacaaatgtgaaagtaacagtctaacgtaggattaccaaaaaagtcaaaaagcctgtgctcttgtttccattcgacttcacatacactaagacgttagatgtcacttataaaagatgcyatcagtgccttgcccatatctgttcagcctttaccatttcattccatgtctcctctacttccaacatccagcagctaaatctctacctgagaactttccctgtataacagagcccactctgcctatgcatgtgcctatgcttccagaatcacaccttgattggtatatgaataccctaccctctcactccatttatggtataactctgaggtgtgtgttccatactgtttcctagagttccccagcaagctccagctgaccagtggtaacttgctaaagaacacattat

SEQ ID NO: 14775 - DNA, 1211 bp, Homo sapiens
gaaatagcaacaatatttcccttgccttccactaaataagtctgttgccttgcagagtgcctggtataaatagtgttgttttttgtttgtgtgtttgttttgtttttctttgagacggagtctggctctgtcacccaggctggagtgcagtggcttgatctccgtttactgcaacctccacctcccgagttcaagagattctcctgctgggattacaggcgcatgccaccacgcacggctaattgttttttgtatttttagtagagacagggtttcccatgttggccaggctagtctcgaactcctgatctcaggtgattcacccgcctcggcctcccaaagttctgggattacaggcgtgagtcactgcgcccgtccttaaaatagtatttttaaagagtttttgaattatatcttgtaactattatggaaacttccacaaataatccactacatttccagttagactttcaccacctttaggagcccaggaaattcactatcatttttcagaaacttgtaatatatcacctgtttactaaagtgtgagacaactgggttaagatatctccgatgctcattctaattcaaggatgagtcaccttaattttccatcttagtgttctatttctaattttccatcctagaattctattcctgattatagaattagaaaagtatgataatgggaaagttttgctatctctttggaagggtaatcctctttgtcttcctttacattccatgtaatgagaaagtatattggtattcatttctcaacctatcccaagtttaagaaactcagtagcatcagaggtcccattgaggccagagagctctaaagacataagattttgaaccaatgatattggctgcaaagtaatgagaacagttaaaataataataaaaatgatggcttacttgtactgagaatcatttacacaaaaagcttataattattctcattttacaaatgaatgacattaaatagtttccaaaggtcacacagcagtgagtggctaacatgtgattcaaagcatgtgttctctttgcctttctgtgccatgaagtcaagtcgagctaacgttaattaacattttaaaatttyttaatcctgaatgatttttatattgacgcttttgcctgttcatcatccttccatttcccctgcacctccatttttttagtattaatagtaatgactagaaaca

SEQ ID NO: 14776 - DNA, 1914 bp, Homo sapiens
acaccattttatgagatactcaagcagctctatggagaggtcaatgacatgaggaaatgaggcctctagccaataaccagccctaactcttcggacatgtgagtgagccaccttgaacgtggatcccccagcctcagacaagccttaggccacatcttgactgaaattttacgagagtcatggagccagaaccatgccctctgaattctggataaaactgcgaagtaattaatgtccattgttttaagcactaaattttgaggtagttctttttgtacctcaaaaaaaaaattttgtacstcaagaaaaaatagatagttaatgtactggtgaatgtatgcatgtataaaaaacacttgcctacatatattacctagctctatccattgacagactctggatacaataacacttcaaaaccagagagcatactggtgccagatcttgatttctaaaaacaattcttcactaaaaggaaccagtgctcctcagagaaatggctaacttcagggtgagagcaggaaaaattaaagatgagtctgaatgttttatttaatatatcaaggaaatggtcaaacaattatgaaagccagtttggaatagctcccactggtgaatctgggacaatccaagcctcagaatgaataataacctactgaataaaacaggaatttatacctccatactgatatgaataaataagtaaaaaagtaaattggaaggaataaattattgcagtagaatgccaactaataaatgcagaagaaatggtaaaattagaagataactagcgggcaaccatcatagtaataattaattcagccaaaaaatgtcaacagatactaaaattaccaaatgtaagtgtgatgagaaatgaaatgttacataggctcaactattcacaaaatgcttattaaatataaggaagaaaggagtgactgtacagtggagaaatctggcagacaccacctaaacaaattattaaagttaacatcatcagtaatgggacaaattgaaagcatgtgccatctaattggatgcaataagaagaacacaaaatcattactgtaatattccagccctaggagaagcacaacttgaatctaataataaggaaacattagataaatcagatttggtgactaatgtgataaaaagtccaggtcatgaaagtgaaaagagactgaggaactgttcctgataaaggagacaatagaaacacaacagctgactgtaacatgtgatcttggactaaattatttttaaggaaattattgggataattggcaaaaagttgaatgatacttgtgatttaggtaataatagtgaatccttcttaatttcctgatttgataatgttactgtggttatacagaaaactacttacttgtataaaatattcactaaggtatttgaagttatggggcttcttaccaacaacttagctcaaattgttcagaatcaaaaagctcttaaatctagctttgctaattctttgtaggttttttattattttaaaataaaaggacaaaagaaacacattacagatgtgaaaattacagcactcatttggcggagaacataaaggcagagaacaaaaagacacatcatgctaaatagaaaaaatacacagaaagggcatgcatagcaggcatcatatacccataaagtgccaacaacaacagcaacaataaaagagaaagtaggaacatggagagcagatccaaacggagacatccactgaattacttaccatcccaagagaaaacagatggtgtagttcaaaatagaataatttcatgagggtttatttacaaagagactatttgcaaagatgtggattatgggaaccatacatccaaggattagtaatagcctaatacctaagctattaagaggggcagacatagtaca

SEQ ID NO: 14777 - DNA, 1200 bp, Homo sapiens
ttttttgagacggagtctcgctctgtcacccaggctggagtgcagtggcgcggtctcggctcacttcaagctccgcctcccgggttcaccccattctcctgcctcagcctcccgactagctgggactacaggcgcctgccaccacgcctggctaattttttttattttttagtagagacggggtttcacagtgttagccaggatggtctcgatctcctgactcgtgattcacccgcctcggcctcccaaagtgctgcgattacaggcgtgagccaccgcgcccggccagggggtcttacatcccttctccctgattcttcttgtgacyttctatggaaatcagctatggagatcgatttgaatataattatattctaccataattgcatatgaacttaaaagtttacttcctctgaactttaaatcaaagtcattattaaaatttctcagttctaacatttaatgacctaactagatcttggagttggactgaagaaaattgacctaatatcttttttgtccttgaatattaaatttagtatcttatattttctcatgtagtgaagaaatattaaaagaaaatactttcacttaagtgtttcatctcattgctaacaagaaatattatgaaatgaacatcactctttcctctgaggaattctctagccattactggaggcaggatgtggtgttagatggacaaacatgacctcatgatccctctgctaatgtgaatctttgtgaaaaattaagcgtattttttaaacaatcggtttaaggtttaagtgcattgaggtagataaaatgggatcaccaccctgcctcaacttggcaccaagttgtctttgaaaccatgagtcatccttcctcttacaaagtgaaaatgctcttcaacaactcattgcttagtggctcagaaataattttgaaaaactgatgacaatgccatcaattattttgtgaagacaacaaactcctctgatttttccaaatttgaggggtcttttctaagtctttgtgggtttttttagaccatgatctggcataggtttttttttttttggttggggtgttgtcttggttgtgaggttttaattgtcatgtacaagactcttgggtctccagatgccttaaaatggaatcattagtgaattaaaataatgtagctctccagagtatgatttgcttcagcttgttagg

SEQ ID NO: 14778 - DNA, 558 bp, Homo sapiens
tttaccgttcatgctactggtgtgagctctctgtgccccttctggtgctaagtgctgcctgtttaatgaattgttctttgctcagataaacgctactaaatttaattggtctgaagtttttcttctaacaagytgttttaatctgttttgtgctgctataacagaatacctaagactaggtcatttgtaataaacaaaaattcattggcatatggttctggaggctgagaagtccaggattgagggctggcatctggaaagagtcttcttgctatgtcgtctgatagtggaaggtagaagggcaagagagggtgagtgagagagagaaaaaagggggctgagcttgtactgttatacagaacccaatcccatgacagtggcattaattcactcatgagggcagaaccctcatagcctaattgcctctcagtaggttccacttcccaacactgttgcactggggattaagtttcctacacatgctttttggaggacaccttcaaacttctataattcactcttttgtcagacacatttcttatttttgtggtggaatac

SEQ ID NO: 14779 - DNA, 539 bp, Homo sapiens
cttttcattaacttgcatgtttactgtaattttatcaatgcctcttccaggcaaaaagttttatttaagtactgcaccaaaagaatatttactactattggtagcaataatattgaaatctttgtaaatccttagaattgcaagggctcactatgcagatagatagatagatagatagatagatagatagatgtccacatacacacatatgtatataatcatgtatatatataaatgtataaaatataagtatataacatataagtttatacrtatttagaaagttaataacatattacatattatatatgtatataataagctccatatataacatataaatgaatctattaagctcccaatgtcagacatactattgttctctaatttaatttgtcttacaattatttaatcaatagatttctgttaaatttgagaagtaatcacattccataagctactaatcttttatatttaccttttctttttatagtatcacagcaaatggaatttccaattccatcatatatattaactta

SEQ ID NO: 14780 - DNA, 539 bp, Homo sapiens
cttttcattaacttgcatgtttactgtaattttatcaatgcctcttccaggcaaaaagttttatttaagtactgcaccaaaagaatatttactactattggtagcaataatattgaaatctttgtaaatccttagaattgcaagggctcactatgcagatagatagatagatagatagatagatagatagatgtccacatacacacatatgtatataatcatgtatatatataaatgtataaaatataagtatataacatataagtttatacgtatttakaaagttaataacatattacatattatatatgtatataataagctccatatataacatataaatgaatctattaagctcccaatgtcagacatactattgttctctaatttaatttgtcttacaattatttaatcaatagatttctgttaaatttgagaagtaatcacattccataagctactaatcttttatatttaccttttctttttatagtatcacagcaaatggaatttccaattccatcatatatattaactta

SEQ ID NO: 14781 - DNA, 539 bp, Homo sapiens
cttttcattaacttgcatgtttactgtaattttatcaatgcctcttccaggcaaaaagttttatttaagtactgcaccaaaagaatatttactactattggtagcaataatattgaaatctttgtaaatccttagaattgcaagggctcactatgcagatagatagatagatagatagatagatagatagatgtccacatacacacatatgtatataatcatgtatatatataaatgtataaaatataagtatataacatataagtttatacgtatttagaaagttaataacatattacatattatatatgtatataataagctscatatataacatataaatgaatctattaagctcccaatgtcagacatactattgttctctaatttaatttgtcttacaattatttaatcaatagatttctgttaaatttgagaagtaatcacattccataagctactaatcttttatatttaccttttctttttatagtatcacagcaaatggaatttccaattccatcatatatattaactta

SEQ ID NO: 14782 - DNA, 498 bp, Homo sapiens
gaataaagtatttcgtaggggaaactgaaatctaagcaaagtaaagcagcaaatagttgaaagcctgttatgatcatggcactgcaaactgtttcaagaagccaaaaacaccttcagctttggagttcatgatcaaggttgtccaaacaagacaaagattggtgattatttaactcacagtacaaagtgataattggagcaaaatttaaaaaattgcacctgttcaattttgtgaatcagaatgtgcactaccacagagtacaygccgagagaatatggtatgaatatacaatattcatacatgtctttgttcttttcattctttactcattgaacacggagtctagggtcaggtcaagcgcattctatagagttaatgcaagcttgtgctgtgaggccaggtggactgggagcagcacagtctggggggtttcctctcagagaatacgggttaagggagctgctgatagttgcaccacgtggtgcccctgagttagg

SEQ ID NO: 14783 - DNA, 609 bp, Homo sapiens
cataacatgtatagataatctaataaaatcaagtgctttttaaaaaggaggctgggggagggatagcatgaggagaaatacctaaggtaaatgatgagttgatgggcgcagcaaaccaacatggcacatgtaatcctatgtaacaaacctgcacgttgtgcacatgtaccctagaacttaaagtgtaatttaaaaaatgctatatattctcagagtcaacaatgtttgagaacaagctaatagtttttggctaggttcaaggagctgggtgttggtgatactgaattataagaacagtatgaatagagatctaaataaactttaggaattaaagataacaaatgattttataagaggtttttctagcatgaacacttatggagcgactttcttgccctagctcgcctgggaatactataccgtgagccattaccaaaaaataaataaataaataaaactgtggttaaaaatacatggcargagatctagcctctaaaccaaattgtaggtacaggattgttagctataagcaaaattaagcacaacgtcctatagcacatcgcaagcacgcgttcatcttctgtactgacacttcctactgttgaaagc

SEQ ID NO: 14784 - DNA, 523 bp, Homo sapiens
agatgctgacacacacagaggaatccctgaggggcagtggagccaggcatccccactaatcagatagctatttgatcttgagatctttggatctctcttagaaggsaggtctcaatcagaggatagttctgaaactactcaaaaatagataatgtaggtttccaaaacaagcccatttcaggcctctttggctcctaaccacacagaaagattctagcgagaccctgcttcactcttaatatgggagagctgtctgggagtttgtaaggtaagaatctctatggaatataagcctctggagagccacagaccagacaagtcaaccagggcacaaaatagacccagtgtggaaagggctcctcccaggacaaaaagcccagatgaagagctgacaggggcatcggggaaaacacacatgggcactttgtctggcagtacagctctcattctaaaagcatgatggctccaacagctctctcatacaacagcctacacataacaattcacaaagtgaccacttggt

SEQ ID NO: 14785 - DNA, 546 bp, Homo sapiens
tttgcaacagaagctggaactctgaggtgcaggaaggcctggtcctgccctcaggccccgggacagataacatatacacagacagtaagcacctaaagagacacacacagcacagtcttcaaacgctgcccttcaggcaatttccctgcattttagactcattgaagaaaagggcaagtcaactacaggtcagaaagatgtgatggagaaacgtttttttcagttttgcatttaacatagattttcctgttcagcaaagtctgaagagcttgatattccttccagactccctgggtcttcctataaagataataatgtgcagaaaggtaatttaaaaattagtgcgacagctaagtcccttcacagcatgcccagtttacacaatgcattttagtgtcttccaaaaaaaagtgaacacctgttctatgctcttattagggaatgctgtaaaaggccaccaggtctctctggtagtattggtatggatagagaggcaggacagtgggagctgttctggtgccatggccagtaccactgarcccactt

SEQ ID NO: 14786 - DNA, 1831 bp, Homo sapiens
tggtcagtttgtatggaatgcacctgcaagggtacctccttgtctgaaagtcgtgctttaaaaataattaattaagagagagagagagaaagatggcccataaagaaaactctgaatgtctcctgtattaaggtgaagttattcttttttaagagactaccgtttaacctacatcatggaggtatctcatgacccttcggcttatagttttcagtgtcatctcatgtatttgtttttctcaaaataaatttaatgcatcatgtacttctctctagaagggtacttgtttgacatctggtttttaactttaagtcacaatcccttcttgcttgttaacaccagatttgaaagttaatgtttgttccttgcctaaaacatatattcttgattgtctttagaatagaatagtaaaagtgcactttgggcaccatgcaggtccttgatgatgtgactttgataaacttgtaaaaaaaaatcgtttggtggcaagatttagcattagttactactctttgaaatgtgaatgtgtaggatttcttttacaaagatctggaaatcttcattacctcttaaatttaagcttatttttatagcagtaaagtctgatttttttttccataaaataagtatcttgttaagtaattataaggtgatctaactttggatgtgcttataggcccatgggacgtgcatgtgcacagtgatttggcaaaggacctaggttagtgcttgtgatgatcacttcagattttcataatactagtttctttaagagtggtttctttattttgtttgcttatttatttatttgtttattttacttggtagatgaaaatgaagttgaaaggccagaagaagaaaatgccaggttagtgaaattttctgttgatgcctattacacaggttgtgtgawacaatggttctgtcagttgtcaaaattattttcttacaatcattggcttcattacaacactgacttacaacattttggaggacattgaatcctttaaggattattccagtttcaggacctaatcttacgccaattctatttgttggtagtttaaaggacaaagtttttgaacttaggattggactgattttacactgttaagtaacttgttactcttaagtgaattcagtagtgaagtatacagtataatcgttaagctactgataaaaatattttaacttaattgaaaatgtttttaagtaaatcaggaacactccaaactactgcttttccagtttattaacatttttgatgatataatggcagtttggttgtaatttcaatgctatgtattgtttgcattcaaaatgtaattagctgatttgttataaggttgatttctttgttagattgtaagaaagatgtaagtgttcatttatagaacatatacagggagtcagaattttaccccagatttcaaaaagcaagccatgtaaagaagtacatggagatgtcggctttaccctgaccacatgcattagtgtctgtaatggagggagaggtagttagaagattttaaggaatatttgggtttaaaaagtggaagatatacaacttcataccgagtaagctgcaatcgaaaagataaaacaggtgttagtgaggatatggggaaataaaaccctcatacacttctggtgggattgtaaaatggtgcagctgctttgaagaacagcctggccattttctcaaatggtgaaacatggagttaccatgtgagtcctccaccttagaggaatgaaaacatattcagacaaaaacttgtacgtgaatattcatagcagcattattcttaatagaaagtggaaaaagaaaacc

SEQ ID NO: 14787 - DNA, 1831 bp, Homo sapiens
tggtcagtttgtatggaatgcacctgcaagggtacctccttgtctgaaagtcgtgctttaaaaataattaattaagagagagagagagaaagatggcccataaagaaaactctgaatgtctcctgtattaaggtgaagttattcttttttaagagactaccgtttaacctacatcatggaggtatctcatgacccttcggcttatagttttcagtgtcatctcatgtatttgtttttctcaaaataaatttaatgcatcatgtacttctctctagaagggtacttgtttgacatctggtttttaactttaagtcacaatcccttcttgcttgttaacaccagatttgaaagttaatgtttgttccttgcctaaaacatatattcttgattgtctttagaatagaatagtaaaagtgcactttgggcaccatgcaggtccttgatgatgtgactttgataaacttgtaaaaaaaaatcgtttggtggcaagatttagcattagttactactctttgaaatgtgaatgtgtaggatttcttttacaaagatctggaaatcttcattacctcttaaatttaagcttatttttatagcagtaaagtctgatttttttttccataaaataagtatcttgttaagtaattataaggtgatctaactttggatgtgcttataggcccatgggacgtgcatgtgcacagtgatttggcaaaggacctaggttagtgcttgtgatgatcacttcagattttcataatactagtttctttaagagtggtttctttattttgtttgcttatttatttatttgtttattttacttggtagatgaaaatgaagttgaaaggccagaagaagaaaatgccaggttagtgaaattttctgttgatgcctattacacaggttgtgtgaaacaatggttctgtcagttgtcaaaattattttcttacaatcattggcttcattacaacactgacttacaacattttggaggacattgaatcctttaaggattattccagtttcaggacctaatcttacgccaattctatttgttggtagtttaaaggacaaagtttttgaacttaggattggactgattttacactgttaagtaacttgttactcttaagtgaattcagtagtgaagtatacagtataatcgttaagctactgataaaaataktttaacttaattgaaaatgtttttaagtaaatcaggaacactccaaactactgcttttccagtttattaacatttttgatgatataatggcagtttggttgtaatttcaatgctatgtattgtttgcattcaaaatgtaattagctgatttgttataaggttgatttctttgttagattgtaagaaagatgtaagtgttcatttatagaacatatacagggagtcagaattttaccccagatttcaaaaagcaagccatgtaaagaagtacatggagatgtcggctttaccctgaccacatgcattagtgtctgtaatggagggagaggtagttagaagattttaaggaatatttgggtttaaaaagtggaagatatacaacttcataccgagtaagctgcaatcgaaaagataaaacaggtgttagtgaggatatggggaaataaaaccctcatacacttctggtgggattgtaaaatggtgcagctgctttgaagaacagcctggccattttctcaaatggtgaaacatggagttaccatgtgagtcctccaccttagaggaatgaaaacatattcagacaaaaacttgtacgtgaatattcatagcagcattattcttaatagaaagtggaaaaagaaaacc

SEQ ID NO: 14788 - DNA, 548 bp, Homo sapiens
aaaagtattataattttgtggccaggcgtggtggctcacgcttgtaatcccagcactttgggcagccgaggtgggcagatcacaaggtcaagagattgagaccagcctggccaacatggagaatccccatctctactaaaaatagaaaaattatatgggcatgktggtttgcacctgtagtcccagctactcgggaggctgaggcagaagaatcgcttgaacctggggggcaaaggttgcagtgagccgagactgcgccattgcactccagcctgagcaataacagcaaaactccgtctcaaaaaaagaaaaaaaaagataaattgaagtcacactttattcttctacagttacagaaaaattatgcggtatacatttttcctggaaagtttaaagggcatgaaaattggtcaattttacattgtgcctgctctagaaacaaaaaaattaaaaaaaaaaaaagaaaactggtcaatcttacctttagtttgaattcaagctgtggcatgacggataataataaatgaggatctatagcaaaaagttcc

SEQ ID NO: 14789 - DNA, 575 bp, Homo sapiens
gctcttctctggtctccatcctgccaggctaccctccagagtttagacttgccatcttccacaatcgtgtgagccaattccttaaaataagtctctctctgtcctctcctctgtgacacacacacacacacacacacaccccttattcattgtgtttctctagagtatccttactaatacaatgttcttggacaatgcatgtgaaatactagagaatttaataagcaggctaagctacaatgccaggcactctgtgcttaactccagagtatttaaagtgatagtaaatcttctagttcttgatatttagcattcgttttagaagtcatagaaaaataagcttgaccagggaggaaaatgttacaagtaacttttatacttacttgtgacacaaaacacattaactttttatatttaattctaatgtttatactacttggttgaaaaawactaattttaattatagtatttttgctttgataatcattgaacctttcttttaattgaaatataattctcataccacaaagttcatactttaaagatgtgcagttaagtgatttctaagtatattc

SEQ ID NO: 14790 - DNA, 629 bp, Homo sapiens
agatgcatatgaaatgatcattatttctgggatttccacagaaatactccagaagaaataatgacagaaagaaagaaaggaagataaaaagaaagagaaagaaaaagaaaagaaaagtgaggggaataagaataagtgtaaaaatataggcaaaattttattaattgttgaaacttagggttcattatattatttcttctacttgtgtgtgttgagaagttttattataaaaagttttaaaatgagggagcataaaataggtaagagaaaaattgaaagtctagaagaatacaatgaaaagtgatattaataaaattacaaaaaaattaaatggaaatttttctaataatataataaattgccagaattgactcaagaataaatagaaaacctaataaacagaacctataaccrtaaaaaaatcatgaaattggttgtcaaaaatctcctctgacactccaaaaaggtcaccaggctcatagtttaatgggctacttgtagcaaaccttcaaaagaaaaagtatagataatacagttaatccttgaagaacatgagtttgaactcatgttcacttgtatgtgacttttcttccacctctgccactcctgagacagcaagaccagcctct

SEQ ID NO: 14791 - DNA, 538 bp, Homo sapiens
caatgtgtctgttttyatgctacttccatgcttttttgactactatggtttggcaaggtattttgaaatcagatagtgtggtatctccaggtttgttcttctttcctacttggggttgttcatgaacttataaacagtctcctagggtatataatacagtttgtcatcctagttttacagtgtctataacatgatatttcctcaaaaattataagcatctaagtattaacaatttactgtctactacaaatttagcattttgatgaaaaattatgtttgattatgtaatttatgacaattcaccactgtgcaggttttgtccatttttcttttaaaatttttctacagcaagtatatcaacttaaaagattttatataacacaaaggaataaaatttcaagaaaatgttttgttttgttttttttactgaaccaaaaatttaattccagctttcaaagtgagacgttttgtatatttaagttcaggaggaatcatttttgacttgtgatatgttgtcagtggagtgaaaaataaaaac

SEQ ID NO: 14792 - DNA, 538 bp, Homo sapiens
caatgtgtctgtttttatgctacttccatgcttttttgactactatggtttggcaaggtattttgaaatcagatagtgtggtatctccaggtttgttcttctttcctacttggggttgttcatgaacttataaacagtctcctagggtatataatacagtttgtcatcctagttttacagtgtctataacatgatatttcctcaaaaattataagcatctaagtattaacaatttactrtctactacaaatttagcattttgatgaaaaattatgtttgattatgtaatttatgacaattcaccactgtgcaggttttgtccatttttcttttaaaatttttctacagcaagtatatcaacttaaaagattttatataacacaaaggaataaaatttcaagaaaatgttttgttttgttttttttactgaaccaaaaatttaattccagctttcaaagtgagacgttttgtatatttaagttcaggaggaatcatttttgacttgtgatatgttgtcagtggagtgaaaaataaaaac

SEQ ID NO: 14793 - DNA, 1681 bp, Homo sapiens
ctgaattttaaaatcccagcgttgtttaaattttgtctccttgtaaaaaaaaagatacaatgaaaagaaaaatagaaaactatcctgcagtgtgaaaaaagaatgaaatgaaccaaaataattcctaacattgttaatatccgatctcagtttgattctcaaaccaaacatcacactttttcttgtttttcaaaataatcttcttatttatttatttaccacctgtttattgaattcttactctggtaacgtgcaaacttcacataaactagttatcccttgttttatggacctactattccaatgaaaggaaacatacaaaaatctggtaaagaaatgtagaaacaagattattgcacatttcaataataaataaggaaattaaatatgaagatacattatgacaacttgggagaatattttcacatggtatgttatgggaaggtcttttttaattttagcagtttctttttagttttaatttctttttcttcaacttttattttaagatgggaagcccttcttgagaaggtgacatctgtattgagacctaaaggatctgaaagaaccagatgtttaatgaatcataggaagaacattcaaggattctagtggagaatgtatatgctgaaaatactggtatgaggtagaaaataagttaaagcatttagtttttgagggggtagggggtcttaatggaggacagtgtgaatagattataataaggaagaattaggtcacagtgattatttgaattttatttatttcttaattttttttagttgctgttcataagtttattgtctttatctgaaaaatcctcatagaaaattgtttggtttagctttcagcatcctgctcctgagctctgaggaagcttgccttctttcgagctacccaatctttcttctgagcaagggacattctgggatggttctgcctcttcttcataacttctgtcttgggcttcttttcataaactggattttctcctatagcagcatgagctttcttatacgtctcctccatcatgtctggagttatgctgttctttatatattgagagaactgtttcttgtaagcatcttcatcttcttccattaagtagcgctagcaactaagctgcaacattctggcccatgatgtccttccggtgtacttctgcattaaatcccttgctttcagaatcataatcagggaattgtttggtactgtgagggatagacaagcctccaaccgcagcttccttcagggtgccaaaaactttattgccagtggtagttctggcaaggcctgcacccaaatagcaggtaaaggcacctggctgaccatcaatgctttccacattgtattcatcactagtcgcctccacttggccttcatagatcttgtccatgccaaacctattgagaagcctgcaggccagcagcaggcaagtacaataggctgcagcataatttgtcaggccaaccttcacaccatattttggcagttcgtgtgcatgtgccgcgcggactatcacattcccctctatacagccataagcaatctgacaaatgatatatctgtttattacatgaactatcatccagtawttgggtgtgttgtatttatttttatcctgtatcaccaagcgtttccgagcatagtaatcagttttaccctctcgtcgtcttctaaa

SEQ ID NO: 14794 - DNA, 549 bp, Homo sapiens
tgaaagatgaaggctaattctcttcctcttgagtccagaatggctctggcacctgttttgacctgtagaatgtggtagaagtctctgccagtcttctgaggctggggcctcaagagagctgcagcttccatttttactgcttgggacatgccctcttggaagccagcatccatgcaagatgtgtgattagcctgagattagtatgctgtgaggaagcccaagctagctgtgtggagagagtgagagagaaactggccaccagggaacactgaggtgtcaggcaggtacatgaagccttgttggaacttctagcccagttgggccaccagccaatgctgcakggagcaggactattcagcctatccttgtctgaatttctgtcccacagaattgtgggcaagtaaaatagttattttctaagcttctgtgttttggggtagtttgttacacagcactaggtaatcaaaagaattggctcgtaccacccaccatttcccctgaaggaaagtttactttggaaaccaaatcgactaatgaatcagagaatca

SEQ ID NO: 14795 - DNA, 707 bp, Homo sapiens
tttttaaagttcttttcctacttgtgataccatccatttttaaccactacatcttacacccattgtcctttctctctattaacatagcactcyagctctgtgttcctccatacttaagatctccctggagagacacaaagggagtccattatcccttttttttttctggtcacattttggcagagaagtgttctccacttgcatggtcctggcagtgcccctttaattttcacatagctggaggaggcacacataagccatagacgaacaatacagtcctgaccctaacctcattatgcaccgcacttgaagctgcattagcaaaaacagatggtctggctgcaaagccacagatgccaatcagatacactgtcggcaagcacgttctctaatcaggcccctttcaaatggcatctgcttctccctccctgtaggtatacataatgatttgaaaccttctgtacatttcctgttgcacttgggctctaacaacctgttcacagaacagagttgccagtctaagatgggccagctcacccgggctgagacagagaggcaaacagcagggcttcagcccagagtcttgtgaggggcgcaggaatatttggcctcttcctgtgtggaaggagctggagtctgagaggagatagagtgaaacaaaaatgggcagtgtcaataatttacgtaatatagttgctgtctcggca

SEQ ID NO: 14796 - DNA, 547 bp, Homo sapiens
tgctataaaaattgaaattttttggtaagcaaaaattgtagtaaaaaggtataatatgtaggcttactgcaagatgtcaaaaagtttctttttttttttttaacctaaaactcttggacccttaaagcatgtacattgttttgtcagcccagaacctttcctggcttgtcctatatagatcctgccacctcccgccagatgttccaagaacatctgtctacaagcctcccaacggcaagaagcacatttactcatttcgaatccccaacgcccagaactgcaactggcacatgacatttcaaacatgtgtgatgaaaaatgaaccagaggaacctctgctttactggaagtaatgyatacatccgtagaggcaagctgaccatcagctggtacccagccttccacccttcaccaactccagcccctagacctcttgatcatgcagcaactgaaaagggactcccagcactctcatacactctcctccagcattccagcagacttgagtcatcctcacagctaccagccaatatatgattctaatatc

SEQ ID NO: 14797 - DNA, 474 bp, Homo sapiens
caaaacatgagattagcagtccagggaagaagggaggtaagttcagactaggcaaggctgagttgaagtctgggggacaggtaaggggctatgtccagtcaagaaatgaatatatggctataaaactagaaagtaactttttcttggaygtgaatacagatatggaagtcatcagcatacaggtgatcgctaaaaccagatagtaacacccaaagagagaaccaaaaaggaagatcaaagccaataatggaaccctgggaacataaatttctaaagagcaagcaacactggaaggcggtacataatgttgcagggcacacctgccttctctggcagcccagcttccgactctcacgtgtggggggcttcccagttaggaaaaacaaagggagtcagtctctcccctcctaccctggcaggaggaccacaatcaggtgagttaggtctggctaatcaaacactcccgtccagggg

SEQ ID NO: 14798 - DNA, 516 bp, Homo sapiens
ccttgttccaccaatgggcagtcaaagccagatgtgccttaagacttgcctgagatcrctcggcaggtgagagagggtaagaaatttccccaccccacggattcagccagaggtgtgccgcccacggggtccaggctctgcagcccctcctcctcctacccagctccgagactgctggggtctccacacagcagcccacccaaggctggcgggtgagggccaagggctctgtctggtgaagaataaactctgaggaagttttagggcagaagagaacaactggaccattccggaggaagttgtaaggggggtagatactacacatgtgcctcagttcctccacctgtctctctgcatccatgattttccatcccttggagggccatggctggggaaggacagtgggaccatcctcagggccctccggaagtggtctgcctgctggcgtcgacaagcaccagtttgggggacatgtcaccctcctgtcctcagtcacaatcaacttctcactggacc

SEQ ID NO: 14799 - DNA, 554 bp, Homo sapiens
taaaaatcctgaaatacactgtgatatacacctataacagttattaatggtttctttatgatagtgctttataattttcaaagttttttcacttattttatatgaattttcttatttctttacctcctcttatcaaactttaagggccatcaatagctaatggttgcagtagtttaacaaaagggaaagtgtattttgagataaaacgttgaaacagtgttgcagtagaactctaccacctatttctgatgtcatgccaacatcgggaaatcatgttagtaaatatggtaaaatgcagagcagtgtggttcattgacttaatktcttgtactgaaatatgaggttatgttatttcagcagtatttttttggcctttcctttaagattagcccatttaatagcaaacatgaaaatggggctgggcatggtggttcacgcctgtaatcccagcactttgggaggctgaggcaggatgatcgctttagcaaaggagttccagaccagcctggagaacacagtgaaacctcatctctacaaaaaatacaaaagtttgc

SEQ ID NO: 14800 - DNA, 538 bp, Homo sapiens
tggtgaaatggctagacaaacggtcacagttggtcattgacaagataataaaaacgtagatctggggcaacaaaaattcaaggaagaagaaaacatgccattcatagtgatcaagtctgttcagaggagattacctgtgataggaagaaaaatggttcccaaagatgtcaacagcctaatccccagaaactgtgtgcatgttgctttacatgacaaaagggactttgcagatgtgattaaggttaaggatggtgagaatggaatattgtcctggattatcaaggtggacccaatgtaatcacacagctctttaaaagcagagagcctttccaagcaatggtcagagcgggagatgtgactaaggaaaaatggtcagagggatgcaatgttgctgaatttaagataaagggaagggaacaaggactgtctatggttggccattaggaacttggaaatacaaggaaacagattctttcctagagcttctcagaaagaaacacagttgtgctggcacattaacttcagccsaatgggacct

SEQ ID NO: 14801 - DNA, 557 bp, Homo sapiens
cctttcctctctaatagtaacatcaactttccttttgtgtgtgtggatgtgtgtggatgmccacaatatgttgggcaccttatcaggctggatcagtgagaatgaagagtctccagaagcttgtttcagtttacacttaactagcagagtatactatcatgggtagatacgggatatcctctgcccatttactctttactactgaacaccctgttcttcaaataaaacttccaagataaataattctcttaaggagatgctagtgagcaaaacatactggagaattaaagacaagaacctaatactcttggtttacttctttaagcattaacttagtcactgacataatctcatggtgctaactttcagaatcttattaccactgtttacagaggccttctgttattttacatgggcatggagctgacgaatggaggtagaatacattttacatagttgctgctaatatttatctaaagaaatgaacatctcttttatgatacagtagtgtgcatttctattcttgtttcttattccccaaattgtcctaagattgc

SEQ ID NO: 14802 - DNA, 599 bp, Homo sapiens
ctgaggtgaaagaatcacttgaacccgggaggcagagtttgcagtgagctgagatagtgccgctgcactccagcctggctgacagaatgagaccctgtctcaaaataataacaataattggagttgtggcatttcataaaatttttattttgtagttatcatctaccccggcaatgtttgcaytttgccaaacaaatgaaaatgttattcccttgcaaaagtgcctggaggataaagttattaatttgcctaataccctgtctccatgggagagcaagctgacacgaagttttctagaaactactctgttttgaccattttccctctctattcctttagaaacacagtcaagtgtcattgctggctagatattaaagattttctgttaatttcagctcacaagttctgagacaggttaaaagaggaagaaaatttttctcttgtatttgaaaaaaaatccttcttaaagttatgaaactttaagttatgaaactaaaggttcaaactttagttatgaaactaaaagggaagaacaaagtagaccattcagaatacattaactttcatccaaaggtttcagtgtgtttggcagatagcac

SEQ ID NO: 14803 - DNA, 599 bp, Homo sapiens
ctgaggtgaaagaatcacttgaacccgggaggcagagtttgcagtgagctgagatagtgccgctgcactccagcctggctgacagaatgagaccctgtctcaaaataataacaataattggagttgtggcatttcataaaatttttattttgtagttatcatctaccccggcaatgtttgcattttgccaaacaaatgaaaatgttattcccttgcaaaagtgcctggaggataaagttattaatttgcctaataccctgtctccatgggagagcaagctgacacgaagttttctagaaactactctgttttgaccattttccctctctattcctttagaaacacagtcaagtgtcattgctggctagatattaaagattttctgttaatttcagctcacaagttctgagacaggttaaaagaggaagaaaatttttctcttgtatttgaaaaaaaatccttcttaaagttatgaaactttaagttatgaaactaaagkttcaaactttagttatgaaactaaaagggaagaacaaagtagaccattcagaatacattaactttcatccaaaggtttcagtgtgtttggcagatagcac

SEQ ID NO: 14804 - DNA, 320 bp, Homo sapiens
actaaaagtaaataatttacaaaatatactttgatccaagaatataggattataagtggccatgcaagttgcaatagctgtaggcaaattttaaaattgaaatttgcaagtttaatttatttgccagttaaggaaatagcatattaattctactggaagcaacccaataaaaaggtgacttatcagttgctgaataaaactgctttattttattctcatagagaactttacatattttattcacgtgtacagtatacttactctttcaaggcacagtctaaccaaacttcctctstgtctctctctctctctctctctct

SEQ ID NO: 14805 - DNA, 320 bp, Homo sapiens
actaaaagtaaataatttacaaaatatactttgatccaagaatataggattataagtggccatgcaagttgcaatagctgtaggcaaattttaaaattgaaatttgcaagtttaatttatttgccagttaaggaaatagcatattaattctactggaagcaacccaataaaaaggtgacttatcagttgctgaataaaactgctttattttattctcatagagaactttacatattttattcacgtgtacagtatacttactctttcaaggcacagtctaaccaaacttcctctctstctctctctctctctctctctct

SEQ ID NO: 14806 - DNA, 552 bp, Homo sapiens
agaccaggcacggtggctcatgcctgtaatcccagcactctgggaggcccaggcaggtggatcacctgaggtcaggagctcaagaccaggctggccatgatggtgaaaccctgtctctaaaaaaaatacaaacattagccaggcatgatggcgcatgcctgtaatcccagctactcgggaagctgaagcaggagaattgattgaacctgggaggcggaggttgcagtgagccragattctgccactgcactccagcctgggcgacacagtgagactccatctcaaaattaattaattaattaattaaaacaaaattaactgtctaaaactcaaccattttactagttaaaaaaataatttgccattcaaaataacatataaactgtgaaattctaatacctcagaaatgtacaggtcagcttgttttaataactctccaataattagaacatttgaagtagtaccatctcctgtgacgtcatcctgagctgttgctacttttgctatcaaggaagctgttggatgttgaatttgctggaaaaagcaagcaac

SEQ ID NO: 14807 - DNA, 404 bp, Homo sapiens
gtaarggaaagcaccactcttgtatttcagctctatttttaaattataaatcatagctggaaaactaaaatatggcaacaacaacaggatggtgaaaaaaacatgaatgcagacagttttttttttaagcgacctttaattttaaaagcactaaatccatctgcaataactcttctaaattgttttgtgagtttgccctatagccttcggactttctgttttggctttcacattgtctaaacaaactcttgaaaaagaatggtttttgtagaaatttccctagaaaatgaagaaagagaagctccaacacagcagaaaattgtgctgaaagaggaattctagttgggtggatgagggtgggtgcagggcgaggacacacaaattcatggccattaggtaagaaa

SEQ ID NO: 14808 - DNA, 404 bp, Homo sapiens
gtaagggaaagcaccactcttgtatttcagctctatttttaaattataaatcatagctggaaaactaaaatatggcaacaacaacaggatggtgaaaaaaacatgaatgcagacagttttttttttaagcgacctttaattttaaaagcactaaatccatctgcaataactcttctaaattgttttgtgagtttgccctatagccttcggactttctgttttggctttcacattgtctaaacaaactcttgaaaaagaatgrtttttgtagaaatttccctagaaaatgaagaaagagaagctccaacacagcagaaaattgtgctgaaagaggaattctagttgggtggatgagggtgggtgcagggcgaggacacacaaattcatggccattaggtaagaaa

SEQ ID NO: 14809 - DNA, 528 bp, Homo sapiens
tcttccacaatgtggcccccttcaygtctatccataaagagctccatgtggccacagccctgattctgcatgagctgcaatatctgtcctgacactacctcctctgcaggtggcacctgcccaccttcagtgtcctgtctttcttcctttactttttttttttttttttttgagatggcttcttgctctgttgcccaggctggagggcagtggcacaatcttggctcactgcaacctctccacctcccaggttcaaacaattctccggcctcagcctcctgagtagatggcattacaggcacataccaccacggctggctaattattttgtatttttagtagagacagggttttcccatgtttgccaggctggtcttgaactcctgacctcaagtgatccgcctgccttggcctcccaaagtgctgggattacaggcatgaaccactgtgcctggctacttcctttacttcttagtcatgttcttcctcaagtatcatctcctttctgccacaccaacaccagccatg

SEQ ID NO: 14810 - DNA, 602 bp, Homo sapiens
taaataaaatgaaagtcttattctcctagtggattgtaactatgttaaaggcaagaatgatattttatttctttgactcctaaagctgctaacacagcttcttatacttagtggttgtctaatatttgattgctgaatgaacaaatgaaatatttttagagaaaacatttaaagtagcaatgatatgagtttggtgaaggctgacaccagagagtgccaaagaattttatctgattagttgtgatctgttaaattcctatccactgatggacccatcaagctaytgatgtatatcaatcctttgaacaaatgctccttgagcaactcctagggcaagatgctgtgcaagcttctttagcaaggaactttgctgatcctgagtccacggagtctttcctgctcaggtttctgggcagagtgaaggaggttgtattagtgtggagtgggctctgatcttggttctgatccttgctaactatgtgatatagtttggctgtgtccccacccaaatctcattttgaattgtagctcctctagttcccatgtgtcatgggagggacccagtgggaggtaattgaatcatgggggcaggtctttcctgt

SEQ ID NO: 14811 - DNA, 570 bp, Homo sapiens
aattttagaactgttagattcaacagcaaaaaattgctatatacatctctgaccaattgctttcagtttctgtgcttatctctctacgacctttgtaacacacagtgaaccagcgctggcccatggatacactctagtagccccaatctagctaaggcagccccttatagttaatcaatcctgtcaaacaggaaaggctggcaaaaccactggtctgcatgtactttgtcctttacacaaggaaggatgcaaacgtggaaaactgagtggacatggtgttcaggagattgaggctcagctaaattccagcttatttacctgcagttgcttacaaagtgtttggacataattgtgtaaagctagggttttttttctggtttttaaaacaggtaraggatgtcacagcaccacttaataacatttcttctgaagtccagattttaacatctgatgccaataaattaactgctgagaacatcactagtgctacgcgagtggttggacagatattcaacacttccagaaatgcttcacctgaggtaaaactcacagagctttaaaaaaaaattt

SEQ ID NO: 14812 - DNA, 538 bp, Homo sapiens
ctcactctagcctttttgtatttactgctagcgtggcaaagacttttacttttaccttgtgtctctctatttaatggtatctcttgaaggaggcatagtagaatctttctttgtaaccattcatcaatctctgttttattggagtgcatagatttagaatgtccagtatattagcttattaactaaatgtggctatttaaatttaaggtaatacagttaaacaaaattaaaaagtaatccctcagtctcactggaaataagatatatttcaagtactcatcagctatttagattttaacaactttaatagatataattataaaatgttcaacagtcacatttgtatttttaaaaacttaaagcaaaaggtaaagttttatatttattcagttatcatttgttttacattttcaaaaattcatgtcattcatgaagatctttmtcttttaattttcctttagcctaaaaatattttagcattttctttaaattcatctgtaagtgataaattattttagatttccttcacctgaaaatt

SEQ ID NO: 14813 - DNA, 628 bp, Homo sapiens
cacacttttaaattaaaattgacaaattaaatcttaaataactatgaaaatgcagactaatgacaacttgaataacaagaacaaagccataggactcttatctctgttttgaaatttactacaaaactacagtatacaaatcaagatattgtggtagtggtactggaatacatataaacatacagatcaatggaatataattgagtccagaagtaagccattatgtttatggtcaattgataattgacatgcatgccagggctactcagtaggggaaagaatagtgttttcaactaatggttctggagaaaatcagtatcaacatggaaaagcatagtataggatccctaccttatatcatatacaaaaattaactcaaaatggattctagacctaaatataacaactacaattactacactcttggaagaaaacataagagtaaatattcatgaccttggatttgtcagtggtctttgatataaaagcaaaagcacasaaaccaaaagaaaagttaactaaattattttcaggaatattaaaaagaagactttggaatgtcataataagtgagatgaacaattatctacaattcttcagaaatacactataaaatatcttgaaagac

SEQ ID NO: 14814 - DNA, 628 bp, Homo sapiens
cacacttttaaattaaaattgacaaattaaatcttaaataactatgaaaatgcagactaatgacaacttgaataacaagaacaaagccataggactcttatctctgttttgaaatttactacaaaactacagtatacaaatcaagatattgtggtagtggtactggaatacatataaacatacagatcaatggaatataattgagtccagaagtaagccattatgtttatggtcaattgataattgacatgcatgccagggctactcagtaggggaaagaatagtgttttcaactaatggttctggagaaaatcagtatcaacatggaaaagcatagtataggatccctaccttatatcatatacaaaaattaactcaaaatggattctagacctaaatataacaactacaattactacactcttggaagaaaacataagagtaaatattcatgaccttggatttgtcagtggtctttgatataaaagcaaaagcacagaaaccaaaagaaaagttaactaaattattttcaggaatattaaaaagaagactttggaatgtcataataagtgagatgaacaattatctacaattcttcasaaatacactataaaatatcttgaaagac

SEQ ID NO: 14815 - DNA, 949 bp, Homo sapiens
tgtgaagagtcaaaagtttactgtgtcctctaagaccctggcgaaaaataaatgtgaaggctgttgaggggcgggaggagcaccaggtaagcccatttctaatccctgaggccgtgcgcagcgggacgcttctcctccccaacagcagagggcgatgtggccggcggcgaccccgcccgaccacggagacggcgctctgtctgccgggctctttctcctccacgtggggacgcaggatggcggcagcagtgscggtgggtgtgcgtggatgggggcggggggcgtcgccgcggggcgctagggcccgggtccctgaggcctgagagaggcgaagtggggcccttctgggcgggcgaccagactgactcccgccccacttgctcgcgcaggacgaggcggtggcgcgcgatgtgcagcggttgctagtgcagttccaggatgagggcgggcagctgctgggttccccgttcgacgtgcccgtggacatcaccccggacaggctgcagctcgtgtgcaacgcgctactggcccaggtaagtggctggccagggcggcctcgcatctccacccccgggcggatgcggtgggggaatcatattaccgagggtctgcggttcatggtcccccgctaacggactgtggtgacccacctggcgtgagctcccacctatgtcagagatggaatcagtggcatagcgctttacacgccaaccaaaggggtccacctgcggagaggggcctagctttgaacgcaccggatgctgtatttcattgattctttgtcacagtcccccagtctgggacacgttaatatccccattttacagcgtggcccggagggactcagtattttgcacgatgctatgtagtaggtagcagatttggaattggaacccaaaactatccgaatacccatgcttttatttatttatttatttacctttttttt

SEQ ID NO: 14816 - DNA, 536 bp, Homo sapiens
ttctccctgaacccatgtccatgtggacaaactttgttgtgggtcaccaataaaaccagctcaggttctccttccatcttgcgtttttgtcctgagagcttcactttggtccacggggagtgctttctctggttttctgcctactgaggggcacagattgtctggtctgtgttaggaggtgcccaactgtacggttggggacctgagacacaaagtgcacaagaattatactcctactgatggtcaacagctctcatggggtcttctaagtctaaataccctmctcatctaggagaaactgcttcttatttgtacaacactagctcatgcacctaccttcctaccttcctaatggcataactccaaggatgatctgggcctttactggctattttggggtacatttgacttgaacaaaattgttcatttgacatgcaccttagaaaagtaggaataagatttctcaggatgaatggggctgccgttttttgttggtaggcagaggcctccaaatgaaattctgatcaaaaattgct

SEQ ID NO: 14817 - DNA, 1994 bp, Homo sapiens
ttcagctcactgcaacctccacttcttgggctcaagccatcctcccaccgcagcctcccacgtcgctgggtctacaggtgtgagccaccaggcttggctaattttcatattttttggagagaatgggtttcaccatgttggccaggctggtctcgaactcctggaatgaagcaatccgcccacctcagcctcccaaaatactgtgataacaggcaagagccactgtgcctgccctgaaatgatagactctacatccctttcctatttgcttttaaggctggtccaactgtgatgacatgggaaccatttaatgtgcttcccctcatagcttatcaaattgctcccttgaaacactactgtatcctgcatccatttctaatgcagccatccattcatttattctgggttattttcactaattcatttagggttatttttgttcattccatcattcaacagatatttattaggcacctgctgtgtgccaggcactkttttacagctgttctttacctctctatttgaatttctcttttcagtttaatttcctccaaattccttccttgatagttttcaatggttatttgcccccatctcctacacctctctttttgaggggtgtatccaatgtagatttatgttatccaccgattttccagaaaggcaaataacctgggccagaggggtttctcccatgtaactcactgtccacctgggacttccactaaaactgccttttttttttttttggagatgaggtctcattctgttttccaggctggagtacagtggccagatcacagctcactgcagccttgactccaggggctcaagcgagtctaccatgttagtcccccaagtagctgggactactggcgtgagccatcatctcacccatctaaaactgtctttaacataaagcagattataaggggttagtaggataagaaaggaaaatagaaacccaatacttactgcaaatactatgcaaatcatatataatttctcaggttggtttaaaaatcatatttaaatagatacaggtgatacagtgtggctctgtgtcccaacccaaatctcgtctcaaattgtaatccccataatccccatgtgttgagggcaggacctggtgggaggtgattggatcacgggagcgattccctccattctgttctcgtgatagtgagtgaattcttgtgagatctgatggttttataagcatctgacatttcccctgcttgcacttctctctcctgccaccatgtgaaaaagacctctcttttccctttgtcttctgccacgattgtgagtttcctgaggcctccccagccatgtggaactgtgagtcaattaaacctctttcctttataaattacccagtctcaggtagttctttatagcagtgtgagaacagactaatacaatagggttgccttttggattgctgaacatattttggagctagatagaggtgctagttgtacaacactgtaaatgtactaaatgccattggattgttcattttaaaatgattaattttatgttatgtaaacttcaccttaatacaaataatttttaaatcatatttcacaccagtcatggtggcttgtatctgtaatcctagctactcaggaggaggattgcttgaggccaggagttggagaccagcctgggcaacatagtgagaatccgtttcttaaaaaattgttttaagaaaaatcatatttcactatttttgtccatgttgataacattgtgaacctccccatcctcactgcagtaagctggggatagtccacatacaagctcagtacattaagcataatgccattattaactcaagcttctcaaaatgtgaagtttaagtttagtaggacagcattaagccaaagaggctgtaaacactggcaagatacaaccactctgttctgatgaataggccatttgctccacatgactgaatgctggaacaaatatgacctccacctgtgggc

SEQ ID NO: 14818 - DNA, 603 bp, Homo sapiens
tgcctacctgccctagatggtgatgttagagaaaaacttttatcttgttggagccactgtactttaggatgttttcatcatagcagtttagctttttactgaaattttttgagagstcagttatattacaatatagtggcaatttggagcaattcacaggttgtgtgaaaaatgcacagtgtattttctggctcatggcttcttgcaaataattgtttataatcattttaagcctgcaagttaggtttcattagtcctcttatagagatatgaaagtgaaactcaaagtgtttttttagtaaattgcgcacgtcattgaactgacaggtgatcccggattcaaattcaaatccaatttcaacgactctattatttctagcacttcatgttatgagtttatatctctaattggtccaatgccttcagcatcagtactacatcttttattttttatttccacagtgcctagcatgaggcttcacatgtggttgcaactcattaaatatgcatttatttccttagaatgcaggccttaacagtcccactagagaatccacttcctcccataaaattcagcagtaagaatgggcccaaagagactta

SEQ ID NO: 14819 - DNA, 603 bp, Homo sapiens
tgcctacctgccctagatggtgatgttagagaaaaacttttatcttgttggagccactgtactttaggatgttttcatcatagcagtttagctttttactgaaattttttgagaggtcagttatattacaatatagtggcaatttggagcaattcacaggttgtgtgaaaaatgcacagtgtattttctggctcatggcttcttgcaaataattgtttataatcattttaagcctgcaagttaggtttcattagtcctcttatagagatatgaaagtgaaactcaaagtgtttttttagtaaattgcgcacgtcattgaactgacaggtgatcccggattcaaattcaaatccaatttcaacgactctattatttctagcacttcatgttawgagtttatatctctaattggtccaatgccttcagcatcagtactacatcttttattttttatttccacagtgcctagcatgaggcttcacatgtggttgcaactcattaaatatgcatttatttccttagaatgcaggccttaacagtcccactagagaatccacttcctcccataaaattcagcagtaagaatgggcccaaagagactta

SEQ ID NO: 14820 - DNA, 568 bp, Homo sapiens
ataaagagatactacatttattttgaatactgagaaaaatgacattcttcagtaaatgcacatggcaactcatgtatagaaacaagctccttgttcaatggaccttccagtaaccatggcagccacgagtctctgggatcatttcccttagatgctgccatgagaattccagtctgtggaagatggcactaacatggaatgccttcctcctcaacctctcagcaatgtacacatgccaactacagaaaaatgctgaataagttatagtaaatgtaaaataaaartgcatagctgagattgcaataaagaaaaataaaaccacaggtacctaaaatgagtggggatttccatccaaagcttgagtgggtattgagcatgttgaacatgagagtggaacacctctgtggagacatcagaagcaaagattgtcttgagtactagatattcagtgttcctacaaggacagttattttcttgagtttggtgggaagagactagaattaaacctgtttatgtaaggccagaatataaggactaaaaaacatctgttcactgtcttttttttttt

SEQ ID NO: 14821 - DNA, 568 bp, Homo sapiens
ataaagagatactacatttattttgaatactgagaaaaatgacattcttcagtaaatgcacatggcaactcatgtatagaaacaagctccttgttcaatggaccttccagtaaccatggcagccacgagtctctgggatcatttcccttagatgctgccatgagaattccagtctgtggaagatggcactaacatggaatgccttcctcctcaacctctcagcaatgtacacatgccaactacagaaaaatgctgaataagttatagtaaatgtaaaataaaagtgcatagctgagattgcaataaagaaaaataaaaccacaggtacctaaaatgagtggggatttccatccaaagcttgagtgggtattgagcatgttgaacatgagagtggaacacctctgtggagacatcagaarcaaagattgtcttgagtactagatattcagtgttcctacaaggacagttattttcttgagtttggtgggaagagactagaattaaacctgtttatgtaaggccagaatataaggactaaaaaacatctgttcactgtcttttttttttt

SEQ ID NO: 14822 - DNA, 623 bp, Homo sapiens
caactggccagagatgtacaggtctatttctgaactcccaattctatttctttgatctatatgcttgtgattatgccagtaccacagtattttgattagtgtagttttagtcagttttaaagggaaaatgagcttgttcgtcatccattggttgaaaacaagtggataatcaaatcatggtatatccgtacaataggatattattcagctatgggtatagcaccaggtgcaagaaaaagcagctatcagatgtggggttgataacaggtaagttggctgaaagtcagtgcacagagcaggtgcctccccaaactccgtgcagacaagtaactacttttttgcaacagaaaataaggagtttattctctagagaaaccaaaccagaataactctaaattcagggcatgggataggatgaagagcatgggtgaagtgctaaactaaaagcaggaaataaaatgaaagtctgcaaagtgaattcatcayctaagcctctagctcatgacctgctcatagcacctctacaactaaaattttgatgaatgatgagggaaatctagagtgaatgaagtagaagggagagaatacatattattaagtataaaataatatattaatataga

SEQ ID NO: 14823 - DNA, 1114 bp, Homo sapiens
cccacgatattggtagtaatgtcatcctgttttccccctggatattaagaacaataacacaaagaggggtgtacacctcccgcaatattgggagtactattgtcctctccccgctctggatattaccaacaatatcactatcttgactagtggttttgacagatcatcaggccttataagaaacacatctgaaggattggacacaaagtcactctggaggagatatgactggaccttccacaaaagaccactagaaaaataaatcctttccaagtgaatatttatctaaaggccattagaagcaggagctcaaaataattaaaataattcaaaacatggacttcatcagttacctttcccagctttcccagggaatctcatgaactgatgtcatgactatccatgcatgggcttaacaatatgaatttcagttaactgggactcayggggatactggcacttctgagcatccacttttccaaggagaataacccaagattgtaccagacatcaaggatcagactaacagctggtgtcaggtgtttttagcaggcctcatccaacatgagaagagcagcagttgttttcctgtatatgcatttgtctttctttcagttatatgtctgcatgaaatattatttgaggattttccaagtgctttcatcacagttaagaaattcttccataatatggcattgaatcaggcaaattatttacaacaaaaaagtaaggcaaagggtgcagttcatgatcttatcacctgcacaggtgcagccgtctctatagaaaggagaaaacgtattgttagtcaagcaaaactgacacacaaaccctaggtaattgaattgataccctgtcagatgtggtgaaggttctgacacgctaatcatgtatgatgctgtaacttccatcaaggaatatatgtatagtgaaagtgagctgtgtactcatagttaattattatgccaactgaacagctggaaacattggtcgctgtggcacccactgaataaaaggagactcagtggcaggtaggcccctttgcgaatgggagacggcataaacctcacctgggtgttcttttggttcccttagtcaaaatcatgaacaaagt

SEQ ID NO: 14824 - DNA, 535 bp, Homo sapiens
caattgattagtctatttcagaaaatgcagaagctgctttgttttccagcacattatgaacttatggggagcatgggcctgcctttgccttcatttccagtgtacctctagcttggtggcagggtggtgcctttctccccacttgttgatggctcttgatctgttctcctgagtagactagggaggaattcaagctgaacctggttatttatagtgcagaatttaggcttagaagtgtataatatatacacaacttctgtagctgctctctttctctatgagttgattatccttttatacctaycagcctttcctcctctggatctttctccccttcctgttctttttcttcctctccctcctgctctttcttttattgtcttattgtgggaacaggggactatttacaattcacctatgggcttataaaccgacaaatgacctactgctgttgttatttctgagatagatgttttggggaatctggccaaaagatgctaggctggatacttaaactacctaatcatgagtcttc

SEQ ID NO: 14825 - DNA, 558 bp, Homo sapiens
tagactctggggattttcttttgagaagaatgcaacacaaattaatagcttatagaaataaacccagaaaattatgtttgcaaaaatattaattcaataccacattgctgaaatatgtcactactggatatacatgttgaaaatatagtagttatttattttatctaaatggtaaaatttgtgttgtattcctaaaaagatcaaagtagtgagaaagccatgatattattttttattaaaatattaagaaaaatgtattaccaccataatatcagatattataaaktcatgtagtaatgtgttcaattgtaaagttaaatttataaattcaagtcttatataactaaatttacattagaatttctgtgagaattgtatattttcacaatctttcatataatatataatattgtattataattacaatttactgtaatgtaaaatatgttatctttaaacaatatatttccaataatatatgaagagttgaaattaaaaatacttctggtagaatactttatatttcattaaattattttgaaaaggcctggctgcagt

SEQ ID NO: 14826 - DNA, 485 bp, Homo sapiens
agactaggatagtggaaatacatccatagtcacatactgtttgcatttttagtttccaagaacacatttcttcaaatacaaggaataaaatatattttccacttggaacggccagttaaaacttactgtgcttttcccctacactaaatcatataagtttaatcctaccacaagcacacacctctcctccaaaatagagttgctaagacccaactcacctgtaaaaaatgcctctacttatgaaagaaaagataatcgtcacaggaatacacagagctcaacctttgagcaaggtatcactgtatcagaaatccaactacaacatacattagccctgtgatcttggataattcactgcacctctctgcttcactgcaaaatatcagtgacgacattgccctgcagagttgttgtgggtgtagtagaattctgaggctggattgtgtttctcctagggacttaatgtacctggctacatttakgtc

SEQ ID NO: 14827 - DNA, 599 bp, Homo sapiens
agataatagttcagctagaaatggaagtcagaccatttatgtaacagcacatattcaatatttgataacaaaatgcttttaatcaaatagaggctccaactcttaaaacctcagttaaaaaacaaacattaaagaaattcttatggaacttgaggaagtactaattattttatcagattagggtaaaatactttaaaagataaacaaaataaatggaaggaatraattaaaataaaaggagatattaataaacctcacctcagaggttgattatgaagaaaaataatttaatgcatgtaaaatatttagaaaagcatctgaaaaaaatgtaagccttaaatacattgtcataattcttgctatttcaattattattaccactgcaccaatctcactgtgtatgtactataccaatctcattaaatagtaaatgtacaacatccctccctgttacatagtagatattctaaatttgatttctttctcctctcctaaaagaaaattgtaatatttcaagatacacaataaagttagtgtttaaaaataaaataaatcatattacatttaaatttattccttaatatttatactattataat

SEQ ID NO: 14828 - DNA, 533 bp, Homo sapiens
acattaaagaacacatatttcaaaattaaaatcagtcttcaatttcaaagacgtatttttaaagtatatatgatattttaaaaagckaatttttaaatgtttacccattataaaacattgttttgtttctaaaataatcattcactttttttaattaattaatttattattattatactttaagttttagggtacatgtgcacaatgtgcaggttagttacatatgtatacatgtgccatgctggtgtgctgcacccactaactcatcatctagcattaggtatatctcccaatgctatccctccccgctccccccaacccacaacagtccccagagtgtgatgttccccttcctgtgtccatgtgttctcattgttctattcccacctatgagtgagcaatatgcggtgtttgcttttttgttcttgcgatagtttactgagaatgatgatttccaatttcatccatgtccctacaaaggacatgaactcatcattttttatggctgcatagtattccatggtgtatatgtg

SEQ ID NO: 14829 - DNA, 533 bp, Homo sapiens
acattaaagaacacatatttcaaaattaaaatcagtcttcaatttcaaagacgtatttttaaagtatatatgatattttaaaaagcgaatttttaaatgtttaccmattataaaacattgttttgtttctaaaataatcattcactttttttaattaattaatttattattattatactttaagttttagggtacatgtgcacaatgtgcaggttagttacatatgtatacatgtgccatgctggtgtgctgcacccactaactcatcatctagcattaggtatatctcccaatgctatccctccccgctccccccaacccacaacagtccccagagtgtgatgttccccttcctgtgtccatgtgttctcattgttctattcccacctatgagtgagcaatatgcggtgtttgcttttttgttcttgcgatagtttactgagaatgatgatttccaatttcatccatgtccctacaaaggacatgaactcatcattttttatggctgcatagtattccatggtgtatatgtg

SEQ ID NO: 14830 - DNA, 533 bp, Homo sapiens
acattaaagaacacatatttcaaaattaaaatcagtcttcaatttcaaagacgtatttttaaagtatatatgatattttaaaaagcgaatttttaaatgtttacccattataaaacattgttttgtttctaaaataatcattcactttttttaattaattaatttattattattatactttaagttttagggtacatgtgcacaatgtgcaggttagttacatatgtatacatgtgccatgctggtgtgctgcacccactaactcatcatctagcattaggtatatctcccaatgctatccctccccgctccccccaacccacaacagtccccagagtgtgatgttccccttcctgtgtccatgtgttctcattgttctattcccacctatgagtgagcaatatgcggtgtttgsttttttgttcttgcgatagtttactgagaatgatgatttccaatttcatccatgtccctacaaaggacatgaactcatcattttttatggctgcatagtattccatggtgtatatgtg

SEQ ID NO: 14831 - DNA, 533 bp, Homo sapiens
acattaaagaacacatatttcaaaattaaaatcagtcttcaatttcaaagacgtatttttaaagtatatatgatattttaaaaagcgaatttttaaatgtttacccattataaaacattgttttgtttctaaaataatcattcactttttttaattaattaatttattattattatactttaagttttagggtacatgtgcacaatgtgcaggttagttacatatgtatacatgtgccatgctggtgtgctgcacccactaactcatcatctagcattaggtatatctcccaatgctatccctccccgctccccccaacccacaacagtccccagagtgtgatgttccccttcctgtgtccatgtgttctcattgttctattcccacctatgagtgagcaatatgcggtgtttgcttttttgttcttgcsatagtttactgagaatgatgatttccaatttcatccatgtccctacaaaggacatgaactcatcattttttatggctgcatagtattccatggtgtatatgtg

SEQ ID NO: 14832 - DNA, 536 bp, Homo sapiens
tccagggttccaagaccatttccccatcccaggctctagctttgattggctagagtatgatggaggtagaggagggcttgggcatgagagtccagctggctgggaagtgaggcggtaaaccaagtgagatacactgggagccggggagggaggggcatagggagacactaaaggctattttctcatatatatwtttttaagttaaattggattgctgcgtcaaagaatatgatgattaaaactttttttctactataatcagattgctctccaaaaaggctgttgataatcagatgttcaccaagaatgcttgatagtgtacatttcctcgtgcccttgctagctctgggtattatctgtactttaacatttttgacaatctgatggatgaaaaattagacctgctttatgttgcatttccatgattagtgaggttgaggatcttttcatatgcttattggtcattagtattcccttgtctgtgaattgtgtgttcatattcttcacatttcttaacttttaggcactttctccgt

SEQ ID NO: 14833 - DNA, 536 bp, Homo sapiens
tccagggttccaagaccatttccccatcccaggctctagctttgattggctagagtatgatggaggtagaggagggcttgggcatgagagtccagctggctgggaagtgaggcggtaaaccaagtgagatacactgggagccggggagggaggggcatagggagacactaaaggctattttctcatatatatttttttaagttaaattggattgctgcgtcaaagaatatgatgattaaaactttttttctactataatcagattgctctccaaaaaggctgttgataatcagatgttcaccaagaatgcttgatagtgtacatttcctcgtgcccttgctagctctgggtattatctgtactttaacatttttgmcaatctgatggatgaaaaattagacctgctttatgttgcatttccatgattagtgaggttgaggatcttttcatatgcttattggtcattagtattcccttgtctgtgaattgtgtgttcatattcttcacatttcttaacttttaggcactttctccgt

SEQ ID NO: 14834 - DNA, 536 bp, Homo sapiens
tccagggttccaagaccatttccccatcccaggctctagctttgattggctagagtatgatggaggtagaggagggcttgggcatgagagtccagctggctgggaagtgaggcggtaaaccaagtgagatacactgggagccggggagggaggggcatagggagacactaaaggctattttctcatatatatttttttaagttaaattggattgctgcgtcaaagaatatgatgattaaaactttttttctactataatcagattgctctccaaaaaggctgttgataatcagatgttcaccaagaatgcttgatagtgtacatttcctcgtgcccttgctagctctgggtattatctgtactttaacatttttgacaatctgatggatgaaaaattagacctgctttatgttgcatttccatgattagtgargttgaggatcttttcatatgcttattggtcattagtattcccttgtctgtgaattgtgtgttcatattcttcacatttcttaacttttaggcactttctccgt

SEQ ID NO: 14835 - DNA, 541 bp, Homo sapiens
gaggccaaggcagggatatcacttgaggccaggagttagagaccagcctggccaacatggcaaaaccccrtctgtactaaaaatagaaaaattagccaggcatggtggtgcatgcctgtaatcccagctactccccggaggccggagacacaagaattgcttaaacccaggaggctgaggttgcagtgagccgagatcgtgccactcccctccagcctgggcgacagagcgagactctcaaaaaaaaaaaaaaaaagataagaccaatccttatgtaaaatgaaaaaaagataatctgtaaaagtacttcttgtgcggtgtctgaaccaaccttggaatgtccttagtgggaaagagtaagagagattacaaaagactgtaaggaatctgtgtgagcaggtggcaaaggtgagatgatcttctgctagtctccttattcatctgactttccatgtattaactgctaaatggggataatgatgactgactcctacttcatagaaatgctgagattaagtaaatagtatctacaaagtacttt

SEQ ID NO: 14836 - DNA, 541 bp, Homo sapiens
gaggccaaggcagggatatcacttgaggccaggagttagagaccagcctggccaacatggcaaaaccccatctgtactaaaaatagaaaaattagccaggcatggtggtgcatgcctgtaatcccagctactccccggaggccggagacacaagaattgcttaaacccaggaggctgaggttgcagtgagcygagatcgtgccactcccctccagcctgggcgacagagcgagactctcaaaaaaaaaaaaaaaaagataagaccaatccttatgtaaaatgaaaaaaagataatctgtaaaagtacttcttgtgcggtgtctgaaccaaccttggaatgtccttagtgggaaagagtaagagagattacaaaagactgtaaggaatctgtgtgagcaggtggcaaaggtgagatgatcttctgctagtctccttattcatctgactttccatgtattaactgctaaatggggataatgatgactgactcctacttcatagaaatgctgagattaagtaaatagtatctacaaagtacttt

SEQ ID NO: 14837 - DNA, 541 bp, Homo sapiens
gaggccaaggcagggatatcacttgaggccaggagttagagaccagcctggccaacatggcaaaaccccatctgtactaaaaatagaaaaattagccaggcatggtggtgcatgcctgtaatcccagctactccccggaggccggagacacaagaattgcttaaacccaggaggctgaggttgcagtgagccgagatcgtgccactcccctccagcctgggcgacagagcgagactctcaaaaaaaaaaaaaaaaagataagaccaatccttatgtaaaatgaaaaaaagawaatctgtaaaagtacttcttgtgcggtgtctgaaccaaccttggaatgtccttagtgggaaagagtaagagagattacaaaagactgtaaggaatctgtgtgagcaggtggcaaaggtgagatgatcttctgctagtctccttattcatctgactttccatgtattaactgctaaatggggataatgatgactgactcctacttcatagaaatgctgagattaagtaaatagtatctacaaagtacttt

SEQ ID NO: 14838 - DNA, 541 bp, Homo sapiens
gaggccaaggcagggatatcacttgaggccaggagttagagaccagcctggccaacatggcaaaaccccatctgtactaaaaatagaaaaattagccaggcatggtggtgcatgcctgtaatcccagctactccccggaggccggagacacaagaattgcttaaacccaggaggctgaggttgcagtgagccgagatcgtgccactcccctccagcctgggcgacagagcgagactctcaaaaaaaaaaaaaaaaagataagaccaatccttatgtaaaatgaaaaaaagataatctgtaaaagtacttcttgtgckgtgtctgaaccaaccttggaatgtccttagtgggaaagagtaagagagattacaaaagactgtaaggaatctgtgtgagcaggtggcaaaggtgagatgatcttctgctagtctccttattcatctgactttccatgtattaactgctaaatggggataatgatgactgactcctacttcatagaaatgctgagattaagtaaatagtatctacaaagtacttt

SEQ ID NO: 14839 - DNA, 986 bp, Homo sapiens
agaactagaaagttccagtcagcagtcatgtggggccacagtgtgtgctgcagccaagtggcattgccccgtctccagcctgtcacccacactgctatagaacatttatctcagtcttgcatctggacyctggcctaataaattcctccaaaggtatgcagagtacacagtcgcctcttaaggtgggatgaggccagagtaacagagagagtggaaagggagactgtcataaatattgactctagacagggagagaaaaccactggagcttaaaattccaggctcagagtaagttaatgagctactaaaaagacaaggtagtaggacatgcatactaggacaatcagacctgaagttggaggaaaaatgtgaggatacccactgagccaggcagactggtatagtagaaagggcattggccacaaaagcaaaagcacagagtttttagccatgtttctgcctgagggggctttggctaagtcacttcacctctctgagtctttgttttataataaagaaaaattgagatgatacaattcaataacaacaaaaacaacttgattttaaaaatgggcaagcaaattgaatagacatttatctaaagaagatacaaatggccagtaagcacgtgaaaagatgcccaacatcatgaatcattaaggaaatgcaaatcaaaaccacaatgagatgtcacctcaaacccattaaaatggccatcaattaaaaaacaaacaaacaaaaaacagaaaagaacaagtgttcatgggaatgtggtgaaattggaacctttctatgttgctggtgagaaagcaaaatggtgcagccaccgtggaaaacagtatggtgtatggtggttccttaaaaaattaaatgtatgatccagcaattccttttctgggcaaatacccaaaagatttgaaaacagggacttgaacaaatatttgtacatccattttcatggcagcattattgactgcagcctaaag

SEQ ID NO: 14840 - DNA, 986 bp, Homo sapiens
agaactagaaagttccagtcagcagtcatgtggggccacagtgtgtgctgcagccaagtggcattgccccgtctccagcctgtcacccacactgctatagaacatttatctcagtcttgcatctggactctggcctaataaattcctccaaaggtatgcagagtacacagtcgcctcttaaggtgggatgaggccagagtaacagagagagtggaaagggagmctgtcataaatattgactctagacagggagagaaaaccactggagcttaaaattccaggctcagagtaagttaatgagctactaaaaagacaaggtagtaggacatgcatactaggacaatcagacctgaagttggaggaaaaatgtgaggatacccactgagccaggcagactggtatagtagaaagggcattggccacaaaagcaaaagcacagagtttttagccatgtttctgcctgagggggctttggctaagtcacttcacctctctgagtctttgttttataataaagaaaaattgagatgatacaattcaataacaacaaaaacaacttgattttaaaaatgggcaagcaaattgaatagacatttatctaaagaagatacaaatggccagtaagcacgtgaaaagatgcccaacatcatgaatcattaaggaaatgcaaatcaaaaccacaatgagatgtcacctcaaacccattaaaatggccatcaattaaaaaacaaacaaacaaaaaacagaaaagaacaagtgttcatgggaatgtggtgaaattggaacctttctatgttgctggtgagaaagcaaaatggtgcagccaccgtggaaaacagtatggtgtatggtggttccttaaaaaattaaatgtatgatccagcaattccttttctgggcaaatacccaaaagatttgaaaacagggacttgaacaaatatttgtacatccattttcatggcagcattattgactgcagcctaaag

SEQ ID NO: 14841 - DNA, 1234 bp, Homo sapiens
cagcacttttggaggccaaggtgggaggatcacttgagcccaggagttagagataagcctgggcaacacagggagacaccatctctagtggaaaagaaaaaaaaaaggaaattctagaattaaaaaagggcagttagtccagaagagagcaagagaaagacgactcttgaagggagatctctaggaggtaaaaatggaatcgacatatcatctttctaaaggcccattaaagacccaataaaaagattaaagaaatggatatggaaaactctgccagtaaaaaaataaaatcaggctctagaaaaaactaaattttacaaaagaaacatagcgcacaacttgattttgcaaaaaataacacagaatccaaattatgtaaacatgactaatttaaataaaatttgtggtacaattatttttagaagaatgcagagaaggaaaatgggtgaaagtataatcctcatctactatattctagcacatcttcatctactgtagcagaaagccaatagaaaatgtctaaattttatcactaggaagcagcaatatragcatattatttaggaatataataagacatctcgaagagttgacagtggttgtctcagacaataagcctaggaggacaaaagggcactgctattattctctatgaacttttacaactatcttacttctccatgaacttacaactatcttacttttttttttctttttctttgattttttgagacagactctcactctgtggtccgggctggagagcagtggcgtgatctctgctcactgcaacctccacctccaaggttcaagtgattctcctgcctcagccgcccaaatagctgggactacaggcacacgccaccacccatccaactaattttttttgtatttttagttgagacggggttttgccatgacggccaggctggtctcaaactcctgacctcaggtgatctatccgcctcagcctagccaaagtgctgggattacaggtgtgagccaccgtgcctggcctatcttactttttaagaaaaacaagtataaattacccactcaccaccctccccccatgaaaaactggcccagagcctttgaacaaatgtttctaatcacctcctatggttcctagttaattcaaattttcaacttgtttagtttgactgactttgttccttgcttcctggtgtcttcctgtctgacctagctatagcattcagcacttctgactatt

SEQ ID NO: 14842 - DNA, 567 bp, Homo sapiens
gatccttggcgtgtttcatatacataatcctaacttggtcaactttggcccatatacggaatgaaaagagatggccaaaaggaaatatttttgtgaggcaagataaaggatggagtggaaacacaatgttttttgttttttgtttttaagtgaaaagttracaaaatttatgataagatcaggggaaaaaagaaaatgaaggaataattgatcatctgaaaatgaggaaaagcggtggttaaatcattgcttcagacagttgtcggagctatcccttagaaactgtggctctggaagagctcctctgatgattaacttgcagagcagaaaatgaggtgagagggaatgtgaaggaaatcaccagtttggctggactgaggaaaagcgaaggcagttgaacggaccaatttatatgtatgagatccttttaatctgggctttcttaactctgattgcacctatatttagtagacatgtcagaggataagcatcttcttatgctaagaagtcatttttacttctttaaggtgattatactccagttcagctatagataaattgcattac

SEQ ID NO: 14843 - DNA, 567 bp, Homo sapiens
gatccttggcgtgtttcatatacataatcctaacttggtcaactttggcccatatacggaatgaaaagagatggccaaaaggaaatatttttgtgaggcaagataaaggatggagtggaaacacaatgttttttgttttttgtttttaagtgaaaagttgacaaaatttatgataagatcaggggaaaaaagaaaatgaaggaataattgatcatctgaaaatgaggaaaagcggtggttaaatcattgcttcagacagttgtyggagctatcccttagaaactgtggctctggaagagctcctctgatgattaacttgcagagcagaaaatgaggtgagagggaatgtgaaggaaatcaccagtttggctggactgaggaaaagcgaaggcagttgaacggaccaatttatatgtatgagatccttttaatctgggctttcttaactctgattgcacctatatttagtagacatgtcagaggataagcatcttcttatgctaagaagtcatttttacttctttaaggtgattatactccagttcagctatagataaattgcattac

SEQ ID NO: 14844 - DNA, 537 bp, Homo sapiens
cttagtcatgtgtatatgtttcttgaaacttctcagccttcacctaaaaattcaccctttaaatattactttataatccagcttatgggtagttggttctcgaataaaatgatattttgctggaaaaaaggaatcgaatttatgcagaytcaatgctctattttaacgtgaatggtgtttttcatacactgactttcatggtactctcaaggttgcagtattacattcccctacaaattttgttttatcattaaagcccagaatatctaaatgagaaaagtatactttctgcaaagaattgcagacatttcagttaaaagtcaatccagtgagtgcaaacattcacaaaaggaactaaaatgcggaaatatccaaaatacatgtcaaagaaaacatgaggattatggacaaccaaaatcaatcttttcaagcacaaaacagtccttctaaaaagacttagattccgtgtgcggtccatagtcgtaggcttgaatagaatgttctttcaattttggggctgcaatcatttactgaagc

SEQ ID NO: 14845 - DNA, 1040 bp, Homo sapiens
ggcgtgagccactgcgcccggccagtgtttgaatttttataagcttttgtttagagattacttattatactagaaaagtaagttagaagtaaacattttctattaaaaaaatgaaaagaaatgagaaggaatgaacaactgtgaacaaatgaagtgggtaaaattttccayggccctacctcaaggttactttggtttcttttttgttttttgacaatcactaaggaagctctgtggagtgaaggaggaacatcatcatctgcaagtgactcagaaaaaatctcttttgtcctttagatttgtttaattcatgtagattgctttcttattcttgaaattcaagtgaccgtattcttactttactatagaaaagcaattgacatgataaaaataagcaagccatttgggacgttgagattttcgaggtaggtaatggaaaatttggcggtgaggggtcaacaagggatgatttttcctagacgtgtgagcttcctgtaatgtggaatgtgtacgtgtgaaatcaccagtctctatatttgcaataacttaataacatgacggttcctccacccgtcctctttccccacactgagttccagtttcacactgggatactcattgtgaagctttacaaagaaaggaggaagtaaacctaccaacaaggcagcaatgtgtttcaaatgccacattcttaacagatgaaggtttttttcatcacactgattagcaatgccacatgagtcaaagtggatggtccaaatcttgtatttaattttcttctcgtgtcctgggcctttcaaatttattaattattgtttacaaggccttgccttgctggcgtacatttagcagacactacaatcttagcaagggtcagctttatcttgctgcagggttgcacctgctccctcaactgaactaaaaaggaagtaaaaatgtggtatttaagtggccacagccttttgtctgatgcaggaaagcaacgagagcttctgtttcttcaccgttgttcatgctaaagggtctccaagtgtataaca

SEQ ID NO: 14846 - DNA, 1040 bp, Homo sapiens
ggcgtgagccactgcgcccggccagtgtttgaatttttataagcttttgtttagagattacttattatactagaaaagtaagttagaagtaaacattttctattaaaaaaatgaaaagaaatgagaaggaatgaacaactgtgaacaaatgaagtgggtaaaattttccacggccctacctcaaggttactttggtttcttttttgttttttgacaatcactaaggaagctctgtggagtgaaggaggaacatcatcatctgcaagtgactcagaaaaaatctcttttgtcctttagatttgtttaattcatgtagattgctttcttattcttgaaattcaagtgaccgtattcttactttactatagaaaagcaattgacrtgataaaaataagcaagccatttgggacgttgagattttcgaggtaggtaatggaaaatttggcggtgaggggtcaacaagggatgatttttcctagacgtgtgagcttcctgtaatgtggaatgtgtacgtgtgaaatcaccagtctctatatttgcaataacttaataacatgacggttcctccacccgtcctctttccccacactgagttccagtttcacactgggatactcattgtgaagctttacaaagaaaggaggaagtaaacctaccaacaaggcagcaatgtgtttcaaatgccacattcttaacagatgaaggtttttttcatcacactgattagcaatgccacatgagtcaaagtggatggtccaaatcttgtatttaattttcttctcgtgtcctgggcctttcaaatttattaattattgtttacaaggccttgccttgctggcgtacatttagcagacactacaatcttagcaagggtcagctttatcttgctgcagggttgcacctgctccctcaactgaactaaaaaggaagtaaaaatgtggtatttaagtggccacagccttttgtctgatgcaggaaagcaacgagagcttctgtttcttcaccgttgttcatgctaaagggtctccaagtgtataaca

SEQ ID NO: 14847 - DNA, 501 bp, Homo sapiens
ttaaaaagctagaaagaatgaataatacctagcatttgatagcacaacagggtgactacagtcaaaataatttaattgtacattttttaaaaactaaaagagtataactggattgcttagaacatgaaggataaatgyttgagaagatgaatactccattttccattatgtgattattacacattgcatgcctgtatcaaaacatctcatgtaccttataaatatacatacctcccatgtactcataaaaataaaaaaataaaaagaccaggctttggaactcaccatcttgaaaggttctctgttcatcatcatctgagatgagaatggctgaatggaaaagaagaacttccattaggagagttgaggttattcctgcctgaacctagaccagggaactccttatatcaaaaccactgggatgcctgttaaatctgaccactggcctcactctgtgccttctgaatcactttgaaaggtgccctggaacctgcatttaaa

SEQ ID NO: 14848 - DNA, 501 bp, Homo sapiens
ttaaaaagctagaaagaatgaataatacctagcatttgatagcacaacagggtgactacagtcaaaataatttaattgtacattttttaaaaactaaaagagtataactggattgcttagaacatgaaggataaatgtttgagaagatgaatactccattttccattatgtgattattacacattgcatgcctgtatcaaaacatctcatgtaccttataaatatacatacctcccatgtactcataaaaataaaaaaataaaaagaccaggctttggaactcaccatcttgaaaggttctctgttcatcatcatctgagatgagaatggctgaatggaaaagaagaacttccattaggagagttgaggttattcctgcctgaacctagaccagggaacyccttatatcaaaaccactgggatgcctgttaaatctgaccactggcctcactctgtgccttctgaatcactttgaaaggtgccctggaacctgcatttaaa

SEQ ID NO: 14849 - DNA, 579 bp, Homo sapiens
aaagccctcacctgctctcagaacctaccacttggagttttaaaactttaaaacaatagcttccatcctttcctcctctggaaaaatccagttctatttgcctagacttcataaaggaaatccaggaagaaaggtagaattttctcctagattctcattactttgggaatgggagaagaaaaaataccaaatagaaaaatgtgaatttctgcactaattagaaggatttctctacattccactattatgatttacttgttcaacaaatacatattaatttgtacaaatgtcatcaataattgcttgtttaaattatttattttgcattcatagcatgatatttagattttcagacatttatagaataatatttagttttttaggcattcatctttgtttctttygaaatatatgctattaatcacccaaacaacttttttacaaattgaattttagagtttcttgaattgaatgtacaattattaaaataatgcaacaattattatatagtgaaacaatgaaaaaaaacagaacctcatatcctgggagaaagtttcaatatcaatgcttttcttttga

SEQ ID NO: 14850 - DNA, 691 bp, Homo sapiens
cctcatatccctactcataccctttctgctgtctcattcttaatcaagaaaaaagcacattacaacacagataaaaattcctctataatgctgggattatccaagccaatctaaatcattctaggctagtgtaagttccacatggtaaaggtggtggtgagggagttattataataaaatacataagaaactctatgtcttacccatatgtgtatccatggccacaggaagaatcaatactgcaactctgatcaacagtttcattcctgcattagtaaggaaattaaaatcttactgtaagggtcctcttattacaggaagttcacttctattaggaatatttcataaaccagtttgtagccaaggtcaagaaccaggaagcatggaattaagtagaccacaatcagtaaaacaggacttggttaccaagctttgggacaggatcagacaggctagaaacctgctgggcattgtgcttcctggttgtgagaatacaggtcaatcatagggactcagagctgagtccagagcagtatgaatgcacagtagaggcaggggccaagctggaagacaagagcatgaaaataatattttatccatgatgtttttatgagaccacagatcagattccaattaattattggtgaggattagcatcaaagttaattcttytcatagattgaaaaaaatc

SEQ ID NO: 14851 - DNA, 1356 bp, Homo sapiens
taaaaggaataataaaggaaactgccaattgtaagtgaattatatttggctctgaaagctgaggcacaggctatattataaaaggcatctctctttgcgttgtttaccatcaccctgactaatgcagaccttttttttgttgttgttttaaataatctcatgcaaattagacacagacacttccttccagttgattgctatctgcaaggaataatctaactgcagagggacggagcaatggctgagcaggcagagagctggaagcaaagggcttcaccgtcctgcaagcctcctccctcctctattcatctaagtcctcctttagctgctatctttggaagaattagtcaattttaataaagccccaaatgttcttttagttgaggtatcaatatgcattacctgacaccactggcactaagcctttatgttcttcctataacttcctttctgccacttggtgattttcaagagccaccagctcccaacccccagccacccagtctatagcactgacaattaaaatatattattgatagagaataacactaagaaattcccgttcagttactctctccacccactagctctagtcaaaaggaggagaaagggacgagggagcttctctgagaggaggggaggcgaagagggtctgggctgactctgagaggtaaagaggccgcttcatcttttcacatcatagttacctgatatgcaaaactgagagctctcaattcaaaccaaactctttgaatgaagattccatgtgcccagagtggggaagacttcttgttctctcagttctctagaatctacttgcaaaaacctccagaagagctccctggaccggagatgactgctgcccttgtgtaggagctgggccaagcatctcttctccagggtgggcttttttttttaaaaggacagaacaagtgagctacatcctattgattaataaaaccccagtgtcactgctgcagtgtctgacctgcgtggccacagggctgccacacttgcctatttttatcccatagaagataaacaaattggctttctttttctcaaggtttctgttcaaatgcaaataaaaccaaactgattgactctgtgagctgcagggtacatggctgcgattgtgatgccctagggtcctttcccacgactcagaccaaaccagggacccggaagggctgtcttttctctgcgggacaggccgtgcaagggtttctcaggataagtaacctcagcactgtccccagtgaccgctgggcactgccacggggcttggccctgtgcaggtgaagcagaaagacagatgacagargacagcagtgttctcttcatctttcaggtcaa

SEQ ID NO: 14852 - DNA, 532 bp, Homo sapiens
cattttttaataataaattcagaatagctaggataaatcgcttttgctgttgttaaaccttaaaaattatttttatctacctatgaatattcatcttccctcgagtgttttcggtatggcaagttctgagttgttaaaattgattgttattgtcactttgtaactgagagggtctccctagtgaaaacctgactttctcaaagaagtagttcaaatttctccttacttttctgacagtagtgtgcctcaagcatrtcttaagaacataacaagtaataaaccataaaccagtattttcttcaagaaaatatatcagtggagaacagaaaatgttatctttgaaaaaaatatgcagttataaaaagttgtaactcttttttgttacaaactctctgttcaattgtatgaagttgctctctctcagagcaaagacttgccagttggctttacttctttcatcccctttcttctatatccactgcctctgtacatttttcccacttcccttgctctgacaaagatatcaaaggtt

SEQ ID NO: 14853 - DNA, 532 bp, Homo sapiens
cattttttaataataaattcagaatagctaggataaatcgcttttgctgttgttaaaccttaaaaattatttttatctacctatgaatattcatcttccctcgagtgttttcggtatggcaagttctgagttgttaaaattgattgttattgtcactttgtaactgagagggtctccctagtgaaaacctgactttctcaaagaagtagttcaaatttctccttacttttctgacagtagtgtgcctcaagcatgtcttaagaacataacaagtaataaaccataaaccagtattttcttcaagaaaatatatcagyggagaacagaaaatgttatctttgaaaaaaatatgcagttataaaaagttgtaactcttttttgttacaaactctctgttcaattgtatgaagttgctctctctcagagcaaagacttgccagttggctttacttctttcatcccctttcttctatatccactgcctctgtacatttttcccacttcccttgctctgacaaagatatcaaaggtt

SEQ ID NO: 14854 - DNA, 781 bp, Homo sapiens
taaaaatttaaaaaaattgttttacaagagttcatgataacagatgatcatataaactttacatgaatacatacttcaaaagcatatagctctgggaagtaaatatttaaaaatatttttctctataaaatgtgatacgtttctaaacataatattttggggtgtgtgtgggggtgggacacgggaggggagagattgaaccccattgttcttaaccctctccaggtgttgtagttacacagaacagataaaaggtaatgataaagtaatatacaacagtacagacaggcctctagtaaaaacaaaaagttactggcttactttaattagctcttctcctgtcaaatagattttgtggttacagtcattaggtgtttagtttgcgattaaagaaagtaacttcctcttcatggaaaaaactgctctttatgagcattagatccacatctctggcacaactgtctccatgctctaacgattaactatacatatttcagaaaatatacaagcaattttttctttctggtgccagaatgggttttgttgttagtgctgtagattgccccagggatgaggtaactagtagtttttactgaaattcattaagagctataatatgatcatttwttataaaacatatcccagaacagcctattaggccctctgagactaaaattagaatagtccacatgtcacagtcatctgctaataggggaaagataaagcatttcaaggagttccgagtgaccttgaaggaatttcatgagactcaacctatgat

SEQ ID NO: 14855 - DNA, 568 bp, Homo sapiens
aggtgacgtgccagcaaaggaggaaaagtataataggtgacagttaatttggtttactgacttttacctgaagaagccatatttaattctgtggtcaactctaagagatcacagggtctcttaagtgatcatcatttcttttgccatctcacattgactcatctgacttagaaatgggtggrtgaaaagaatcttcactcactatgttttaatgttagaacacaaaaactcaaattgggcaggaagaaacaaacctctctcatgtaagagacactcagtcccccgaaaaagaacaaattcttcattcagagtgaacagcttgtgagaaaaagcttactaccttgctcataggcaagggaggtgattgtcaaatatagctggaaggatgtcttgcccagtcttttgcggatgcttgaagtttctataatacagagagaaacttttaattccacaaactcagatgaagttataaggctaatgtttctaagagggagtatactatagtgatttgaatttagcagggttgtaataacttgtaccagattgtgtcttaatcaaccagcaaata

SEQ ID NO: 14856 - DNA, 554 bp, Homo sapiens
ttcagcatgttggccaggctggtcttgaactcctaacctcaggtgatccacttgccctagcctcccaaagtgctgggattacaggcatgagccacagcgcccagccagtccatttcactcttcttggatatagttccctttatgcttcgtgattgagatctgtctcttgtaagaggcctggagatgtgagattttgagggyagccacggtctccatcttgtgccctgttcagctctctgtaggtattgccaggccacggagccctgtctctttgagggaagcctgagggcatggcagtaataaccacctgtcagctgcacaggattctgagtgagggttgggcctccccatgagtcacttgctagctcctgttaagtaagtcttttcgaccccatatcaagtccctacctctctgttccctgtcatgggaatcttttcctttcactccttaataatgtacattcctgtgccacacactttcctccatttcctttggaagcacagtacagggacttttgcgttgccaggaatgaatgtttaggaagtaggccttc

SEQ ID NO: 14857 - DNA, 554 bp, Homo sapiens
ttcagcatgttggccaggctggtcttgaactcctaacctcaggtgatccacttgccctagcctcccaaagtgctgggattacaggcatgagccacagcgcccagccagtccatttcactcttcttggatatagttccctttatgcttcgtgattgagatctgtctcttgtaagaggcctggagatgtgagattttgagggcagccacggtctccatcttgtgccctgttcagctctctgtaggtattgccaggccacggagccctgwctctttgagggaagcctgagggcatggcagtaataaccacctgtcagctgcacaggattctgagtgagggttgggcctccccatgagtcacttgctagctcctgttaagtaagtcttttcgaccccatatcaagtccctacctctctgttccctgtcatgggaatcttttcctttcactccttaataatgtacattcctgtgccacacactttcctccatttcctttggaagcacagtacagggacttttgcgttgccaggaatgaatgtttaggaagtaggccttc

SEQ ID NO: 14858 - DNA, 554 bp, Homo sapiens
ttcagcatgttggccaggctggtcttgaactcctaacctcaggtgatccacttgccctagcctcccaaagtgctgggattacaggcatgagccacagcgcccagccagtccatttcactcttcttggatatagttccctttatgcttcgtgattgagatctgtctcttgtaagaggcctggagatgtgagattttgagggcagccacggtctccatcttgtgccctgttcagctctctgtaggtattgccaggccacggagccctgtctctttgagggaagcctgagggcatggcagtaataaccacctgtcagctgcacaggattctgagtgagggttgggcctccccatgagtcacttgctagctcctgttaagtaagtcttttcgaccccatatcaagtccctacctctctgttccctgtcatgggaatcttttcctttcactccttaataatgtrcattcctgtgccacacactttcctccatttcctttggaagcacagtacagggacttttgcgttgccaggaatgaatgtttaggaagtaggccttc

SEQ ID NO: 14859 - DNA, 552 bp, Homo sapiens
tttatgacagttacaggcattattatttttgacactctacttgtccttcaaattgagcccctgtgacaaacagtgccttgttttctggcaccatcacatgtcctgggctcatcttacacatttccatcccaggcctgaaatcagttgttactccaagaatccctgggtatattttgtggagaatgcattaagaaacccagatgtagatgccaggtaggcttgttgctagcaggagtcattataggtttgttcaatggacagaggtaggaaatatatttttaaaaaacatgagttcattcatattttaaaatctaagattttacgaggaatgttcagattaataaggacattctgttgacctgtggtgttatgtgagctgttccttctgcatcttttcccctcttagtccacctttcccrtagactcttagccttgtctgcccttgagtttcttctgtgattcattttgtctcaaagttagttgtggaattcttggttctcaaagtcagcctaactgtgatttagtgttagtgactgggaaagagtagccaca

SEQ ID NO: 14860 - DNA, 554 bp, Homo sapiens
ccattcttcccagacagaaaagagagaaatggggacaggcaagacattcttatagggtatacttttctattttacatttgagaatataagtacattataaaagtaagcatcaaatttcttataatgatagttatttattaggttaaaaagttaaacattatctctaaaattacacctaataattaagtgtaagattaaattgagcattttttcagggataggaaggagaaacatcgtagaatcttttttttttttttgagatggagtttcattcttgctgcccaggctggagtaaaaatggcgcaatcccagctctgcgccatctcagctcaccacaaactccgccttcccgggttcaagcaattctcctgcctcagcctcccgagtagctgggattacaggcatgtgccactacgccaggctaattttgtatttttagtagagacggggtttctccrtgttggtcaggctggtatcgaactcccaacctcaggtgatccacctgcctcggcctcccaaagtgctgggattacaggcgtgagccaccgcgcccg

SEQ ID NO: 14861 - DNA, 585 bp, Homo sapiens
ggctgcagtgagccgagaccatgccactgcactccagcctgggcaacagagcgagactccatctcaaaataataataataatttaaatcactatagtgaggattgccttccagctttatgagctttctttccacaagtccatgttgacattaactagggggaaaatgaggatcactgatatctgtagtcattatggtatatctaaaatatcacataatagaatattacatgattttctaagaacattagacaaagaagaccctttgaaatagctagaattagtcctttcagacatagtcttggcaatgactggttgacgttaaaatgaaagccagaaaggcttaggatggaagaacrcttgggttttcctaagaacacttgaatctcctgtctctgcatctatcactaaagattagcccttagaacagtagtgtgtgaacccccttcatgttaacactgaacttcaaatttcaacatttccaacagttttaatttggaggctgctgacagcccagctctaatggaaaccagtcttcatgacttctgtgttaagccttaaggtacaatttccttctctcagatatg

SEQ ID NO: 14862 - DNA, 518 bp, Homo sapiens
tgccacagacagctgacggcaggaggggctgggttatattagcacagacaggaagcagatttttwaaaatttgttttgcttcttacactttgaattctaggtcactcacagctcagcctgcatgataatttttaaaagaggattctaaaacataagttcaaaggtgaatttgtttagccttttacaatagcttacataaagccaccaacttaacaagtccacataaataagacagacttggttcataaagaccagtgggagttgaagggattgatgagaaggaactaaccttgtccaagcacaggagcattgactagttaaccctctttgaaggtaaatctaaaaggtcctctactcagtcttaggacccatacccattggtgacagggcaaggggatccagaggataaaagcaaaggtcctctgtgccaatccctactaaaacaatgccccatacccagagacaaatggacccttctgactccagcccgggcttttttttttttttttttttttttt

SEQ ID NO: 14863 - DNA, 518 bp, Homo sapiens
tgccacagacagctgacggcaggaggggctgggttatattagcacagacaggaagcagatttttaaaaatttgttttgcttcttacactttgaattctaggtcactcacagctcagcctgcatgataatttttaaaagaggattctaaaacataagttcaaaggtgaatttgtttagccttttacaatagcttacataaagccaccaacttaacaagtccacataaataagacagacttggttcataaagaccagtgggagttgaagggattgatgagaaggaactaaccttgtccaagcacaggagcattgactagttaaccctctttgaaggtaaatctaaaaggtcctctactcagtcttaggacccatacccattggtgacagggcaaggggatccagaggataaaagcaaaggtcctctgtgccaatccctactaaaacaatgccccatayccagagacaaatggacccttctgactccagcccgggcttttttttttttttttttttttttt

SEQ ID NO: 14864 - DNA, 560 bp, Homo sapiens
aaataatgctaaggttcagatggattttttttcgtatttgcaagttaatcctcatctgaaaatctcaagtgcattgtagtttatatttgctttttaaatagaatttgtaccagatattaaaccattcgcttccctgttttrctcttttttttttcctttcattgcttggtgcttgagagagaaaatttttttccaggttttataaagacatgagatgttggattaaaacatatattttttattgagttacatgtaacttacacatagaaaatgcatagatgtaaagtactgtctttgctgctttttgtctattgtatacatccatatgacaatgaaccaatttaggatacagaacttttttcattatcttagaaaatcaccccatctagccattctccaccaattaactcttccacagaggagacctttatctgacttctattggccctaaaaatgtttttctcttcttatattacttaataataagaaaatactctgtcggtttttaactcaatagaagacttgagattcattatgacgttgtttttgtcagtagctta

SEQ ID NO: 14865 - DNA, 560 bp, Homo sapiens
aaataatgctaaggttcagatggattttttttcgtatttgcaagttaatcctcatctgaaaatctcaagtgcattgtagtttatatttgctttttaaatagaatttgtaccagatattaaaccattcgcttccctgttttactcttttttttttcctttcattgcttggtgcttgagagagaaaatttttttccaggttttataaagacatgagatgttggattaaaacatatattttttattgagttacatgtaacttacacatagaaaatgcatagatgtaaagtactgtctttgctgctttttgtctattgtatacatccatatgacaatgaaccaatttaggatacagaacttttttcattatcttagaaaatcaccccatctagccattctccaccaattaactcttccacagaggagacctttatctgacttctattggccctraaaatgtttttctcttcttatattacttaataataagaaaatactctgtcggtttttaactcaatagaagacttgagattcattatgacgttgtttttgtcagtagctta

SEQ ID NO: 14866 - DNA, 541 bp, Homo sapiens
acaaactatttccaatgtaatttccaattacaaacaatgtccaatatagggcagtggttaaatctagtcataatggtaatagtacgcagttaccaaaactatgttttcagagaatatttgtaagaaaaatactcatagtatgttatatgttaatataatatacaaatgaaaattgccagtaatccttagttttaggaaaagagatctacaatttatacatgaatttttaaaaactagaaataaaagaaaatgctagcagtgaacataggaatcatagatgattgttaaaaatgttctctacaatttttaagttttctctgaagaataggtatatatcttttataatcataaaataaataatgggacaaaaattactcactaggacttctgcttccaggaagatagagtcatccmcttttccctaagtcatccacttttccaccctctaagtacaactaaagaccatgcacattatctacaaaacaaatataagaagactctgaaagatggagaagaaggcagaccagctggggacatgacg

SEQ ID NO: 14867 - DNA, 616 bp, Homo sapiens
gcaatttaatttttaagacaggcgaggccctcacccaataattgggcataaagtaagacacacagtcagcagcaagaggtgagaattcacagcagaaagagtggagggaccatttcaaagccccagtggtctgcgcctatttagggcagagataaatagcctactcagctctgtagcccctagggctgtaattataatcaccatcatcagtgtccaggacacgtgtctaagtcatcaagagcaagaccgaaggaaagttggtgctgaaatgatggagggagaactgtttattgcccactgctctgggcgcygggagtacaaggggaaaagacacaagcccagccttcaagaagtttatgtgggcgaacaggaaggatttctgtggggtgaaattccataaatgagggagcacagtaaggtagacctaatgcagcttgagaaaacttccaggagaagccgacagctgggttgcacccaagaggaacagaagttagccaggtagaagggtgacaacaggactctacagttcagacctgcaaggggcatggcctggctggcaggtggggcaggagagtgtccatgagaatgttctgtgcagcaaaccaagcactcgaag

SEQ ID NO: 14868 - DNA, 899 bp, Homo sapiens
cacacacttctggtttccttctaaccccctgatctccctgctgctgactcctttgcctcctcccagctcctagaggctggcatggccctgggtttagacattaacctttctgcccagtcactgctcttttgccctatttaattttcttcatagccctcatcactattagaaatgatcttatttatttgttaactggtatgcttaagagcttcactagaatataagctctgtgacatcagagactctgttttatttactgtagaatttcaaaggactagaacagtccttggtccataacatgtgctygaaaaatagttgttgaatgcataattgactgactgattaatggaatgaatgaatatatgaattctgataatgacaaacagcatgtcttcttaaagattaggagacaaaacttttatcaaagtaggaggagagaatttgaaattattctagaatattttgttgtggtcctatctgctgcaacttcaaaaaaaaaaaaagatggttttctttttctttttttatcagccacagagggatggattagatgaccttctcatacaagttgagtcactcccaacttgagcatcatgtaaacctggccacttacctcatatcgggctcagcagtggcagcatgcagtggcaggcggccatttttatctgggatattgtgcttggcaccgtttctgagtagactcacacagccttcaagccagccctgaaatacaagagcaaccacatcattatataacagaagctcacgtaacatggtccaacaaactttctctagatttttttccctttctctggtttggttaaaaacatattttatttgacttgaagtggttaagaaccacaactccatcttagatgcctcaacagatggccgaaggt

SEQ ID NO: 14869 - DNA, 542 bp, Homo sapiens
tttccttggagcccttggtgggacggcagctgtgtcttccctcaagttcccaggggtccccagcttctcactccggaggctggtgtgttgttggaaaaacaactgagaactgcaggcgagctgagtagaygccagcaaacctcaccctctaggtccttcccaggtatcccagagatgaagccagtgttaaaggtctacccgtcaggcgggggcggggcacgctgcaggggtcctccccacgctggtcggcaggagtgacgcctgaagctacagctggggtggactcctgcctactgcccacctgtccctcctacgctgggaaacggcccaggggaccccgacagctctgacacacagggactaagtggggcatgtgaaggcttttgagttactggaagaaaaacctcctcctccgaggtgtgagttatgagaggggatggggagtgagctcaagagtaaagactagtgagttgctggccaccttcatttggtggggacttgaggaaaagacaaaagtcctcattctctgctgcccacagtgg

SEQ ID NO: 14870 - DNA, 606 bp, Homo sapiens
gtctgtgagccacatgggtcgggtgtagggcagctgtgcaatgagactgtggccaaacgatgccagaagccagcattggtgggtcttcatccatgggagcagcacagcgtggaagctaagagaacagactcggagccaccacctgggtgcgtgtctgtggcttcttaactgtgcaaccttgggcaagtcactcaacctctctgagtgacgctcctcatctgtacattggagagatccacagtggcctcttgtgaggactgaatgagtgggcagagcgccaagtgggtgggtaggccctgagaaygcccactgtgtgtcctcagccacctctgcgaggccccgggctggggtgcatgtcctgtacacgtgcacactgactgctcacccctttgagcacctgctagaggggctcagccgcctggggacagggcagcctggaagttcatggatggagggccctgggaacagtcctcggtccatgaagaacagagctggtggataaagaccccagtttctctgtcctgtagcctcacagggggcacttctttttttaaaaaaagtgtttatactgtttttattttattttgcacagttctttttatcctt

SEQ ID NO: 14871 - DNA, 606 bp, Homo sapiens
gtctgtgagccacatgggtcgggtgtagggcagctgtgcaatgagactgtggccaaacgatgccagaagccagcattggtgggtcttcatccatgggagcagcacagcgtggaagctaagagaacagactcggagccaccacctgggtgcgtgtctgtggcttcttaactgtgcaaccttgggcaagtcactcaacctctctgagtgacgctcctcatctgtacattggagagatccacagtggcctcttgtgaggactgaatgagtgggcagagcgccaagtgggtgggtaggccctgagaatgcccactgtgtgtcctcagccacctctgcgaggccccgggctggggtgcatgtcctgtacacgtgcacactgactgctcacccctttgagcacctgctagaggggctcagccgcctggggacagggcagcctggaagttcatggatggagkgccctgggaacagtcctcggtccatgaagaacagagctggtggataaagaccccagtttctctgtcctgtagcctcacagggggcacttctttttttaaaaaaagtgtttatactgtttttattttattttgcacagttctttttatcctt

SEQ ID NO: 14872 - DNA, 606 bp, Homo sapiens
gtctgtgagccacatgggtcgggtgtagggcagctgtgcaatgagactgtggccaaacgatgccagaagccagcattggtgggtcttcatccatgggagcagcacagcgtggaagctaagagaacagactcggagccaccacctgggtgcgtgtctgtggcttcttaactgtgcaaccttgggcaagtcactcaacctctctgagtgacgctcctcatctgtacattggagagatccacagtggcctcttgtgaggactgaatgagtgggcagagcgccaagtgggtgggtaggccctgagaatgcccactgtgtgtcctcagccacctctgcgaggccccgggctggggtgcatgtcctgtacacgtgcacactgactgctcacccctttgagcacctgctagaggggctcagccgcctggggacagggcagcctggaagttcatggatggagggccctgggaacagtcctcggtccatgaagaacagagctgrtggataaagaccccagtttctctgtcctgtagcctcacagggggcacttctttttttaaaaaaagtgtttatactgtttttattttattttgcacagttctttttatcctt

SEQ ID NO: 14873 - DNA, 805 bp, Homo sapiens
ggattcatccgacacatcgaaggctcattcaggaccatccagcctcgggggctgccctgccgcacaggctcaacwcaacctggggttgtgggtgcctcagagaagacagcatcctccaggccagatccaccaaatttcaaaccaaaacctgaattgaatgtcaaagggacaggcttggcagtgtgggaggcatgcatggggctcagtcgtcctcctctgaccattcctccccaaagcttcgtcctgcctcgacctgatcatgtgtttgttttttttgtttgtttttagtggacaaatcataattgcctatatttatggggtacaatgtgatgctttgacatatgtatacaatgtggaattattaaatcaagctaatgaacttagccatcacctcacatacttacgtattatggtgagagcaatggaaacgtaatctctgagcaattttgaaatagaggttactatcggcctttccttgccggtgtttccccctctgtggaatggggagggtggtgctgatttcagcggcacctgcttacagggttagcagctcatggaaagcacctgcaactgtgggtgcctggaaaagtgagccacaatctcattttcccacctcctgctgctgaccgccaccaaggaacctcaggggacagtcagacttgggaaagcatggcatcttagccctcacgccgtctggtgggtggttagtgtctttagtgtcccccatcgctcaagtcagcccggggcacaacagccacacaaaaagctctatggccatgaggcgtgtgctgtgacccatccagcc

SEQ ID NO: 14874 - DNA, 574 bp, Homo sapiens
gataacagaaagaaagaaataagtaatattaacagaattcaagcagacgtatcaagaccagatattgggcctgtagaatgatattaaacatttttatgaaaaaagcaggcatttcaccatttattttaatttttgcaaacatataaacatcctaaaacagagaaagaagaatatctaaatattaggctgatgcaaaagtaattgcagtttttgccatttaaagtaatggaagtaatagaaaatcttattttccccttatcccctgagctgcttgggagggttagagggagttatacaagaaatgtcaaggtatccatatttttttaacaaaagcataatatatttatcatgtaaaatctaatgaataagttattctccttattaaaatatcactatatgcttccacgggttacagaaaacatggcacaaagaaaagggcacagtattaagattagagaaaagaaagcagaattgttgaaagactcagagagggatatagaaaacccttytcctcattaagaagcaaagcaggcagctagcattgtgcagagtttattgggcaaaacagtcatca

SEQ ID NO: 14875 - DNA, 1260 bp, Homo sapiens
gtcaaacacatgctctacactagatcatgttccttttaaaaatcaaatgcacatagtaaagtagggggagaataactatgtaacggatgccaggctacacatcaggcaagggatttctatgtaaaggtatctattacttatatagaatacctagcacacctctaggtcttttgcatatttttattgttaatccttattgcagtccagcgtgtcggatattatggtcctgattgtgtccaggaaataagcttttcaacagcttatatactttgcctaagatcatacagcttgtatgtagcttgctggaaattttgaattcaggtttcttttctttttctttttctctcttctttaaaaaaaaaacctacagctttacagttgatattctttctattattattttattgctttctttatacacagttgacttcctcatgtgcaaagactcttttctactttttccaagtttcccaagaaagttcagcacaaygtagtacatatctacgaaagagttttgatttggctggaagttatttttcaggtcatattaaagagagattttttttttttttaaacaaagaatcactcctttgtgaatggttgtttggcttgtctcagaaaagtttcaattgcaagtcttaaaagttttaccagctaaagatctcttgaagctaagtattcctcttcctttcctgaaataaatttgattgttctctctgactctgtgttttgactctttctccacattccaacgtaaggatctttctaaatcacatactctacttctttatttagctctcatcatctccagagaataataactcagctctttaaattggtgcccaagggtcttcataatctgagttagacatctccagctctgtctcctgctgtttccccagtaatactaagcaattgtatctccttcgacacctttctgtgagctactcatatgagtatctcagatatactttcatatctcactgtcgttaggatgaatgtgtgtgacatgccttataaagcatttatgcatttgaagcacaaaaaatatttagagaccctaatatttcaaatatatacttgtgtctttcttaattttatgattatttttcataaggttgtcttttccaatagacttatagaagactctatggttcttagagttactacatagatgattcaataacagagattcagatttattgactgagagtatcatactggggggaaaattatcaaaatagattctatttctggttc

SEQ ID NO: 14876 - DNA, 542 bp, Homo sapiens
ttctgcaatatttcagcatctcacaaagagtaaatttactaacttctttcattcacacctgataaaaacttaacaaggagttattcccaacttctttgtttaactatgggtacatgtagcatctaattcatcctggcaggctcctcaggagaacttgaaacatagaatcaaacaatccatgggggcactctgagttttataattttgtagtgatgacaggttacatgcrgcacctgccttgatgatttttctaaagtatcacaatatctgatacattctaaggggtgtaattttaaggtctccatcaatcacttgtccagatattgaacaagctctggagctcccttgtgagaagaatctcattttgcctacatgatcaaataaattcgcatgcaagtgaaatccatcagaaaaaaatgatctcagctgttcagctatcatattggacaaccaacactgtccatggttgtgtagtctcgcaacataataatctttcctaaatcagcaatataagatgtaagcaatcagaaaataagatctca

SEQ ID NO: 14877 - DNA, 651 bp, Homo sapiens
tgacaatatgacataaaggatagtgggggaggttaaaaaaaggcagaaggaaactaggttttaggttatgtrcatgcaacccactattacacagttttcatctttattctgttaaccacaaaatgggccaggcacggtggctcatgcctgtaatcccagcactttgggaggcaagacaggtggatcacctgaggtcaagagttcaagacgagcctggccaaccaacatggtgaaaccccgtctctattaaaaatacaaaaattagccaggtgcgtgcgtcatgcctgtaatcccagctactcgggaggctgaggcaggagaattgtttggaggctgcagtgaacagagattgcgcctctgcactccagcctgggcgacagagcgagactctgtctcaaaaaagaaaaaaaaaaagaaacagcatcaatcacaaatatttcatgagaaacattcaacctgagggaactctaggctgtgcaacagaaaggtaagaattaactcagatatttgaactagaaacttcccttaaagagggtccttcatgcctgaggggacgtgtttttcattttcaaagtaactggtatcaccaaatgacacaaagagaaacaatggactgtcataaaatttctaagctgtaagacacttagcaat

SEQ ID NO: 14878 - DNA, 662 bp, Homo sapiens
tttttttttgagacaggctctcggtctgtcatctgggctggagtgcagtggcacaatcttggctcactgcaacgtctgcctcgcaggttcaggtggttctcgtgcctcagcctcctgagtagctgggattacaggcacrtgccaccgtgccaggctagttttttgtaaaaaaaaaaaaaaaaagtgtgaattttataattgtgagtaaccatatacccctgaattaggggttctgttaatacagagaaagaggagaaacctctgttagaggatagcttgcagtttctgctatagatttctcagtttctggtgggaacatttatccctatgatttaaggtataacatttatcttaacaaggcaaagcaaacacttcttaaagagaatacttagtgtttactagaaaaacagggtcttgaattttggttaagtttgaaataatgtggtctcctagaaagctttatttgttaatttttttttaggccagtcaagtgaagcagcgggagtggagaaggaacaaagaaatctgtaactggttatgatcaatgagttgtaaacaccgctgcacttgaaccagccagtttttggctgtcaggaataacattaaaataaatctgcctttgccatcagcctcattgcttttgctagcaccctatattctag

SEQ ID NO: 14879 - DNA, 665 bp, Homo sapiens
tggctgcttcagtgaaatgtgcctttagaagaagattgatattggtcacagagaatatcagttgttatgactgatacaaatatgagcaagatagtgcccaatcccaaagacctctttgatccagtaaggaaaacaggataacattacatacaagtcatgacacaacccactttttgaggtatcccttttctttttgaattaaagacgtgtccttcagaggtgtcataaattaacttgctatatcccaactctctggttctagatcaacactaacccttaacattaattcaagcttcctcttcccagtatgwattgtgctaaaatattttgatttatggaccttgtgaaagattacgtgctcgctgccttttgactcagaaataatacaagagaaagaaaagcagaaataaaaaaggatccaccctcaagttggggatagggagtgagagagaggtctggattcaagacttctgactagtactaaatgctaacggtcattataatagtcatcatagttaactccttcataccagtaatcttctaccgcaatgggagataaaattgattgttaagaatacttaactctggcctaaacttgtaatcccagcactttgggaggccgaagcaagaggatcaccatgagccaggagtttgagaccagcctg

SEQ ID NO: 14880 - DNA, 575 bp, Homo sapiens
gactcactgcaacctcctccgcctcctgggttcaagcaattctcctggctcagcctcccggatagctggaattacaggcaagcaccaccaagcctggctaatttttgtatttttagtagagatgcggtttcaccatgatggccaggctggtctcgaactcccgtactcaagtgatccgcccaccctggcttcccaaagtgttgggattacaggcgtgagccactgcgcccagccaatgttatctttatataygtaactcttctgctactttgttagataactatgaagtatagataacacaaagattgttagtttctttttcaaagactcaaactagtttgtgaaattaagtcctttaaactgtcatcaggttttcaatgcccagtgtatcctttaggtgccaaaacaaaataagagggccaagcagagggaacgggtttattaagtgccagctgcatgcatcagacattgctaatgttacctcatttgatcctcagatggggaggtaatactgatgctcatttttaaaaggatgaattcacagaggaacagagaagtcaggaaacttccccaac

SEQ ID NO: 14881 - DNA, 678 bp, Homo sapiens
cctggttttgcaccctagtactgccgcttattagacgtgccatactgggcaagttatttaaccttttcatgcatcagcttctcatctataaacgatagtgcctatgtgggaatgcagtggtggttgaagaaaggagaaaagggcccaggacatcagaaatgggtaggactagagctaggggwgcggtacagcttggaggctctggaagtgagtcctggagtcagggctttgagacatgagaggaggctatggcagaggcacatgttctctgtgcaaatccaaggagcccaccaggaagaccccgaattcccattactggcgtatccaccgactcttgcatgtcctgacctccttggaggctgcctctcgctctcattttcttttctgctcagacacctacagctgtgttggtagctgcccttctaatggcttgggggtgggggagcacagccagggggcacgtagctgggatgagggtgaagaggagtgctatggagaaggggtctcaagtactaaattgaagccgggaaggctcaaaggcaaatatggattctctacagctctgatggaaagccttgctccaatctgaattctggtcttccaagaaaaatcacaagcaatgacaggctctttaatatgggttccagccacaggccagagatcaaacgtcgctgaacc

SEQ ID NO: 14882 - DNA, 536 bp, Homo sapiens
aagaaaaagtatggcttacgtgtttttaccccgtggttcttaattttctattaggacacaggtccattttggatatttgactatgtactatctcccttaaaatgcagccactctaatgtttaaatacaattttagggacttcacggccccttgaagaagatcacggacccagttgtttaatggctgaacaaagcacagaatgcatagacaacttccactgaagcaataataaagcttatatgtataactttcagaccaattaagtgttgcttattttggttacatcgtcgttgctatcataacgagtttactttttaccactgtacataatagggtacctgaaatgatcactcttaaagaaaaaatatgtatagcaattttaggaaaagcaacagaccacttctacactmtgaaccaagataaaaaaaaattatatcaagtgcttctatgcttacccatatgtaacaggaaagtttgacgtttgtacaaagacagttctagtaagtggtagagatgtatgaaatcaaatcaattca

SEQ ID NO: 14883 - DNA, 536 bp, Homo sapiens
aagaaaaagtatggcttacgtgtttttaccccgtggttcttaattttctattaggacacaggtccattttggatatttgactatgtactatctcccttaaaatgcagccactctaatgtttaaatacaattttagggacttcacggccccttgaagaagatcacggacccagttgtttaatggctgaacaaagcacagaatgcatagacaacttccactgaagcaataataaagcttatatgtataactttcagaccaattaagtgttgcttattttggttacatcgtcgttgctatcataacgagtttactttttaccactgtacataatagggtacctgaaatgatcactcttaaagaaaaaatatgtatagcaattttaggaaaagcaacagaccacttctacactctgaaccaagataaaaaaaaattatatcaagtgcttctaygcttacccatatgtaacaggaaagtttgacgtttgtacaaagacagttctagtaagtggtagagatgtatgaaatcaaatcaattca

SEQ ID NO: 14884 - DNA, 500 bp, Homo sapiens
atttaaactttttttcttgcttgcttttctttatttgtattttttatttttgtgggtattcaaatttttgatcattaacaattataggaaaaaataattattcatatgagtttgcaacagctgcttgtatatgttctagtgtctaacttttcaagaatcattccaaatattaatcccaaacataaaagcaactgtttaggaaaaaataaaaccaaaaaaaagttacaagccacgtattttagctataacttcacagaatatggttgttcactgttattacctaaataacctccttttgaacagaaataaggtttatttccacacacatctctcaggatcctaaaatacatcactttatgtactataagtttattaattgcctacaaaggattttagaaatcacatacacatatcaaatatagttattgtgaatatccaaaattagaaaataaaacagctaagtatagcatctttatctgcatagaaacactatttwaaaa

SEQ ID NO: 14885 - DNA, 566 bp, Homo sapiens
ggccaggcaagtcaggccaacaggacatgccacaaagtcaatgccatgctctccttaccctcctcactgggatatgtccagccctccagggtcagaaggcatagattaaaaaattaaaaaattaaaataataataataataataataaaacacgtgggggttagaggagaagagagaagcaatggaatgcagccccttttcaggagcagcatttttacctgcaaaaggcccatattgggagtaggggagatagttaatctttgaattaaattcaacattttatttgtcacataaaaattcaaatctaaactctgcatagccttgatatggatgtccaaaaattcctaatcaaattctgtgtcactttgcaactcttttgtaatgtaatatttatagtgacttgaaatttaatattcctgtttcaacatgctgctacacatgtgacagaataatacataccaaactcagacattctgaagttgaagaaaattgtcattcccattccaggtgtgcaggcgcccttgccttcttatcaaagacatgtgtratcattggtgagagtaaag

SEQ ID NO: 14886 - DNA, 561 bp, Homo sapiens
tgtcttaagccgccaagtttgcagtaatttattacaccagcaataggaaagtaatacaataaagatttatcaacacttgatcttaatttcaccgttctatcaactcgaataactaattcaaggtcatccacataccagaaacacataaatttttaaacaatttgggaggttgtggtagagcagatggaccagccgctgctcctaccagcattcctgtgctcactccctggtggtgaaaaatgagatgcaacattctaattcattaggaacatttagagtccacctggatggtctcatgtgagacctaataagaaactaaatggtcctttgatgtggtgagatgggaaactcaaacaccaggagaagcccattacagaggcttttaatgagctggagtggtgcccraagattgtgctgttctaattcttaaacgtgtcatttctcctaaactagaggtcgttcaaatacatagttccaaaatcctcagtcaagacattaccgagggatacaagacagctaatgagacgttagagaccttgcaatggggctgaagaaaccgag

SEQ ID NO: 14887 - DNA, 561 bp, Homo sapiens
tgtcttaagccgccaagtttgcagtaatttattacaccagcaataggaaagtaatacaataaagatttatcaacacttgatcttaatttcaccgttctatcaactcgaataactaattcaaggtcatccacataccagaaacacataaatttttaaacaatttgggaggttgtggtagagcagatggaccagccgctgctcctaccagcattcctgtgctcactccctggtggtgaaaaatgagatgcaacattctaattcattaggaacatttagagtccacctggatggtctcatgtgagacctaataagaaactaaatggtcctttgatgtggtgagatgggaaactcaaacaccaggagaagcccattacagaggcttttaatgagctggagtggtgcccaaagattgtgctgttctaattcttaaacgtgtcatttctcctaaastagaggtcgttcaaatacatagttccaaaatcctcagtcaagacattaccgagggatacaagacagctaatgagacgttagagaccttgcaatggggctgaagaaaccgag

SEQ ID NO: 14888 - DNA, 803 bp, Homo sapiens
tggaacgccaaatccttgcaatcttccccctttttttcacttatttaggtctgctggttttctgaggcattgttctcaagatgccatgcttttaaggcacctgccataatccctttggtgacgctcatcacattgtattgaaatgagctatgtaacttgtccccaatcagatgcttagctccatgtctaatcaatgtctgtgtcccttacttttacaacataaaaacctggcacaatgaagttggttaattaaaaaaaaaaagttatttgactattgaattgatggttaactgacccaacaataccctagagaaactatagcaacattgaaggtaagagattgcaaataggagctaatgaaacagagagggaaaactaaatcagggagaactccagcagatakgcagagaagctgcttcacttaatctacagaggtactccctgtcctctcagcccatcccctagccactcactgctactgacccatgtaaagtattttgaacagggacaggaacacactaggcagccaataaatgttagctcttcttattagcagaggacttgaatcctgccactaactccctaattctagaaataagttaccttttcctttctgctaagaattttgttccaggctaggcacagtggctcatgcctgtaatcccagcactttgggggactgagatgggaggatagcttgagaccaggagctcaagatcatcctgggtgacacagcaggaccctgtctcttagaaaaaaaaaaaagaaaaagttagccaagtgtggtggcacacacttgtagt

SEQ ID NO: 14889 - DNA, 550 bp, Homo sapiens
gtgtataccatagttacttaaaaagatagatctttcatcaggtactcttcaggtaagtttcttctctcaaaactcatctagaggagcaatcatataacatattctgaagaaaacttcttgaggatactactataattaaaaatattttctttaggaaaaggcctaacattgaagttctgatgaacaattgtcatagattctaagacccagttttgtaaggagattgccttaggagtctggctagattccagggatgcaattgcattaaatcttcctaattcttcacagaagattcaaatgaatacagttttgtaccctgtacttaagtatgaaaagctaccmaaaacaaaacaaacaattaagaaacaacttctgtgtatgaaatgtatatcgatggatggtcgatagatggtccatggaaatgtcattttttataacagggaacaccatttactaaagcagcaaatctttacataatgaaactattatataaattttatataaattatacaaaatggttggtcagataagacagataatctaatatcaa

SEQ ID NO: 14890 - DNA, 549 bp, Homo sapiens
cctatttgagtggattcatcatggttaatatggggcagaattatgtaagtcctgtttgaatcttctctatattctcaggtttatgggatcattaaagggctgatacctctatagctaagtcaggtaaaaycacctggaactccaggcctcaagccaggtccctttaagcagaatggcctagagctgggctggaactggcagcctaatactcagcccattacatgatccactgggctctgccaccataaacacacaggtaaaggccaagcacattttctgctgctgttactgctaaataggaaaatacactttccatatgccaagaaagactttggaaaggtcacctcagccacaaagttagaagtggtattttgttttccttgagtatcaaacagtatatatggcctgtcctttctagcctcatagtcaatgtcaaaagattgtctgttacatatgtttttctttccgtctttctctcctttaagccattctatcattcagctgctttcatttttattataaagtccaattaagtatgataaaatgcaa

SEQ ID NO: 14891 - DNA, 549 bp, Homo sapiens
cctatttgagtggattcatcatggttaatatggggcagaattatgtaagtcctgtttgaatcttctctatattctcaggtttatgggatcattaaagggctgatacctctatagctaagtcaggtaaaatcacctggaactccaggcctcaagccaggtccctttaagcagaatggcctagagctgggctggaactggcagcctaatactcagcccrttacatgatccactgggctctgccaccataaacacacaggtaaaggccaagcacattttctgctgctgttactgctaaataggaaaatacactttccatatgccaagaaagactttggaaaggtcacctcagccacaaagttagaagtggtattttgttttccttgagtatcaaacagtatatatggcctgtcctttctagcctcatagtcaatgtcaaaagattgtctgttacatatgtttttctttccgtctttctctcctttaagccattctatcattcagctgctttcatttttattataaagtccaattaagtatgataaaatgcaa

SEQ ID NO: 14892 - DNA, 1179 bp, Homo sapiens
gataaacatccattacatgtagtttagaattgtatcctagtgcaactgttattatgtgaacatgattaccaaatcttggaaagaaaagattggctcaaatatgaaaaatagrggaatgcataagaatccagagaaatcctttgctaacatattgtcagtatttgataaatttttgtcctaacaccaggctgaaatggaagctcaactcaggtttgcccaagaagaagcaggactcctgatttgaagggtggtgtgggggagggtttctagcagggaatggatgcttaagccagtggtgggacatagatgttacatagttttcctcagtgctataaagaaacatgaaacaaatagcttctccagcaaccagagccaacagactgtcacttctctaaacatttaagctgctttcctgcagttctattttcaaagtaaatgatctattcagctgtttgcttttgttgtttgttttggcaggaaatttgaatagggacagaataatagctaaaattgattgagtacttactgcgtgccacacactgttttgggtagtttacatttaaacatcacaggccataatattggcgttattactagccattttacggatggataaactaaggcacagagaggttaagtaatttgccgaaagggatgctgcaggtaagagctagaactgggatttgcactctggcactatgctgtattgtaatagatccaccgtaacacatatcctcccgtgagtatattttgcaaattgtgaagggaagcaaggggagggagaatggggcattggctctaagttgcttcattatagagagtgaaacggggagaagagattgtctggggttcacagtgttagtgcagacatcgttctggatcctgggtgccgccccctctttagcgcctcactcactggcggatcttagcccaggaagctgagggcaaccttaggccctagaacttgccacccatctgagctcccgtcctcctttctgccgctccttcatgtcctccacttctgagagcagttttgagtcacatcccttgtgggagatgcctcagccctaccctgaaactgaaccctgcccccacatagccccagcaccttgcgtttgagcacaccacttcccaggttgtgcaggcctcagattttgagtacagtgtcgtaatacgtat

SEQ ID NO: 14893 - DNA, 1179 bp, Homo sapiens
gataaacatccattacatgtagtttagaattgtatcctagtgcaactgttattatgtgaacatgattaccaaatcttggaaagaaaagattggctcaaatatgaaaaataggggaatgcataagaatccagagaaatcctttgctaacatattgtcagtatttgataaatttttgtcctaacaccaggctgaaatggaagctcaactcaggtttgcccaagaagaagcaggactcctgatttgaagggtggtgtgggggagggtttctagcagggaatggatgcttaagccagtggtgggacatagatgttacatagttttcctcagtgctataaagaaacaygaaacaaatagcttctccagcaaccagagccaacagactgtcacttctctaaacatttaagctgctttcctgcagttctattttcaaagtaaatgatctattcagctgtttgcttttgttgtttgttttggcaggaaatttgaatagggacagaataatagctaaaattgattgagtacttactgcgtgccacacactgttttgggtagtttacatttaaacatcacaggccataatattggcgttattactagccattttacggatggataaactaaggcacagagaggttaagtaatttgccgaaagggatgctgcaggtaagagctagaactgggatttgcactctggcactatgctgtattgtaatagatccaccgtaacacatatcctcccgtgagtatattttgcaaattgtgaagggaagcaaggggagggagaatggggcattggctctaagttgcttcattatagagagtgaaacggggagaagagattgtctggggttcacagtgttagtgcagacatcgttctggatcctgggtgccgccccctctttagcgcctcactcactggcggatcttagcccaggaagctgagggcaaccttaggccctagaacttgccacccatctgagctcccgtcctcctttctgccgctccttcatgtcctccacttctgagagcagttttgagtcacatcccttgtgggagatgcctcagccctaccctgaaactgaaccctgcccccacatagccccagcaccttgcgtttgagcacaccacttcccaggttgtgcaggcctcagattttgagtacagtgtcgtaatacgtat

SEQ ID NO: 14894 - DNA, 491 bp, Homo sapiens
caatacatattctaagaaaatgaatttttctgccattgttaaaatatcaatatttcatatcaactatattaaggaatayttgtgtatccatttgtaacattttataatatattataggtgactaataagtatgttttcaagagtaaagtattctgttaatttttttggagcttgtcttcaataaactgcctatgtgctattactgatatcctcctggacaaggacaaatttaggaagaaaacttaaaaacaaaataccatgagaacacatggacacaggaaggggaacatcccacaccagggcctgttgtggggtggggggaggggggagggatagcattaggagatatacctaatgttaaatgacgagttaatgggtgcagcacaccgacatggcacatgtatacatatgtaacaaacctgcatgttgtgcatatgtaccctaaaacttaaagtataataaaaaaaatcaaaacagtaacagcctttaca

SEQ ID NO: 14895 - DNA, 491 bp, Homo sapiens
caatacatattctaagaaaatgaatttttctgccattgttaaaatatcaatatttcatatcaactatattaaggaatacttgtgtatccatttgtaacattttataatatattataggtgactaataagtatgttttcaagagtaaagtattctgttaatttttttggagcttgtcttcaataaactgcctatgtgctattactgatatcctcctggacaaggacaaatttaggaagaaaacttaaaaacaaaataccatgagaacacatggacacaggaaggggaacatcccacaccagggcctgttgtgggrtggggggaggggggagggatagcattaggagatatacctaatgttaaatgacgagttaatgggtgcagcacaccgacatggcacatgtatacatatgtaacaaacctgcatgttgtgcatatgtaccctaaaacttaaagtataataaaaaaaatcaaaacagtaacagcctttaca

SEQ ID NO: 14896 - DNA, 491 bp, Homo sapiens
caatacatattctaagaaaatgaatttttctgccattgttaaaatatcaatatttcatatcaactatattaaggaatacttgtgtatccatttgtaacattttataatatattataggtgactaataagtatgttttcaagagtaaagtattctgttaatttttttggagcttgtcttcaataaactgcctatgtgctattactgatatcctcctggacaaggacaaatttaggaagaaaacttaaaaacaaaataccatgagaacacatggacacaggaaggggaacatcccacaccagggcctgttgtggggtgggggraggggggagggatagcattaggagatatacctaatgttaaatgacgagttaatgggtgcagcacaccgacatggcacatgtatacatatgtaacaaacctgcatgttgtgcatatgtaccctaaaacttaaagtataataaaaaaaatcaaaacagtaacagcctttaca

SEQ ID NO: 14897 - DNA, 517 bp, Homo sapiens
aagagaaaaaggggagagaatgctaatgagtatgaggtttctttttggggtaactaaaatgttctggaattagatagtggtgatggttgtgtaactttgtgaatagactaaaaaccactgaattgtttatttattyatttttgagacaggggctcaccctgtcgcctaggatggagtgcagcggcgcaatctcggttcactgcaacctctgcctcccagttcaagtgatcctctcacttcagcctcctgagtagctgggactacaggtgtgtgctgccacacccagctaacgaattgtatagtttaaaagcatcaattttatggtatgtgaattatatctcaaaagaaaacatcatgaccatgagaggaaaaaagaatattggaatatgagaacagcacacagagaaaaacacatttcaattatgtaaactgcataatcctccatgtaaaaactagcttacttctggataatacagttccactcagggccttttttgccatgataatgtattattta

SEQ ID NO: 14898 - DNA, 601 bp, Homo sapiens
aaatcaaccatcattatccctcaagaaaaaagctagtataagtagtatgtttatgaatgagaagcagagaaactgggattagtccaagtctgggcagacaagcttcatgaggcctaaagcatataaatgtgtggaagggaaaagaaggggtattctttaagaaacatcatgtaaaattccaaatacaaaactagatataaacatgaatatttattttgaatgaaaagagaaatgatagtaaactaaaattttataaagctaatgcattctgcaaacattagaaaatacagaaaactaaaatagtaaaagaaaataatatttttattaactgcctgacataggcaattaatattgatatacctctataatatttttgccacagattctttgattgtatctttatatggcaattattttatatttttttcatagtaaaaatagwtactttagtttttcttctagcatggttgattaaaatttgctttttattaatgatggtttagaaaagttacctgcaacattacagtgtgatattgctattgtcatgtaactttgtaggatttttgttaaatttggggaactctctatcaagtttctttca

SEQ ID NO: 14899 - DNA, 601 bp, Homo sapiens
aaatcaaccatcattatccctcaagaaaaaagctagtataagtagtatgtttatgaatgagaagcagagaaactgggattagtccaagtctgggcagacaagcttcatgaggcctaaagcatataaatgtgtggaagggaaaagaaggggtattctttaagaaacatcatgtaaaattccaaatacaaaactagatataaacatgaatatttattttgaatgaaaagagaaatgatagtaaactaaaattttataaagctaatgcattctgcaaacattagaaaatacagaaaactaaaatagtaaaagaaaataatatttttattaactgcctgacataggcaattaatattgatatacctctataatatttttgccacagattctttgattgtatctttatatggcaattattttatatttttttcatagtaaaaatagatwctttagtttttcttctagcatggttgattaaaatttgctttttattaatgatggtttagaaaagttacctgcaacattacagtgtgatattgctattgtcatgtaactttgtaggatttttgttaaatttggggaactctctatcaagtttctttca

SEQ ID NO: 14900 - DNA, 536 bp, Homo sapiens
gttaggtcaggtgaaaacttaacaaaatgtttgatttttgtaatacttttgtttttattcttttaaataaaaaacaataaaagcaatgattaagcgtctgttcctcattataagttctaacaacaacaacaacaacaacaacaaatccatctccaaatgtgagacaggtttgagagaggacagaaagagaagaaggatgacgggaaagattaggcattttttattatcaccggtgaaaaaggaaacgtagttactaagaaaaacatgcaggagatacctttaaccttcctgctaatgtcatttaatgtaaactcataataattttatgttcttytcatttgcattatttcatgttcatatgtcccactttattttgttttatttttaaggagttttgagtcagagtcttgctctatcacccaggctggagtgcagttgcacaatcacagctcactccagccttcaactcctgggctcaggtgatccaccctcctcagccccccaagtaactgggactacaggtgcatcagcacact

SEQ ID NO: 14901 - DNA, 552 bp, Homo sapiens
tgtctttggccttttgtgacctcacctagatagttatagctctaattttgttagtctgccttcctcactaatccaggcatctttatatcattacctccacacctgctgaggtgtcctgctgtgtgatacatagctcaagaactctaatatgaaaggggaaattgtccctataaaacctgatgtctgacaacctagattataattttcttgagacagaatctcactctgtcacccaggctagaggacagtggtgatcatagctcactgtagccttgaactcctgggctgaagtgatcctcccacctcagcctcccaagcagctgagactacaggtatgcaccaccacactggctatttttttaaatttttttgtagagacagagtcttgctatgttgcccaggctggtctcaaactcctagcctcaagtgatcctcccacctcggtctcccaaagttctgagattacaggcatgaaccactgcacctagcctataatttttttatgttagaacttaaastcacattaggttattaaacatgaaattgatgaca

SEQ ID NO: 14902 - DNA, 666 bp, Homo sapiens
gttgaatgcttccacctacctaaataccacaattagaaacctaggagccactgtgcctctttccttctctttgtcttctgcatccagttcatcatcaagtattgtcagttctgtttcttcaattgccttttatttcttctgccacagcatcagcttatcattatctgaagcttgaactattccaacaacaatttggagtcagttccatcttagctatgttttctcctttacaattaattattcaatgtagttaaagggatggtattcctaaaattaaaacttagccatttcattccctattcaaaacccatgagataatattgttactttcctaaataaggcttctaaartcattcatagttcaagcttccaatataatctttaattgcagcccattctctttaccctgattccccttcctttccacactcgttttcagatgctatactgaatttctttaggagtcactcacacaccaggacatctcactgccagactcttcacgagctcatttctcttcttcaactcattcttttttttttttttttaaaacagtctcgctctgtagcccaggctggagtgcagtggcatgatctctgttcactgcaacctctgcctcctgggtccaggttcaagagattctccagtctcagcctcctgtgtagc

SEQ ID NO: 14903 - DNA, 517 bp, Homo sapiens
atcccttggtctaaaataggtgacttattttgataatagatagatgctaagtgacttagtytggtgggtaatggagagcttttagagtaaagagtcatttggaaggtagtctgaaagcattcctgcaatccctctcatatgtcccccaaccccaaatctctaataaacattttgtcaaagagtagaagagttatttaaacttgaacatatataaaattaaagaacaatgagatcttaatatctgtgatcatgtgaatagaatgtacgtcttgactgttttaaaccagcagaacttgcagtaatcaaccaagcattatccaaaaaaagcagctgaagcactgaaagaaaaaagcatgcaaattcttattccagctctggaatcaatatgttccatggattcaataatattagactttcttcatagtttcttgggaacattaaaaagaattgtatacaacagtgccttaaaatctacaaaagaatcattcaaaaattttaaactgttattaagaaagcc

SEQ ID NO: 14904 - DNA, 516 bp, Homo sapiens
ctcaataagaaatgcaataacattttagtaraaaacaaagacaattagtatccaatcacaagagaaaatacaaatgacaaatacacacacacatataaataacctcactaggaataaaaataacacaaattaaatgatacatcccttttacctatttttaaaaaaaggatcttgaaattgacaaatcacaatttagttgtggtatgttgaaacagacactatattgctggtgctatggagtgtaaaacctccttaaaacatttcaagaaagcaatttggcaatatatttcaggagttttagaagtaatcctgtcttttggttcagcaattctactctagtgtgctatctgaagaagaaaaataaaaaatatgtacaaaagtttctatagaaggaaagtcattgtgatttgttataacagcaaaacagaataaaacaaaacaatcaaaatgtccagcaaaagaagggtatggaatataagacacattcacatgacggtttattgtttaaccattaaa

SEQ ID NO: 14905 - DNA, 704 bp, Homo sapiens
aactccaggggaggactgttagggatatgtattgggtacttttcaattcagccccaaagatccacacattcttaacccagaaacagaaaatatgtattttttcaaattagtactgtttccttattaatgagcaacttttatttctatgtagtgcctaggtactaactaacatggcattatgagaatagtgaaagttcattataaataactggttatgactaacaagatggcttaactggtatcaccatatttgctatttaaatttgtcaatctcaaatgtcttcagttatgcaaatatattctgttactaacaagattctacttaaagtttagtctacttcggggaaattatgtgctagctacagccattttatagaaaagatgacacaaaattaaagcaaatttacagcaagtatagtcttttttactggtgcatctattcactyaacatatttactgcccttagaaaacacattgggaggctatgaacatggtggaaagagcgcaagcttttgggctagaagatctgggttcaaatactgttcttccacctatctgtgtgactacagggaagtatctctattgcctgaatcttggctgccttatctggaaatggccttttaagatctaccttataggactgctacaggattaaatgagataatatacgcaaagccttcacaaatcacctgccatatggtaca

SEQ ID NO: 14906 - DNA, 704 bp, Homo sapiens
aactccaggggaggactgttagggatatgtattgggtacttttcaattcagccccaaagatccacacattcttaacccagaaacagaaaatatgtattttttcaaattagtactgtttccttattaatgagcaacttttatttctatgtagtgcctaggtactaactaacatggcattatgagaatagtgaaagttcattataaataactggttatgactaacaagatggcttaactggtatcaccatatttgctatttaaatttgtcaatctcaaatgtcttcagttatgcaaatatattctgttactaacaagattctacttaaagtttagtctacttcggggaaattatgtgctagctacagccattttatagaaaagatgacacaaaattaaagcaaatttacagcaagtatagtcttttttactggtgcatctattcactcaacatatttactgcccttagaaaacacattgggaggctatgaacatggtggaaagagcgcaagcttttgggctagaagatctgggttcaaatactgttcttccacctatctgtgtgactacagggaagtatctctattgcctgaatcttggctgccttatctggaaatggcyttttaagatctaccttataggactgctacaggattaaatgagataatatacgcaaagccttcacaaatcacctgccatatggtaca

SEQ ID NO: 14907 - DNA, 426 bp, Homo sapiens
gcagagattgtagtgacccaagacttcatcattgcgctacagtctgggcaacagagggagactgtctcaaaaataaataaatacawaaataagtgggagggagtaggataactgaaatattaatgtgagttttgagcttcctgttttttcttcccaagtgtgaagcagataaccagacctttatattcccttgcctcagtagagatctgtaatacagaagaaaagcagaattttcccaaagacttctctcttccaggttttcgttcctcaaaaatctgagctcctaaactgttgatgctcagggtgagctctgagagaaaaggcaggcaagatagagcctattattatatatttggatttaaagaaaataaaataatgctctgtcaaaatgcatttatagagtgaagtgcatatccgctacaggtg

SEQ ID NO: 14908 - DNA, 550 bp, Homo sapiens
ggagtggccagtcaaatccatggaggatggcctcagcttcagtcttaggtggagctggagaccttgtcctgaggggctttttggcagaggaggcagggaggggtgaggacggaggagaggagaacaggtgagagcacccagccyggtggcctcgatcttctgaggccccagaaagcggattaccctgcaaagcccctcgagctgacttcccaaatccctaattgtgcttctctgtcacagggagggttaaccccacttacataagggccaggccccgccccctgtccccttaactccatgatccttctggaagcttcacgctccgcccgcttccccttggggtctaaggctggaccaaccccaccccagctcatcctgaggtgagctctggtctgctggggacaagtggtcccctccaggacaacatgggctttcagctctgtcccgggcagggagggggctggcaagtgggcctgggggtggaggagcaggcaagaaaaggctgctgagtgtgaccttctcagtaaccccaagaatataacaatatcag

SEQ ID NO: 14909 - DNA, 557 bp, Homo sapiens
tgcactccagcctgggtgacagagcgagactccacctcaaaaaaaaaaaaaaatttctatatgcaatttttattagcttttctttgtgtatgcatgtgtgtgtgtgtgtatggggcggggggtggtgaggatcaatgttagactcttttagttaaaaaaaagaccttttcccctctctgctctgagacagcttaaattatattgtaattatgtatttaaagagttggtacgttttctctgtgaaactatttatgtctgatgtttttatgagaggaagttcttagacaactctcctatctcttcttctttttaaattagtctgtttggccaggcatggtggctcatgcctgtaatcccagcactttgggaggccgaggtgggtggatcacttgaggtcaggagttcgagaccagcctggccaacatggtgaaaccccgtctctactaaaaatacaaaaattagccrggcacggtggcaggcacctataatctcagctacttggaaagctgaggcagaagaactgctggaaccggggaggcggaggttgcagtgagctg

SEQ ID NO: 14910 - DNA, 571 bp, Homo sapiens
gaaacaaccttgcagatatcaaccacaataggacaaayagatatcatatatctcctgataccacacaatgaaaaatcacagcatttcttctgtgatgtttcatgccaaaaatgtgtaatctgaatctaatcatgaggaaatataagacaaactcaaatggaaaaacatgctctaaaaaaactgacctatgttcttcaacaatgccaatgtcacggaaactaagaaggctaaggaactgttcttgattaaaagagatttaaaaggcataacaattaagtgtaacaaatatcttgttaaaaaggaacaatagtgggatgaatggtggaatctaaataaatctgggttaagggatacggtttatttgtacttctcttgcaacttttctataacactgcaattatattatgtcaaacaaaaagaaggggagaggagggaatggaaggaaggcaaaaccaaaatgaaacaaaaagaactgatccaggacagtgagacaattacagctgctagaacaagttggtagagagtaatgaaaaataaggctggacagtagtgtagcagggaccatgaaagt

SEQ ID NO: 14911 - DNA, 535 bp, Homo sapiens
taagtttgtattgtagatgatgaaatgctatttttccaatcacttatgcatttatttaagtatatatgtatctgcatatttgtgcgcacacacacacattatcttttctgagttacccagaataccttgctaaaaactagacacatggacagtttcaacttttcaacttcagccatttttagttatctgtgtatttttttaaatcctgaaattgctttcaaagtggaaaaattgtgtgggcttttttcatcttttcataactcaaaaacgacttaatatgtttttctcaaactttgcaaaaaaaaaaaatcacctttgggctgaaaccaagcatggaaaatttcaccacaaagggctaattttttggaaagctgcaagaaagtgaaaacrggtttataatagaacattcttcatgcatgttaatacttagtactttatctaatgcatttcatctgagaatttctgaacacttttcagatttaaatattgagccattttaatatttgtgtaccaatgatatattgtcagatatcga

SEQ ID NO: 14912 - DNA, 992 bp, Homo sapiens
gagtttaaatccaacttccattaaatgttgaagttgagatgacaacttggatatctagtctctgatattattattcttttctaagagtcaatattattgaaaaacagcatctcagaggcagggagtataatagtttctggctcagtctcagccaagacctcaccgtataggagaagttttatataccagacattctgaggggttatcatgggaataatagcttgtgttcccattacacatgtacaagctcatcatctttggtcaaaattgtaatcccagcatgaattcccctcgaagctctggttcatctttctttggtcccagtggtcagtgttcaaacatcaaataataagagtaagccaaatacagttaggaaaagaaatttactgtgaagaaacgtaaaaaccttttgtcacggaggtcctttgccagaggtttggcttatattgacaggattgatcatactgttgttggtttctactcctctaaaaagcctgtaaaaatatatctcacagaatatcgattttctctattcacgataattcatgcataggttagtaaagactctcctttatgaagaatataactaggatgactaccccgttaaaatatttttattattattttttaagagatgaagtcacactatgttgcccaggctggacttgaactcctggccttaggggatcctgcctcagccccctgagtagctgggactataggcatatgccaccacacctggctttacccccataaaatttcatactctttccatgatgagatcttyttcacatcagagggcatcaggtttagactgaacagacaaaacctagtagagacatttttatctcccagaaacacaacccaataaacctttagtttcctgtgtttgactaggaataaggttaatcagatggaatcaaaatatgaatttccacataatgaattttgacctcttgaacaataaaaattcattgtagcatggtcaggca

SEQ ID NO: 14913 - DNA, 535 bp, Homo sapiens
gcttattataatttcactctagattgaatatcttttatttttcacctgacataaaagtctcttgttataaggcttcataactacctcttcctcacaaaaaaatacatacacatttcataagtctgtgaacttatgtggggaaaataatttttaataaatatgtatctgtccctcacaacttcatggtgtggctaaagcattttgaagcacatgcttgctaaaatggcaaatgtatcataaaccttcatctctgccttggcatccattggatgaatggctgttttcatgtatgtcaacatgaaaggtaatgtccacagtttaaaaaaatacatacatcgtttacaattttagtacccaatcctccccatgctcccaagttctgagttcatacccctgaatgacagaaaaaatatatagtctttaattttaaaagtctcttaaatccatttgccaattttaaggatagaagaggtaaaaaaagaaataaaaaaagaaaataaaagataggaaggaagggaagggaagggagggraag

SEQ ID NO: 14914 - DNA, 1571 bp, Homo sapiens
  misc_feature (1)...(1571): n = A,T,C or G
ttgtatttcaggactattgtctattattggaataaataagaaaaaaggtattcagaaaaggttttttttgtttgtttgtttgttttttttgagacagagtctctctctgtcccccaggctggagtgcagtggcccgatctcgactcactgcaagctccgcttgtangggttcacaccattctcctgcctcagcctcctgagtagctgggactacaggcgcccaccaccacgcccagctaattttttgtatttttagtagagacggggtttcaccttgttagccaggatggtctggatctcctgacctcgtgatccgcccgcctcagactcccaaagtgctgggattacaggcgtgagccactgtgcccagctgaaaagatttttttgaaggttgtttttaatagttcagccccctgttagtggctacttttaagctttgaagtatacgtacactaattcccaaactaaaattggtggtatctgttttagagttattttaggggcctaatgaagagccttctacgaactggacactctactgagccccatgggaataaggatgtgtctgagaacttcagagtgccacagtctggtagaaatagtcaaattagtctgtgataagtatttacaccaaatcctttaccagcagcaaagaaacagacatctgctatacaacagagttgggtgggaaggggtagaaatgtggaggttcaggcaatattaataaccctagcattggccggatgtggtggctcacacmtgtaatcccagaactttgggaggccgaggcaggcggatcacctgaggtcgggagtacgagactagcctagccagcatggtgaaaccccatctctactaaaaatacaaaattagttgggtgtggtggcaggcgcctgtaatcccagctactcgggaagctgaggcaggagaatcgcttgaacccgggaggcagaggttgcagtgagtgaagatcacaccattgcactccagcctgggcaacagagcgagactccgtctcaaaaaataaaataaaaaaaaataggccaggtgcggtggctcaggcttgtaatcccagcacttcggggggccgaggtgggtggatgacgaggtcaggagttcgaggccagcctggccaacacagcgaaaccccgtctctaccaaaaatacaaaaattatctgggcatggtggcaggcacctgtaacgccagctattcgggaggctaaggcatgagaatcacttgaacccgggaggtggagtttacagtgagccaagatcgtgccactgcactccaccctgggcgacagagctagactcagtctcgagaaaacaacaacaacaaaaacctctagtattgattgagcttctcttctgagccagagtgcaaggctctgaaaggtgactgaaaccaacctggccattgttgtcatagaacctgctaattgaggagatgaaattaccgtaagattccaaatacatacaaaattacagattcaaatgattttttttttgaaggactagaatgacagaatgacaagaagaatctcttttagggttactcttaggaaatgca

SEQ ID NO: 14915 - DNA, 941 bp, Homo sapiens
ttatatatatacacacacacatatatactacatagtatattataatatattcaggaacacctctatgaggtaaaacaagcacatcttcattgcacactcagtctaggtggtgactgatctctctttgcctctgcctggtaatttataaaataaagtactggacctagagtctgtaatgcccaaatcccgtggtagctgatggcttcaatcacttaatctttcaccaaaggggcatcaacagcagaaaataaactcatttttaaaatcacgtttccttgtcccatgacctagaaaaggagcaaagatccaaagtgagtaatctgcttttgtgatgttagccagaaccaaatttatctcccttgtctttcttaagtttagcacctgaacttgattattgtatcattctaattttaatcctagttagagtgagttagttctacccaattttagttgcttaaatggaaaaagtggaaatagcggcagaagttaaaggagwttatcaaggaattggacgtattggatgagatagggagaacaggaagggaatgtacttattcatttactcaagggtgagtcctcgcctctgggctctgggcagtacattgtctgatggcacaaggatggacacactccgacccctggcacttgctttccaggctgccggaagacagcaagccagtaaacaagttgtggtctgtagcaccaggtagccataaatgccatggagaaaaatagagtaagagaaagctgtgggagtgggaatcagagaaagcaatttgttcatacttggagtgacattgcttctgcagcaagagtgagatagagttacagccatcataaattttatagattagcaaaaacaaagttaaatcttaatcctggtattgcgttagtgaaatggaactggattgctattatcattttaattttaattctagtta

SEQ ID NO: 14916 - DNA, 941 bp, Homo sapiens
ttatatatatacacacacacatatatactacatagtatattataatatattcaggaacacctctatgaggtaaaacaagcacatcttcattgcacactcagtctaggtggtgactgatctctctttgcctctgcctggtaatttataaaataaagtactggacctagagtctgtaatgcccaaatcccgtggtagctgatggcttcaatcacttaatctttcaccaaaggggcatcaacagcagaaaataaactcatttttaaaatcacgtttccttgtcccatgacctagaaaaggagcaaagatccaaagtgagtaatctgcttttgtgatgttagccagaaccaaatttatctcccttgtctttcttaagtttagcacctgaacttgattattgtatcattctaattttaatcctagttagagtgagttagttctacccaattttagttgcttaaatggaaaaagtggaaatagcggcagaagttaaaggagtttatcaaggaattggacgtattggatgagatagggagaacaggaagggaatgtacttattcatttactcaagggtgagtcctcgcctctgggctctgggcagtacattgtctgatggcacaaggatggacacactccgacccctggcacttgctttccaggctgccggaagacagcaagccagtaaacaagttgtggtctgtagcaccaggtagccataaatgccatggagaaaaatagagtaagagaaagctgtgggagtgggaatcagagaaagcaatttgttcatacttggagtgacattgcttctgcagcaagagtgagatagagttacagccatcataaattttatagrttagcaaaaacaaagttaaatcttaatcctggtattgcgttagtgaaatggaactggattgctattatcattttaattttaattctagtta

SEQ ID NO: 14917 - DNA, 551 bp, Homo sapiens
tggggtttcaccatgttggctaggctggtcttgaattcctggcctcaagaggtccacctacctcggcctcccaaactgctggattatagatgtgggccacgcgtggcccaactctactatttcaatgcagctcctgtaccctaggtcatcactgacttcccagttgctgaatccagttgtctttactgagttggtccttaatttaacttwcttttgcattgaagctactgactgaccacagcattttgaaactctgttcctcttattactgtgattctactttccttatttttcatcttatctcttaagtctgtggcttctcagacttcctcacaattgattgcttattttaaaaattcaaaaatttaaacctcccgagcagttcaaaaacaatatacctttgaaattttttaaacttttcagagttgcaagaatagttcagtgatcaccaggtgttaccattttgccatattttctttgtctctgtgtccctccctttctacctgcccccacatatatgtgtatctatgaatattgacattttttaacat

SEQ ID NO: 14918 - DNA, 1481 bp, Homo sapiens
caaactatttctgtgcattttcagcaaactgaagtatcgcttgttattttatatgcgaaattattayacttatttatactcaaagcactcatattaactccaagttttatactattgtgttgaaaaggggaatttttacttcaagatgtgctgtatgatgtgcatttgaatgatatatgcatttaaacttactgagtatgcatcttccttctcatgaagggttccagggtttcaggtttatcttaaatcatatttgtattctgttatagtaaaaatacaataacttattttacttatagtaaaaataagtgtagtgtagctttctacttgatactttattgccttggggtatataaatcatgtcatctgaagtagtagaaattatgtttttccaactactatctaggaatatgttttcttttataatgcaataacaatttcaagatgatgcttgtcactcctttcactattattagctagcacatggttcagaactttcacacacattgtggcttttagacttctaacttttttctttttttgacatggagtctcgctctgttgcccaggctggagtgcaatggtgctatctcgtctcactgcaacctctgcctcctgggttcaagcgattctcctgcttcaacctcccaagtagctgggattacaggcacctgccaccacgaccagctaatgtttttgtatttttagtagagacagactttcactgtcttggccaggacggtctcgatctcttgacctcataatcctccctcctcggcctcctaaagtgctgggattacaggcttgagccaccgcgcccggccctagactcctggcttttaagtaaatcagagatacatgtttacatgaggacttgttgcttatctctacttagaaaagcactacatttttcttgactatttatgggaatcatattgaaatgttattttactagaaattaggaatgacctctttaaaatgttttcagatgttaatattaaaagattaaaaacccattttcaaccatgaaagctatagcttactcattggcaaatgacaaaaattctgaaaatcaaatattttatattcattgattactaattattgaaatgtgagctatgtcctcatttgatattagtaatcagttatcagctagtaattctttgaagttcctggctatttgttaacttcatttattcaaacacatttattacattgtcaggagtatgtctagaagtcttattttctgcattctgtgcctatttctgctaatgacagcaaccccaatgtaatgataccagtgccctgaacttttattaacacataaaacatttgttaaagataaccttccataaaattgcactgaagattataatagaaaaatgagatagtcctacagatttgaaagtaagggtcaactaccaggtagccatatttagtaaagtgttcttcagtaacacaacagataaaacatgttaaaa

SEQ ID NO: 14919 - DNA, 547 bp, Homo sapiens
tggcagaaggcgaaaggcatgtcttacatggcggcagacaagagaagagaatgagagccaagtgaaaggggaaactccttataaaaccatcagatcttgagagacttattcactaccatgagaacagtatgggggaaactgcatgttttcagctctctctcaccgggtgccttccacaacacgtagggactatggaagctacaattcaagatgagatttgggtggggacacagccaaaccatagcagactcctttctgctgttcccctccctggtcatgtgactcayatgccctgcagtgaatcctaacagcagcatgagagcacagcagccagaatccccccgggttggacaccctgtgatggcaaggttaaggggtcacccgacagtcagagaggaaaagagcaggtgagtgtctcagatgcgcacacacccagccacctgttgggagtggacatgagcagggttgggcgggagaggtagtgtgtgaaggtgtccccaagtatcctctgcctggagccaggcaagaaaggtaagaagtcacgtgt

SEQ ID NO: 14920 - DNA, 531 bp, Homo sapiens
cacttcaaaaaaaaaaaaggtcacagccttttatgttaggcccctcatcttcaggaaagggattttcactaatgttttctaagggcctctgccactaggcctcctcaactctctgttcctactcccaccattctctccctcctgacttttatacaatttcagccctgctcattccagctggtagctatccaaattcctacagctcctcccagtttctgtcttgcctatactaaacaagagataaagatactatctgataagatctctcacctttaaggaatcacttttaagatgaggaaacccctcaactttaaggtagcagatttccagaatccagccacaggcccccaagcaatttcctatacctcctcttacgggtaatttctcctggatttcaactgctttggggcaatccttacatatatttgataatctatgaattatgcctaccttttgttttyccaaaaatgaagtttgtagttgctttgccccactctgcttatgattttgtaggattttcttgatacaggt

SEQ ID NO: 14921 - DNA, 802 bp, Homo sapiens
gactgcacatttaaacaatttttaaattaattgctgtaaatcattaacgattgagtttctttaaatctgtccaatctcaagtcatttttatttgccatttccagggaatgtgaaatgggactaatttacctctgattcttctttatactgaggatagaaattttggtcctagctttagggaggagctcctgtgtgatgccgtatattgggaaaaactatgtatttctttactgtcctatgtgatgtatgacagtaggaatctgcactcattcattttggtacatgtccgtagggcaaaatcagtttcggtgtttaggaatattttgtctgatgcctgcattcccatgsttttgaccttttttgtgtgaacatatcacttttttcacaaatatcactatttgtgaacattttacttttttttgtgaacataccaatgcttcagttttttttagtaatcaactatattatgagaaagagaaaaattttgataaaacacaaatttcatgttttcctactctaattggcctttacataaaaatacaggtaaaatttatttgtgcttttttgctatttctgttttgctattctctgtttgtctatgtcttctccacatagacacaattggggaattttgtacactcttgtgccaactgctttgatagtaacaaaatgtatttctcgaactgctaggtataaaactcaagtatccacaatttaaattctttttccctcacttctactatgtttccagtctcaatagaaatcgagccaatccagaaatacaagcattattctaatactt

SEQ ID NO: 14922 - DNA, 802 bp, Homo sapiens
gactgcacatttaaacaatttttaaattaattgctgtaaatcattaacgattgagtttctttaaatctgtccaatctcaagtcatttttatttgccatttccagggaatgtgaaatgggactaatttacctctgattcttctttatactgaggatagaaattttggtcctagctttagggaggagctcctgtgtgatgccgtatattgggaaaaactatgtatttctttactgtcctatgtgatgtatgacagtaggaatctgcactcattcattttggtacatgtccgtagggcaaaatcagtttcggtgtttaggaatattttgtctgatgcctgcattcccatggttttgaccttttttgtgtgaacatatcacttttttcacaaatatcactatttgtgaacattttacttttttttgtgaacataccaatgcttcagttttttttagtaatcaactatattatgagaaagagaaaaattttgataaaacacaaatttcatgttttcctactctaattggcctttacataaaaatacaggtaaaatttatttgtgcttttttgctatttctgttttgctattctctgtttgtctatgtcttctccacatagacacaattggggaattttgtacactcttgtgccaactgctttgatagtaacaaaatgtatttctcgaactsctaggtataaaactcaagtatccacaatttaaattctttttccctcacttctactatgtttccagtctcaatagaaatcgagccaatccagaaatacaagcattattctaatactt

SEQ ID NO: 14923 - DNA, 526 bp, Homo sapiens
ctgtttctccaatacagttgcaaaccctgaagcagctcaatgtactgcatattaatgggctttcagatattctccaggaagttattagaaaagggttggcaatgagctctgattactgtaatctgataatctccagtggaaagcattaacaatatgaatttcgagaagttaacaaatctctcaagaccaggggaaatctgatagtccaacacggggaaaataaaaacaatatgttttgcgaattactcttcttgtattttgcttttggaggtcagatatttcagaggrgactttttaaagctgaaaattaaaatccagtagattttattaaaatagagaagcttttataatattttatgaaaatagaatgttaaataggcaatggctaaatgtaactacaatttaactattactgaatgtcaaatcaagtgagtcaaaacattgcaaatattaggataaattttagaacctaatttaggactataattcacatgtaaatcagattttaactcaattttaattcagt

SEQ ID NO: 14924 - DNA, 543 bp, Homo sapiens
ttacagatsaagacaaggactttttgatgctagacagcttacccaaagttatttagctagtgactgataaagacaaaattctattctgcatcaccttcttgccagagtccaattccttttcagaatattcggatccagatagtttaataaatctgctaactgaatcttcaatcacagtgaactttcaaaagaatctttaaagggcactacttcaaaaatagaaacttattggctcattgttaaactataattctttcataataattatcttaaatatcaataaatgtctacatgatttttttttgctaggcaactatttccaaacgctgtcttctttcaagacacgactttccacatctacagttcactaaatgtactctcaaatgtctataatgacctgctaaattctgcaatcccacaaactcttctcatagctcatcttctttgacttctctgctgaccacaccctccttcttgtcatgcctccttggatttcatagcactaccccttttctcttcacctctttatcttttcattcttag

SEQ ID NO: 14925 - DNA, 543 bp, Homo sapiens
ttacagatgaagacaaggactttttgatgctagacagcttacccaaagttatttagctagtgactgataaagacaaaattctattctgcatcaccttcttgccagagtccaattccttttcagaatattcggatccagatagtttaataaatctgctaactgaatcttcaatcacagtgaactttcaaaagaatctttaaagggcactacttcaaaaatagaaacttattggctcattgttaaactataattctttcataataattatcttaaatatcaataaatgtctacatgatttttttttgctaggcaactatttccaaaygctgtcttctttcaagacacgactttccacatctacagttcactaaatgtactctcaaatgtctataatgacctgctaaattctgcaatcccacaaactcttctcatagctcatcttctttgacttctctgctgaccacaccctccttcttgtcatgcctccttggatttcatagcactaccccttttctcttcacctctttatcttttcattcttag

SEQ ID NO: 14926 - DNA, 536 bp, Homo sapiens
caagtaaagaattgagcacaaggaagtcaggtcaattgtcctatggcacaaagctagtagctagtgcctctgggcgtcaatcaaacctctgcagtctagctccggagcccatgctcttagccctcaggcgggccacctctccatcacttgtcttattgatttaagaggttggcaagcatgtatttcttctcagatagattttakatccattaaggtatccatctttacatcttctccatcttgcaatatcacagtatctaatacacagagcctttcaaataataatctaagataatttattttaacaattatttatttatggaacatcagagctgatttagaccctagagacacctattcttttgaagaaagcagaacacttctgcttaagaaaacttacccagtgtgtggatggaccaataataaaaaggaatgtaaaaattacagtaaaagaggacattaggctagaaatgaggagggcggtagaatttaaataagtaggacaaggtcacattcgtgctgtgaactgaataaca

SEQ ID NO: 14927 - DNA, 522 bp, Homo sapiens
tattattattattattcttttgagacaggatctcactctgtcgcccaggctggagtgcagtggcrtgatcttggctcactgcaacctccacctcctgggttcaagcgattctcctgcctcagcctcctgagtcgctgggattataggcgcctgccaccaaacccggctaatttttgtatttttagtagagatggggttttgccttgttggccaggctggtcttgaactcctgacctcaagtgatccacctgcctcggcctcccaaagtgctgagattacaggcatgagccactgtgcccagcctatctgtcaatgattaaaaataaaaattagaaactaaaaaaaattgttaaagaataattttaactagggaaaatttgttaaaattaggaaagtgtaaatcatattagtagaagaaatttatgtggttaaattttaaaattacattaaatgaagagagtacattggagctctaagtaaagaagatactgggtaaatctggagttgatttcattcacttct

SEQ ID NO: 14928 - DNA, 522 bp, Homo sapiens
tattattattattattcttttgagacaggatctcactctgtcgcccaggctggagtgcagtggcatgatcttggctcactgcaacctccacctcctgggttcaagcgattctcctgcctcagcctcctgagtcgctgggattataggcgcctgccaccaaacccggctaatttttgtatttttagtagagatggggttttgccttgttggccaggctggtcttgaactcctgacctcargtgatccacctgcctcggcctcccaaagtgctgagattacaggcatgagccactgtgcccagcctatctgtcaatgattaaaaataaaaattagaaactaaaaaaaattgttaaagaataattttaactagggaaaatttgttaaaattaggaaagtgtaaatcatattagtagaagaaatttatgtggttaaattttaaaattacattaaatgaagagagtacattggagctctaagtaaagaagatactgggtaaatctggagttgatttcattcacttct

SEQ ID NO: 14929 - DNA, 612 bp, Homo sapiens
actatttttgatttttaaattgattttagattccagtaaaacacctctctttatagttctagtcrggctcagtggtgtgcccctatagtcccagctactcatgaggctggcaggaggatcacttgagctcaagagttagcggctataatgtgctatgattgtgcctgtgaatagtcactgcactccagcctgggcaacatagcataaaaatattgtagttctagcttggggaaatcctttattagaaaaggaaattatagggaaatttcaaaatgtagacttgattaggaaactaagcaaactaatgaattttcattagtctatagattagatctttgaaggggtgagccttaataatggcttgtgttgacaagcgaatagatttttcttttaatacttcttaaatatattaaggattaataaatttagctatgcacataagtgttaacatgcacatttctgtgttatttttggttggttagcccaaccttgcagatacctcttaatactgctcatctgtgaaaattttattagcttacttatatgtaatacgcttcttataacctacaaaatgctttgcactttcatttgtagtcttttaagctaccctgc

SEQ ID NO: 14930 - DNA, 545 bp, Homo sapiens
gtgttgggattcctggcctgagccaccatgctggcctttggggtcagagttcaaggctcttcatgaactagaaagcattgtgcaaatgaaaggcaccatcaggtcgagtgagcgtagtcatatgagcaaaggcagagatacaggatgcgcttctggaatgttcagtggtctcgagtaacctgttggtgcctgcagagggtgtgcttcagtgcygatgtggcgatgggagtcagatgtgtggaagggtttggtgccacattcaagagggtttttgccaaactctcggtaggacagtgatgtgactgctgcaaggggattagacaagcagaagatatgaagggtttggtgactgagttcagtagagagggtgacaggcatgccctggcagtaggcagcatcctggtacttccagctgagaccgagggagggcatccctgtacaacaccccctcccagagccgagggaagttccctgcgccgccctgctggggagtgtcacatcctccttgtccccacgcccccattgtcatcatttctgaaaacagc

SEQ ID NO: 14931 - DNA, 965 bp, Homo sapiens
tgaagcattgaagatctctcttaacaggtaaatattatacctgagtccccacagaagcacatcctaagacaaatattcaagtgtaaatttttacctagsgttaatcctaggtgacactgatagaagggtagggaagcaagatagggaagaatgaaaacgtggtatcagagggatagtattaaaaagtcaccactggggcaactggagctcatccctctgaaaaactcaggaaaataaaaatagaatgtatgcttcagagtcttcctagaaaaattgagggggctgtgtgttcatacaccagttctttccaattactcactggggtttgctctcagggagaagatggcacacaaatatgtggcattttcagatcattgtatgtacagacagtgtgggtcttggaagacagagaggaagcctcagggaaaaggatgcaggtgctgacagtcaaaatagtacagaattgactggaatggtaaggatcaaggaaatatgggcaacacttgacttggtacaagccagtaccagtcattaatgtcatctatagaatcaattaacaaaatggaaaaaaacccatatatcccatatatatatatatatatatatatatatatatatatatatatatatatatatgttttgtgtgagtgtgtttggagaaggaaaaatatcaggaaatttaacttaggagataaaataatccatccctaaaaggcgtgtgtgtgtttgtgtgtctgtgtgtgtgtgtgtgtgtgtgtgtgtgtgtatgttttcttttcctatcaggaatatgaggggatggcagatgggatagagacacattgttaagcagaagaaagtaccgtgaagttactgtgatctcagggcagaacagaaactgcaatgctaaatcagaattagagagaggctgggtgcagtggctcatgcctgtaatcccagcactttgtgcagctgaggtggggtgg

SEQ ID NO: 14932 - DNA, 499 bp, Homo sapiens
caggtcctttgctcactttataaaggggttgtttttccttgttaatttgtttaagtttcttatagatgctggatattagacctttgtcagatgcatagtttgcaaaaacatggaatcaacctgcatacccatmagtgatagactggataaagaaaatgtggtacatatacgccatggaatactatgcagccataaaaacagagtgagatcatgtcctttgcagggacatggatgcagcttgaggctattatccttagcaaactaatgcaggaacagaaaaccaaatgctacatgttctcgcttataagtgggagtgaaattatgagaacacatggacagaaaaaggggaataccacacactggggcctatcagaagggcctcttttattccagagccagaacacagctctttaaacctaggttcactctagagatctcagcagtggggtgccagatcctgactcaggtactctgcaattacatgactaggtatccgatc

SEQ ID NO: 14933 - DNA, 592 bp, Homo sapiens
cagtgcagtgggaagctattgggtttcaagcaaggtaggatgtgacataatttacatcttttgttttgttttgtttttttgagacagagtctcactgttgcccagtctggagtgcagtggtgcgctcagctcacttcaacctcagcctcccaggttcaagcaattctcctacctcagcaccctaggtagcrggcactacaggtgccaccaccacacccggctaatttttgtatttttagtagagacggggtttcaccatgttggccagcctggtctgaaactcctgaactcaggtgatccgcctgcctcggcctcccaaagtgctgggattataggcgtgagccaccacgcctggccaatttacatcttttaaagattcttgtggctgtgttgagaagaaattggagaaagcggcagactgtggtttgctcatgttagtaaaaatacttaaactaaatgaactgatcaatagcacaccagcaaatgtccagctgaatgccagtaatgctgtttttcaaaaatgtgtgctgacagaagttggaaaagtccttcacaagcttattagctttgcataagggctgttttatggccc

SEQ ID NO: 14934 - DNA, 592 bp, Homo sapiens
cagtgcagtgggaagctattgggtttcaagcaaggtaggatgtgacataatttacatcttttgttttgttttgtttttttgagacagagtctcactgttgcccagtctggagtgcagtggtgcgctcagctcacttcaacctcagcctcccaggttcaagcaattctcctacctcagcaccctaggtagcgggcactacaggtgccaccaccacacccggctaatttttgtatttttagtagagacggggtttcaccatgttggccagcctggtctgaaactcctgaactcaggtgatccgcctgcctcggcctcccaaagtgctgggattataggcgtgagccaccacgcctggccaatttacatcttttaaagattcttgtggctgtgttgagaagaaattggagaaagsggcagactgtggtttgctcatgttagtaaaaatacttaaactaaatgaactgatcaatagcacaccagcaaatgtccagctgaatgccagtaatgctgtttttcaaaaatgtgtgctgacagaagttggaaaagtccttcacaagcttattagctttgcataagggctgttttatggccc

SEQ ID NO: 14935 - DNA, 592 bp, Homo sapiens
cagtgcagtgggaagctattgggtttcaagcaaggtaggatgtgacataatttacatcttttgttttgttttgtttttttgagacagagtctcactgttgcccagtctggagtgcagtggtgcgctcagctcacttcaacctcagcctcccaggttcaagcaattctcctacctcagcaccctaggtagcgggcactacaggtgccaccaccacacccggctaatttttgtatttttagtagagacggggtttcaccatgttggccagcctggtctgaaactcctgaactcaggtgatccgcctgcctcggcctcccaaagtgctgggattataggcgtgagccaccacgcctggccaatttacatcttttaaagattcttgtggctgtgttgagaagaaattggagaaagcggcagactgtggtttgctcatgttagtaaaaatacttaaactaaatgaactgatcaatagcacaccagcaaatgtccagctgaatgccastaatgctgtttttcaaaaatgtgtgctgacagaagttggaaaagtccttcacaagcttattagctttgcataagggctgttttatggccc

SEQ ID NO: 14936 - DNA, 583 bp, Homo sapiens
cagtattcatattttaaaatgttttaaattatttcagaacattaagatagcagttacattttttaatagttatattattttaaaatgactctttaaaataaagttttagagaaactatattatggatagggctgatttacattttcaaattttctaaaatcagctttggttttagagctgattttttttttcatttctggaaaattatcaggttkaatcaaatacttttaaaatgattattatatattgccatctttaaataggtgttttgattcttcctacagaaattaaaatgtattcagtggaactcacagtttaaaattctatgtttctgatgaactctaacattccaatgttgccttctaagcaaactgaaagctgccttatactgaatgaggaagagcacaaatactcggctgaatgaggtatcgcaaaagactgcatgcactttggagaaagacttgagttattgtcatacaatttccattctttttagctttttcttaaatatatgacaaatacctacacaaagagtggtatttcagtcaatatagtaaatttattttccagactgaccttcagc

SEQ ID NO: 14937 - DNA, 583 bp, Homo sapiens
cagtattcatattttaaaatgttttaaattatttcagaacattaagatagcagttacattttttaatagttatattattttaaaatgactctttaaaataaagttttagagaaactatattatggatagggctgatttacattttcaaattttctaaaatcagctttggttttagagctgattttttttttcatttctggaaaattatcaggtttaatcaaatacttttaaaatgattattatayattgccatctttaaataggtgttttgattcttcctacagaaattaaaatgtattcagtggaactcacagtttaaaattctatgtttctgatgaactctaacattccaatgttgccttctaagcaaactgaaagctgccttatactgaatgaggaagagcacaaatactcggctgaatgaggtatcgcaaaagactgcatgcactttggagaaagacttgagttattgtcatacaatttccattctttttagctttttcttaaatatatgacaaatacctacacaaagagtggtatttcagtcaatatagtaaatttattttccagactgaccttcagc

SEQ ID NO: 14938 - DNA, 583 bp, Homo sapiens
cagtattcatattttaaaatgttttaaattatttcagaacattaagatagcagttacattttttaatagttatattattttaaaatgactctttaaaataaagttttagagaaactatattatggatagggctgatttacattttcaaattttctaaaatcagctttggttttagagctgattttttttttcatttctggaaaattatcaggtttaatcaaatacttttaaaatgattattatatattgccatctttaaataggtrttttgattcttcctacagaaattaaaatgtattcagtggaactcacagtttaaaattctatgtttctgatgaactctaacattccaatgttgccttctaagcaaactgaaagctgccttatactgaatgaggaagagcacaaatactcggctgaatgaggtatcgcaaaagactgcatgcactttggagaaagacttgagttattgtcatacaatttccattctttttagctttttcttaaatatatgacaaatacctacacaaagagtggtatttcagtcaatatagtaaatttattttccagactgaccttcagc

SEQ ID NO: 14939 - DNA, 583 bp, Homo sapiens
cagtattcatattttaaaatgttttaaattatttcagaacattaagatagcagttacattttttaatagttatattattttaaaatgactctttaaaataaagttttagagaaactatattatggatagggctgatttacattttcaaattttctaaaatcagctttggttttagagctgattttttttttcatttctggaaaattatcaggtttaatcaaatacttttaaaatgattattatatattgccatctttaaataggtgttttgattcttcctacagaaatyaaaatgtattcagtggaactcacagtttaaaattctatgtttctgatgaactctaacattccaatgttgccttctaagcaaactgaaagctgccttatactgaatgaggaagagcacaaatactcggctgaatgaggtatcgcaaaagactgcatgcactttggagaaagacttgagttattgtcatacaatttccattctttttagctttttcttaaatatatgacaaatacctacacaaagagtggtatttcagtcaatatagtaaatttattttccagactgaccttcagc

SEQ ID NO: 14940 - DNA, 609 bp, Homo sapiens
atgattacacagtggtaaatgtgttatctaggaaaataagcttcagatagttatatttttctgtgaaaaagatacagatgccaataaaggcttctaaatgcataaaggagatcatgaccagttattttctatagctgttaatgagagaataagataaaagagacttaaattatattacaaggacagtaaaatagatttttgctttattttttctttctctttgtaacaaattacaccatcataatcttctaacattcttttaatcattcattaaacccttcagctttgactgagtgcctgaaatacacattactttgctggctcggcactgrggggtacaaaggtgagtaacaaaatgaggttctatgcctttaaaatgcttataggggccaggtgcagtggctcacacctgtaatcccagcactttgggaggccgaggcaagtggatcatttgaggccaggtgttcaagaccagcctggccaacatggtgaaaatctatctctagtaaaaacacaaaaattagtgggacatggtggcatgaacctgcaatcccagctactcatgaagctgaggctgagaatctcttgaacccgggaagcagaggttgc

SEQ ID NO: 14941 - DNA, 569 bp, Homo sapiens
acatgcgcccctggtcttggcctgtggggaataagggaggggacagtgagcagcatacccagatggattccttaaggtcactcacccagcacgagaaaagcaggtctcttttcatatctttaaaggagaaaaacaaagtagagagaaccccaaatacccaataatccccaaatactaactgagtttggagcttgcatgatttcccatcttaatgctcagctcaggcttaagcaagatgccttcttgagctcattctgcctgatagcctggaaagtcttgagccctggagcgagggtccagaggctttttggaatctccttttggctctgccactgactactgggttttcttgataagcaaaatgccttagctgctgaggacccatttcccaagggctaggattatccaggtagatgacatgtgggggcccttccagcagctgctgaagtcccagggaagggacatccaggtggggctaggcatagccactggtcatcttcaaataagcgaggaccaagrgacctcaagagcagttactctagtgggaagctgtaggacaggatcctcca

SEQ ID NO: 14942 - DNA, 604 bp, Homo sapiens
ccaagctgtatctcactctaccccccacctctctcccgccccctgactgtgttctctgggatgtcttgccagtgctgagcattagagaaggtggactctccactccagggaggggcagcagtctctcccaagacccarggagatggtcgacctgagatgggaaaggaagtcaggtcccctccatggggccacgtcctggccttgagagccaaaggcccaggcagttacaagcagacacacacacagacaggtggacctaaggctaatcctccctccaagaccttacacagcaggacgccagtatccttgcccatgggatatgtggggcacacagattatcccaaagtcctagggacccaggaaatgatctcttcactcagaacccttcaggtgaccactggggaaacctggcttcagttgggctctgaaatatcccacaggctgttctaacttctccatacattgcatttcagcagatagttttgtgatgagagtaactgttaagcaaatcaccctttcccaacagaaccatattcaaatgagaggaagaattcctgatggggtggggcacaaagtatcaaatcaatcacagccctgaacaaca

SEQ ID NO: 14943 - DNA, 604 bp, Homo sapiens
ccaagctgtatctcactctaccccccacctctctcccgccccctgactgtgttctctgggatgtcttgccagtgctgagcattagagaaggtggactctccactccagggaggggcagcagtctctcccaagacccagggagatggtcgacctgagatgggaaaggaagtcaggtcccctccayggggccacgtcctggccttgagagccaaaggcccaggcagttacaagcagacacacacacagacaggtggacctaaggctaatcctccctccaagaccttacacagcaggacgccagtatccttgcccatgggatatgtggggcacacagattatcccaaagtcctagggacccaggaaatgatctcttcactcagaacccttcaggtgaccactggggaaacctggcttcagttgggctctgaaatatcccacaggctgttctaacttctccatacattgcatttcagcagatagttttgtgatgagagtaactgttaagcaaatcaccctttcccaacagaaccatattcaaatgagaggaagaattcctgatggggtggggcacaaagtatcaaatcaatcacagccctgaacaaca

SEQ ID NO: 14944 - DNA, 446 bp, Homo sapiens
aatttgtttactttatgttactgattctatcacagggtgtactatttttaaaaagccaattctacaggactgttgttatcaagagcggaattggaaaacatgccagctgaatccgaacggaacagaaacctaaactgcattcagctgcattccctccccttttcactgcaatttatctaaaagaaaaaaaaaaagattcatttctctaattaattcatctaggaaaaaaagggttggrgggcagatgaaattcaggagaaaaaaactaagaatggaaatgatgtatagttgcaagtagggaaggacaaaataaaccttagtaatttaatttacaaatcatcccctgaaaattgatatatatttgttatatgaattgtctctatgccctctccattacaaaaatagaaaagcaaaaggcaactaataatgaaaataagttgggtgag

SEQ ID NO: 14945 - DNA, 446 bp, Homo sapiens
aatttgtttactttatgttactgattctatcacagggtgtactatttttaaaaagccaattctacaggactgttgttatcaagagcggaattggaaaacatgccagctgaatccgaacggaacagaaacctaaactgcattcagctgcattccctccccttttcactgcaatttatctaaaagaaaaaaaaaaagattcatttctctaattaattcatctaggaaaaaaagggttggaggrcagatgaaattcaggagaaaaaaactaagaatggaaatgatgtatagttgcaagtagggaaggacaaaataaaccttagtaatttaatttacaaatcatcccctgaaaattgatatatatttgttatatgaattgtctctatgccctctccattacaaaaatagaaaagcaaaaggcaactaataatgaaaataagttgggtgag

SEQ ID NO: 14946 - DNA, 446 bp, Homo sapiens
aatttgtttactttatgttactgattctatcacagggtgtactatttttaaaaagccaattctacaggactgttgttatcaagagcggaattggaaaacatgccagctgaatccgaacggaacagaaacctaaactgcattcagctgcattccctccccttttcactgcaatttatctaaaagaaaaaaaaaaagattcatttctctaattaattcatctaggaaaaaaagggttggagggcagatgaaattmaggagaaaaaaactaagaatggaaatgatgtatagttgcaagtagggaaggacaaaataaaccttagtaatttaatttacaaatcatcccctgaaaattgatatatatttgttatatgaattgtctctatgccctctccattacaaaaatagaaaagcaaaaggcaactaataatgaaaataagttgggtgag

SEQ ID NO: 14947 - DNA, 825 bp, Homo sapiens
actttgggaagctgaggcgggcggatcacgaggttaggagatcgagaccctcctagctaacaaggggaaacccccgtctctactaaaaaatacaaaaaaaattagccggcacggtggcgggygcctgtagtcccagctactggggaggctgaggcaggagaatggcaggaacccgggaggcggagcttgcagtgagcggagatcacacccctgcactccagcctgggagaaagagcgagactccgtctcaaaaaaaaaaaaaaaaaaaaaaatttaaatatttctccaagccttgtagtttatggattccatatatgtcaaattatatgtaatatgcaacattattattaatattatttttatactattacttatttctagatattttaatttttattgagatttattcttgagttatggggtattttaacattgttatgtgaatctccaaactttgtacattttctggtattttctgtattgctttctaactaaatttcaccgaggttagagaatattttttatcattttaataatttgatatctgttgaaacttgttttattggcccaccgtatagtttattttggaaaatgtttcataagtacttgaaaataatgtatattacgcggccacattagaaaaagcatctgtagtttttaagattctctaagtctcagtttcttcaacaaaaaatgaagaacttcctattgtggttttgatttgcatttctctaatgatcagtgatgattagctttttttcatgtatttgtcagccacataaaagtcttcttttgagaagtgtctgtttatatccttcgcccact

SEQ ID NO: 14948 - DNA, 333 bp, Homo sapiens
atataattccatttgtctacttttgctttttgttgcctatgcatttagtgtcataccaagaaatcattggaaatatgttttttcatttgtttaagcctgtaggaggaaatacggtttgagtgaactttaacatcttggaaaagtaagccttggtcaagcttacagacaagagactaggctggttattcatcctgtgaaacagccctacaaatttacmtacaccatggaatccaagatcccactgataatgtgaacttactcctttttgtttgtcttctcccttctaatgttaatttttttaactgcaggaaaaataacaaaataacagaattc

SEQ ID NO: 14949 - DNA, 532 bp, Homo sapiens
ggaattcgtcatctaggaatttatcttacagatatatactgcacgcatataaaatggtggatacacgaggaaactcattgtagctgtgggcataacaacaggaagttggaaaccatctgtaggcttatcaactgggggctgatgaaatgtttatgtttcttaagctgagtgatggcttaaaattttttaaaaaatctatctatacatatagatatatatatttttgagacagagtctccctctgtcacctaggctggagtacagtggcacaatctcggctcaccgcaacctctgcctccctggttcaagcaattctcctgcctcagcctaccaagtagctgggattacaactgtgaaccaccatgcccagctaatttttgtatttttagtagagayggggtttccccatgttgacgaggctggtctgaaactcctgacttcaagtgatccggcctgcctcggcctcccaaagtgctaggattacaggcataagccactgcacccagccaaaattaaaaaaaaaatcttaaac

SEQ ID NO: 14950 - DNA, 538 bp, Homo sapiens
gagaactcacagggccctcggcagaggcctgacatcatccttttccacagatttgaaaggcagtctatgtcctggccgcaccccagtgcccgacagaaatagaatgagaagtatgatccagctggcaggatctcagccttggaacagacaagcagtaagaaggatttccagctacgtggtcagaaaagtaccatgaaggatggtcacagggtaggtaggcctgggtgggaagccatatccttcatgcaaactcacagttgttacatttgatacactcttttcttttccctagaacatctggcccaggattcctctgtcatttaaaaacaagccatcaacmacagtggagtctattaataataatagagtggcttctactgtgtgcccccttgaccccctgacccaagctctcacagtgcctcacacaccacagtactgctgcctgtctcctggagggggccatttacttcccgtcacatctctaggatgcagcccagggcctcacacacatggtgtcctaaatattttcaaataaatg

SEQ ID NO: 14951 - DNA, 538 bp, Homo sapiens
gagaactcacagggccctcggcagaggcctgacatcatccttttccacagatttgaaaggcagtctatgtcctggccgcaccccagtgcccgacagaaatagaatgagaagtatgatccagctggcaggatctcagccttggaacagacaagcagtaagaaggatttccagctacgtggtcagaaaagtaccatgaaggatggtcacagggtaggtaggcctgggtgggaagccatatccttcatgcaaactcacagttgttacatttgatacactcttttcttttccctagaacatctggcccaggattcctctgtcatttaaaaacaagccatcaaccacagtggagtctattaataataatagagtggcttctactgtgtgcccccttgaccccctgacccaagctctcacagtgcctcacacaccacastactgctgcctgtctcctggagggggccatttacttcccgtcacatctctaggatgcagcccagggcctcacacacatggtgtcctaaatattttcaaataaatg

SEQ ID NO: 14952 - DNA, 485 bp, Homo sapiens
tagaagaagtgcattcatttcattctggaattccctgctgagacatgatgtgtgcaaactatctaagggacaacataatcctctgatgcttataaaaaatagtaaagttgcatgtaatctctgactacaaaaaaaaaaaaaaagcctaagtgtcattcacaccaaggacaaatgccaagtattctctgctgagctcactgatgattcttgttctgtagagaaaaagccagaaattatgaaaatcattagtttcagcctcagtggaagtaaatgtaatagattgaaacttcatatcaaaaattcaaaatagctatatawctttagtgcatactaaattaggtagtcctttatgatctgatttcttttagatgcatttttccctttatcctttacaacaacctcatttttaatattacagctaaagtgagtatcccttactaaagtcagtggctatcttctggaaaatgtggaaacaaatttggtta

SEQ ID NO: 14953 - DNA, 510 bp, Homo sapiens
atacaattattgcaaaatggtaataaaatcacctccccacgcttcccttgagaaccatggtcaaggaagatctggctgagagggctgaaacagactgtcaacttgacttttaattttatgaactatgagaatttggacaaaaaaaaatcttcaaaggatcaatatcatttctacaaatgagaagaagactgagtgtgaaaacgctgctttgaagcaggctcagaagaaaaaaatcttatgagcaagtaccaatagwactttctcaatttctcatttttttttctttaaaagggattttatttcttttaagcacaggaattgcagttaaaaattattttataacccttaaaatgagaacatttgcctattaagctccaacaatccacaatattctatctgtaaagcatatcatgtggcctcctgctgtttcatttaactttagctgaaccttttttttaaagtgtttcctaatctaccctaatttgcttaaactcctgatctgccatttct

SEQ ID NO: 14954 - DNA, 562 bp, Homo sapiens
tggaatgcttttcagccttaagaaacaagaaaagtctacagcttgagacaacatggttgaaccttgaggttatygtattaagtgaaataagccagtcacagacaaaggctgcattattccacttatatgaagggatctaaaggagtgaaactcaaaggatcagagtagaaggtggtttctggagggagcagaaaggggcgagttacaaattacaaagttttcatcaagcaagttctaaagacctgctgttcagcattggcccatagtcaataccactgtattgggtagttaaacatctgtaaacagggtggatctcatgctaagtgttcttatcatgataaaataaaaaagaaagaaagaaaaagcaaaaatgaccaaatactgcagtgtcaacacactaagcaagtatagaagtccaaagaaaataattcagagctgaggaggaactaaaactttgatgggatcacaggagaacaaccctgatgtcagacttgggtcctgtagcaaaagactcagtgagatcaaagggaattctgtgaagactaattggaggtggggtgct

SEQ ID NO: 14955 - DNA, 534 bp, Homo sapiens
cactttatatcttgctgccagagttgggtgttgtgccttcccttagatcaatagttcatatcagcaacatagaaaaaggacactggcaaaataagattatttgaaaaagaggggaataggtggtggacagacaaccaacattttctgccaaaatatataaacatacaaagaataaaccaaaattatctataaacccaccagactgagawaatggaactgttttagggtgaggaagtctaccttaaatttctctgatgctagtcccttcagaagtaaaacccctcttttctttctctgttattgactcaagaccaaagcatgcagttcttctcttctttcctatcaaatactgcttaaagctccctgaactcttagtctgaggaatacataactattttctccactgtgtaacatagccataggtttcaaggcttgtagcatgctgcttcctgctgcttgctcttcttgtatacaattcattttgtagttgagaacagtatgttcctatcctaaaaagttaattttaggatagca

SEQ ID NO: 14956 - DNA, 534 bp, Homo sapiens
cactttatatcttgctgccagagttgggtgttgtgccttcccttagatcaatagttcatatcagcaacatagaaaaaggacactggcaaaataagattatttgaaaaagaggggaataggtggtggacagacaaccaacattttctgccaaaatatataaacatacaaagaataaaccaaaattatctataaacccaccagactgagataatggaactgttttagggtgaggaagtctaccttaaatttctctgatgctagtcccttcagaagtaaaacccctcttttctttctctgttattgactcaagaccaaagcatgcagttcttctcttctttcctatcaaatactgcttaaagctccctgaactcttagtctgaggaatacataactattttctccactgtgtaamatagccataggtttcaaggcttgtagcatgctgcttcctgctgcttgctcttcttgtatacaattcattttgtagttgagaacagtatgttcctatcctaaaaagttaattttaggatagca

SEQ ID NO: 14957 - DNA, 557 bp, Homo sapiens
gatgccaaaaaatatttgctgaatgaatggatcaggagtgagaggaggaggtttctctgggaaatgtgggagaaagagagagagagagaaagagactcaggaacccaaaccatgtctgatgagaacagaaaaaggccacttgtaatggcctcagctctgccttggggagtggggagctggggacaatgccaaggaaagcttcacaagggagatgttatttgaactggggtttggagaagtatagaagtttgccaggagaaaarggatataaggaattacagaacaagacccagaggtgtgaaaggatgagctcagtgtaccatgggtagagtggttggcagtggggagctgttggaggacattaggaagggaagggaaatgattggatttgcatttagaaagttaaggccttccaagtgccttctgcagctaacacaagcttccctctaaaagtagatggataagtgggggaatagaacgaatatgttcttttcccctttttgtttctctttagtgaccttgacttttgttctccctcggttagccactagagaaat

SEQ ID NO: 14958 - DNA, 557 bp, Homo sapiens
gatgccaaaaaatatttgctgaatgaatggatcaggagtgagaggaggaggtttctctgggaaatgtgggagaaagagagagagagagaaagagactcaggaacccaaaccatgtctgatgagaacagaaaaaggccacttgtaatggcctcagctctgccttggggagtggggagctggggacaatgccaaggaaagcttcacaagggagatgttatttgaactggggtttggagaagtatagaagtttgccaggagaaaagggatataaggaattacagaacaagacccagaggtgtgaaaggatgagctcagtgtaccatggktagagtggttggcagtggggagctgttggaggacattaggaagggaagggaaatgattggatttgcatttagaaagttaaggccttccaagtgccttctgcagctaacacaagcttccctctaaaagtagatggataagtgggggaatagaacgaatatgttcttttcccctttttgtttctctttagtgaccttgacttttgttctccctcggttagccactagagaaat

SEQ ID NO: 14959 - DNA, 557 bp, Homo sapiens
gatgccaaaaaatatttgctgaatgaatggatcaggagtgagaggaggaggtttctctgggaaatgtgggagaaagagagagagagagaaagagactcaggaacccaaaccatgtctgatgagaacagaaaaaggccacttgtaatggcctcagctctgccttggggagtggggagctggggacaatgccaaggaaagcttcacaagggagatgttatttgaactggggtttggagaagtatagaagtttgccaggagaaaagggatataaggaattacagaacaagacccagaggtgtgaaaggatgagctcagtgtaccatgggtagagtggytggcagtggggagctgttggaggacattaggaagggaagggaaatgattggatttgcatttagaaagttaaggccttccaagtgccttctgcagctaacacaagcttccctctaaaagtagatggataagtgggggaatagaacgaatatgttcttttcccctttttgtttctctttagtgaccttgacttttgttctccctcggttagccactagagaaat

SEQ ID NO: 14960 - DNA, 575 bp, Homo sapiens
attattacattagaatcagcagtacgaatatcatgtgatgcagagtgtggcaagccattgaggcagccagggtcattcgggcttggattgaggacatacctttttagctagcatcttttagcaggttcacttgtgacaatgagaggctgacacatctttgacctctagtcagcggagatgctcttactgtggggagagaggccccagcatagtcaggagcagttctgcactttaccagttctatgcataccccactgtatacactgatgagacatgttccctgaccaagacatctttgtgaaagcaaaactcaacaggatggaaggccagaggaaggccgggctcagcaggccccgcagagctcatcaacacatgaggctatagaggcgcctgggccaagggactctttctccccaatctctgtccaagagaaaaccttggacatggcmcaaattaaagttatttgtaaactgattactgtcaagttttcctctctgcctggccatttcttgtaaggatgactttcctaaaaagttgctgctaatgagttactttggttccttttagttcattca

SEQ ID NO: 14961 - DNA, 524 bp, Homo sapiens
caggtgatccaccgccccccgccaccccgccccagcctcccaaagtgctgggatagcaggcatgagccaccacgcaggcatgagctaccgcgccaggccctcttctatgttatttttaactgtttagagcttcttaaccaaggtctatggattccttaagggtcctcaggggctttaagaggtttgcgaatctyttgaaaccatgttacatcttgtgggtataggaaaaggtgaatttgttttgaggagagggtttatctttttcattaacgtctcaaagaggtctccaatgcaaacaaggttaaaaataattaatacaggctttatccaagaaggatttgttttaaactttttgacctcagcctagggagaaaaccagatacaagtaaggaatgcagcagctcatatcaggaaataataataacactaatacttcagtaattacttttttcctctatgctgattgagacatagatctggctttcgccaaacaaaaataataataaagaaagaaaccccagtga

SEQ ID NO: 14962 - DNA, 553 bp, Homo sapiens
aatgcagtcgtttaaaaactgggaatcgcatgcagacgccaaaaagccatctgacctttctagatactcaggtgagacactgggcgaatagttaggattcctgccttgcagaaactcatttaaattgtaggcaaccaagatgtggtagcgaacaaaagtacaatccgctgtggacagctactattatactaagatgaattctaaaggctgtcccaattactctgcagtggaattttattgaatcaacattgctttaaataaataggtcatcaacctggctgtgacaaccttttcattatacaggagatatcagtacataggccttttctgatatayaatgggcttatatgtttctgaaattttattcataagtaggctatgtggaattcagatgatgtttctccaatgaatccttttcaagttcttaagaaaggacacagtggcttgttcaacccatgaagtattcaacatttcttgctaataattccactgtagcaaatgaagctatagtcggtagcattatttctgcaaaaatgttttttcctggaatttt

SEQ ID NO: 14963 - DNA, 553 bp, Homo sapiens
aatgcagtcgtttaaaaactgggaatcgcatgcagacgccaaaaagccatctgacctttctagatactcaggtgagacactgggcgaatagttaggattcctgccttgcagaaactcatttaaattgtaggcaaccaagatgtggtagcgaacaaaagtacaatccgctgtggacagctactattatactaagatgaattctaaaggctgtcccaattactctgcagtggaattttattgaatcaacattgctttaaataaataggtcatcaacctggctgtgacaaccttttcattatacaggagatatcagtacataggccttttctgatatataatgggcttatatgtttctgaaattttattcataagtaggctatgtggaattcagatgatgtttctccaatgaatccttttcaagttcttaagaaaggacacagtggcttgttcaacccatgaagtattcaacatttcttgctaataattcyactgtagcaaatgaagctatagtcggtagcattatttctgcaaaaatgttttttcctggaatttt

SEQ ID NO: 14964 - DNA, 522 bp, Homo sapiens
ttaaacttacacagaatgtgcctgtctttcttgcctccccctccaccttctcacctcttcttcctctgccacccatgaaagaacaagaccaacttcccctctctctcctcctactcagtctactcaacatgaagatgacaaagatgaagagctttataatgatccactcccacttaaaaaacggtaaatatattttctcttccttatgattttaataacaatgttctcttttctctagcttactttattgtaagaagatagtatataatacatgtaacagacaaaatatgtgttaattgactagttatgttattggtaaggcttccagtcaatagtagctcttagtagttaagttttgggggattcaaaaattatatgtgaacaaaaattatatgrctgcataggggtgagcatccctaacccccatgttgttcaagcgtcaactgtaattctgtttggattaacacgtgttattcccaatactgttcaacattatcactagccacaaactctgaatatgac

SEQ ID NO: 14965 - DNA, 548 bp, Homo sapiens
aacttttggaaggtctacaaatatatgtgcaacctgaaaaatgacttaataactctataatatgaaaactgcaaaatcaaaaggaattaatacttaatgaaatatccacaaagcataacgttattttacttgtttcactgcaacttaactgctatatcttaggatagataataaatagcaaggaaaatgtaaaatatttattctcaaataagcaaaattataaaaattatctctaaaaatgttacaataaaaatattcttaatgcatgatgtaagcattgcaaaatatgcttgatatgatatgcagtgagacttttaaaattaagagagcctcttgtctaggatggtggtcattaaacaactcataatgggtttatgtacaactatgtttgtttcagttttctattggtaygtaacaaattaccacaagcttagcagattaagacagcacattattacctcatgctttccctgtgttaggacttagggcataggttagctgagtctttcattcagggtctaactggcatgaaattgaggtgtcagccg

SEQ ID NO: 14966 - DNA, 537 bp, Homo sapiens
gcctgggcgacagagcgagactctgtctcagaaaaaaaaaaaaaaagagagagagaaaatgatgcaggaagaatgacgaatatagaaatcataacacagtcaagtatagtgartgataaaagtaaaaaaaaattatagagtgtaaaaaacacatcacctcccacctggagaccacaggtaatgtgtcagtcagagttcaaacttgagagtgaaactctcaatatttggaatattatagagtaacaaccttttacaggaatggtgtgaggtgctatggaagtaaaggtctgtcgagtggggtacagcatcgcatggtggccctggactcactgcaagtcagcagggctggaaatcgggaaataaagacaggggtaaggaagagtgaagacaaacttgcaccctgtgtcagctccactgtgtctctcaccacttctgaccaattgtaactgggcagtttaactgcaaaatgcattttaaactttttacttatttctcgtgcgtttcaagatataaccttgaagcaaattgcagaagcct

SEQ ID NO: 14967 - DNA, 537 bp, Homo sapiens
gcctgggcgacagagcgagactctgtctcagaaaaaaaaaaaaaaagagagagagaaaatgatgcaggaagaatgacgaatatagaaatcataacacagtcaagtatagtgaatgataaaartaaaaaaaaattatagagtgtaaaaaacacatcacctcccacctggagaccacaggtaatgtgtcagtcagagttcaaacttgagagtgaaactctcaatatttggaatattatagagtaacaaccttttacaggaatggtgtgaggtgctatggaagtaaaggtctgtcgagtggggtacagcatcgcatggtggccctggactcactgcaagtcagcagggctggaaatcgggaaataaagacaggggtaaggaagagtgaagacaaacttgcaccctgtgtcagctccactgtgtctctcaccacttctgaccaattgtaactgggcagtttaactgcaaaatgcattttaaactttttacttatttctcgtgcgtttcaagatataaccttgaagcaaattgcagaagcct

SEQ ID NO: 14968 - DNA, 537 bp, Homo sapiens
gcctgggcgacagagcgagactctgtctcagaaaaaaaaaaaaaaagagagagagaaaatgatgcaggaagaatgacgaatatagaaatcataacacagtcaagtatagtgaatgataaaagtaaaaaaaaattatagagtgtaaaaaacacatcacctcccacctggagaccacaggtaatgtgtcagtcagagttcaaacttgagagtgaaactctcaatatttggaatattatagagtaacaaccttttacaggaatgrtgtgaggtgctatggaagtaaaggtctgtcgagtggggtacagcatcgcatggtggccctggactcactgcaagtcagcagggctggaaatcgggaaataaagacaggggtaaggaagagtgaagacaaacttgcaccctgtgtcagctccactgtgtctctcaccacttctgaccaattgtaactgggcagtttaactgcaaaatgcattttaaactttttacttatttctcgtgcgtttcaagatataaccttgaagcaaattgcagaagcct

SEQ ID NO: 14969 - DNA, 517 bp, Homo sapiens
aatgctcccttgcaactcctgagctcttatccactctctcatcctctgagaaggatggctcacaggtgagatgcaggggtgggccctccaagatgacccttcacagccctccctccccaagaatgtcacagctccagaagcaggtttgcacccacagtgacacgccatggctttgcatttcccccagcactaaggagctgcttcatggagcacctctgattgacaaatctaaaatagagaatgaaagaaagtgtcaacctggaggagtttaataacgctgtaattaaaagaaggaagaaggggccacatcccmgtgaggaagcagctcctttaaactattgaagaatatattgttctgggggtgccaacagcagaagaaattttaataacaaaaataaattgacaaaaaaaaaggcaggagaggtattagttggaacaaaaccaagtatcttaaaactgctcattttaaactgagtgttttatggtaggataaggaagctccaatattttcaaacac

SEQ ID NO: 14970 - DNA, 517 bp, Homo sapiens
aatgctcccttgcaactcctgagctcttatccactctctcatcctctgagaaggatggctcacaggtgagatgcaggggtgggccctccaagatgacccttcacagccctccctccccaagaatgtcacagctccagaagcaggtttgcacccacagtgacacgccatggctttgcatttcccccagcactaaggagctgcttcatggagcacctctgattgacaaatctaaaatagagaatgaaagaaagtgtcaacctggaggagtttaataacgctgtaattaaaagaaggaagaaggggccacatcccagtgaggaagcagctcctttaaactattgaagaatatattgttctgggggtgccaasagcagaagaaattttaataacaaaaataaattgacaaaaaaaaaggcaggagaggtattagttggaacaaaaccaagtatcttaaaactgctcattttaaactgagtgttttatggtaggataaggaagctccaatattttcaaacac

SEQ ID NO: 14971 - DNA, 409 bp, Homo sapiens
gcaaattagtgcccagggtccccagctggcagcctggtggggaatgtgcatgctttaacatggcagcccytcatttcaaggcatagagtgtccttgccaaaaatcctccttattatgcaagactctgttcaagtgccacttccagggcgtcctccctgattgcctaggcagaaaagagcctttctcttctgtagctccactagccttatagccaacatggactgagagtacatggagggtaggcctggcctcatcagccaattcctgatggctctgactactggtttcaccctgtgccaggtgctacaccaagtatatcacattccatggagggggcactgaggctcaaggatcccacgggtaaggcaatggagccagaactggagttggaggcctggagacactgtaa

SEQ ID NO: 14972 - DNA, 552 bp, Homo sapiens
agaggcagagggacgcccagtgcactggaaggtggggtcagttggccatctcctggggtgcgttgctcagaggctaggggaggggcagagcctggctgggtctctagggtgagtgccattcccagtgcccagggacagggtgggggcagccccagggcttggctttggctgtgcatccagggcttcactgcgccacctcctgggaaaacgctaaactgcacccagaacctcctgggtccggccagtatccagcccctgcccygcaagggtggcgcagggaccacctagagggctgccctcccagctctaaactcgggagttactaactgaggccaccctctcaagggggctccgtcatcagccccgtgttcccaaggaggggactgacccggggtgacgcagaatgcacccttggggttgagccaggcagtggggcccagtttgcccctgcagaatgaccgtgaggctgagggaccagtcccagcaaagcacctacaacagtgcctggcacacagtcggcgctcaataaatgactaattgtgagcatggaca

SEQ ID NO: 14973 - DNA, 1355 bp, Homo sapiens
ggggttttgccatgttggccaggctggtctcaaactcctgacctcaggtgatccacccgcctcggcctcccaaagtgctgggattacaggcgtgagccaccacgaccagctgtcagtgctttttagtcctctctgtggtactagacctaaactgtcctctgaccctggtgcactcctgtcttccatatcttgtcctctggccttggtctcctggaggagaaaggcatttccatttctgtcttcgggactscttccttggacccagattgttagcaatgtcttctccacctttcctagagatttccttttatgatgttcagtctatttgaagcatattatttgcaaaccttgtcatagtgtttgggtgatgcccctttaacctgtcctgggggctttgcttcaccagggtcatctaaatgatggcagttccatctttctttatggccacctcctgcagggacagcagaataactgcttgtggttggtcaggagatgctggaagactggaggagagctcctgatggggcagtgatgagcagaggcttgtggactggaaccgtgtggtttcataggtgagaggagcgggcaaaggagagcaggctcaaagcccggcctagaagctgtttagtctggagttggcccagctggatgtagaatccaaaagaagggaaggtttggtaaaactagagtcagcaaactgtcacctgcaggccaaatccagcctgcttccagcttttatgtaacttttacactaagcatggtttttacctttttacatgattggagaaaaaaacaaaagaagaatagtattttgtgacacataaaaattttaggaaattcaaatgtcagtgtccatcaataaagctttattggaacacagtcctgcccattcacttatgactatggctgctttcatgttacaacagcacagttgagtagttggctacagagaccatatggcccctaagcctgaaatatttactgtctggccctttacagaaaaaatttaccaacccccaagttacactattagtctgagctgtgacagtggctttgacccaagcccatcagaacacattccctgttcagtgttgcctgacctctgcaaaccccaccaggtcccatcctaggagcggtagggagagaacaggttaattagatgggttaatttgaggaactattctttcaagaggtgagaagggatgagatgagagaacgcgatggagttaagaccatgggctctgattcaaatgttgatttcaccacttatagcagtgggacggaccttgagcaagtgtcttaacctctctgagcagcagtttccatataataaaatgtgaataattatatggtca

SEQ ID NO: 14974 - DNA, 1355 bp, Homo sapiens
ggggttttgccatgttggccaggctggtctcaaactcctgacctcaggtgatccacccgcctcggcctcccaaagtgctgggattacaggcgtgagccaccacgaccagctgtcagtgctttttagtcctctctgtggtactagacctaaactgtcctctgaccctggtgcactcctgtcttccatatcttgtcctctggccttggtctcctggaggagaaaggcatttccatttctgtcttcgggactgcttccttggacccagattgttagcaatgtcttctccacctttcctagagatttccttttatgatgttcagtctatttgaagcatattatttgcaaaccttgtcatagtgtttgggtgatgcccctttaacctgtcctgggggctttgcttcaccagggtcatctaaatgatggcagttccatctttctttatggccacctcctgcagggacagcagaataactgcttgtggttggtcaggagatgctggaagactggaggagagctcctgatggggcagtgatgagcagaggcttgtggactggaaccgtgtggtttcataggtgagaggagcgggcaaaggagagcaggctcaaagcccggcctagaagctgtttagtctggagttggcccagctggatgtagaatccaaaagaagggaaggtttggtaaaactagagtcagcaaactgtcacctgcaggccaaatccagcctgcttccagcttttatgtaacttttacactaagcatggtttttacctttttacatgattggagaaaaaaacaaaagaagaatagtattttgtgacacataaaaattttaggaaattcaaatgtcagtgtccatcaataaagctttattggaacacagtcctgcccattcacttatgactatggctgctttcatgttacaacagcacagttgagtagttggctacagagaccatatggcccctaagcctgaaatatttactgtctggccctttacagaaaaaatttaccaacccccaagttayactattagtctgagctgtgacagtggctttgacccaagcccatcagaacacattccctgttcagtgttgcctgacctctgcaaaccccaccaggtcccatcctaggagcggtagggagagaacaggttaattagatgggttaatttgaggaactattctttcaagaggtgagaagggatgagatgagagaacgcgatggagttaagaccatgggctctgattcaaatgttgatttcaccacttatagcagtgggacggaccttgagcaagtgtcttaacctctctgagcagcagtttccatataataaaatgtgaataattatatggtca

SEQ ID NO: 14975 - DNA, 555 bp, Homo sapiens
cagtgctgggttttttcccctataattttaayaatttttggttgttagtgtttttgttctaatttcattgttagcaatgatttgttagcacctgttgtctcaaatttatcaaaagacataattttgttgagatacacagcataagacagccaaggttgtagatgaaaatttttcatgtatctccttctcgctatgtattacccttttatcataagataaatgaaacattgtggaggaaaaagcattaaactaaattaccattcgagatgggccattcaaatattgtctccatttattcccttatctggtagaacagttggccaaggttgagggtgtggaagacaagaaatgaaaatcagaattttctggaaaattttgtttaaagttcatacattctgacaatgtctctctagagatggctagaaggccaggagaggtcatgcaaatcttaatatttcctttgtttgacttgctttttatttcattcacccaaaagtagttccaaaaactttcttccctctttttccaaaattccccattgcaatatccctaaca

SEQ ID NO: 14976 - DNA, 555 bp, Homo sapiens
cagtgctgggttttttcccctataattttaacaatttttggttgttagtgtttttgttctaatttcattgttagcaatgatttgttagcacctgttgtctcaaatttatcaaaagacataattttgttgagatacacagcataagacagccaaggttgtagatgaaaatttttcatgtatctccttctcgctatgtattacccttttatcataagataaatgaaacattgtggaggaaaaagcattaaactaaattaccattcgagatgggccattcaaatattgtctccatttattcccttatctggtagaacagttggccaaggttgagggtgtggaagacaagaaatgaaaatcagaattttctggaaaattttgtttaaagttcatacattctgacaatgtctctctagagatggctagaaggccaggagaggtcatgcaaatcttaatatttcctttgtttgacttgctttttatttcattcacccaaaagtagttccaaaaactttcttccctctttttccaaaattccccrttgcaatatccctaaca

SEQ ID NO: 14977 - DNA, 1413 bp, Homo sapiens
gcaattctcattatacattttcattttcatttaatagagcatatttttgtgagaaacttaattacctttctagtaataaaagtgagactactataaacttggtaatrgatctgcaaccatcaattagaataagaacaaactcagtttgtagcatcagcctggcatttccttctgtttctgagtttctgctggtctaggatggttaatagtgctctttgtttacatttacttcaagggctttatgtggaatcacacagtggggtgacattgtaaaacgcaaaaccatatgaatgtatgataaaggtgagtaatatttatagtctattctattattatttatagtatattttactgtactacttgtgtgcctattattacaacactgaaaactgtttttcttcttattccttaacattaacaaaagatttaggaagtaatctagtttttagtcctcatataacactatacccataatcaaataaaattatgttatagtttttaagggaatttgaaagggaaatcctataattatattctaatatttatggccatttaattagttttgaattccgatttttgtgttccatctggtctaaactttacagaaataattttttactcatgcagtttttatttagtccttaaataactatgatattcttcatgatgatactttttctgactagaggcaaaatcttggtcttgctctttaaatatgcctattttattgagataggaatgggccttggcaattgattaaggcatcccaattatcacactttgagagtcatgttactaagaaatatgaggaagtcaaagctgatccatttggtagagacaatagtgcaataggaatcattgttgacatcacataataaatgaattgatgaacaacgaatgaaattttattggccacctaacaaatctttaaaggatctttaaacaatatgtgcagtctttgagttaagcaacatatcaatctaggtatcactcttcccaagtgaatgtttgagaaactgaagcttacatatttgaaattactcacctatggtgacctagtatatcagctggtgcaggctttttataccacatgtgtaactctaccctacctcaggtaccttttcatttagtagattggtgtttagaaatcatgaagtctactgcccaattaagcataggcatacactgaatcctagaaaaactgacttgactaaagtctcaaagcaagtttttctcagggtgtaaaataaagctcatgcctttctatttcatgctcaaacagcctgtactatatatacagacagctctccagtcaacacaacaccatgaatgttcactaaccgtgtgtcatacatggttaagattttagtgtgttagaaaattctatttcaatgcccattctttatcaatttt

SEQ ID NO: 14978 - DNA, 1413 bp, Homo sapiens
gcaattctcattatacattttcattttcatttaatagagcatatttttgtgagaaacttaattacctttctagtaataaaagtgagactactataaacttggtaatggawctgcaaccatcaattagaataagaacaaactcagtttgtagcatcagcctggcatttccttctgtttctgagtttctgctggtctaggatggttaatagtgctctttgtttacatttacttcaagggctttatgtggaatcacacagtggggtgacattgtaaaacgcaaaaccatatgaatgtatgataaaggtgagtaatatttatagtctattctattattatttatagtatattttactgtactacttgtgtgcctattattacaacactgaaaactgtttttcttcttattccttaacattaacaaaagatttaggaagtaatctagtttttagtcctcatataacactatacccataatcaaataaaattatgttatagtttttaagggaatttgaaagggaaatcctataattatattctaatatttatggccatttaattagttttgaattccgatttttgtgttccatctggtctaaactttacagaaataattttttactcatgcagtttttatttagtccttaaataactatgatattcttcatgatgatactttttctgactagaggcaaaatcttggtcttgctctttaaatatgcctattttattgagataggaatgggccttggcaattgattaaggcatcccaattatcacactttgagagtcatgttactaagaaatatgaggaagtcaaagctgatccatttggtagagacaatagtgcaataggaatcattgttgacatcacataataaatgaattgatgaacaacgaatgaaattttattggccacctaacaaatctttaaaggatctttaaacaatatgtgcagtctttgagttaagcaacatatcaatctaggtatcactcttcccaagtgaatgtttgagaaactgaagcttacatatttgaaattactcacctatggtgacctagtatatcagctggtgcaggctttttataccacatgtgtaactctaccctacctcaggtaccttttcatttagtagattggtgtttagaaatcatgaagtctactgcccaattaagcataggcatacactgaatcctagaaaaactgacttgactaaagtctcaaagcaagtttttctcagggtgtaaaataaagctcatgcctttctatttcatgctcaaacagcctgtactatatatacagacagctctccagtcaacacaacaccatgaatgttcactaaccgtgtgtcatacatggttaagattttagtgtgttagaaaattctatttcaatgcccattctttatcaatttt

SEQ ID NO: 14979 - DNA, 549 bp, Homo sapiens
ggattacaggcacgcaccaccacgcccagctaatttttgtatttttagtagagacggggtttcaccatgttgatcaggctggtctcgaactcctgaccttgtgatccccctgcctcagcctcccaaattgctgggattacaggcgtgagccaccacacctgtcctctctgaggtttaagcgagtaaatggcagagctgaagttggataacataacttctaggtccaaagctcatcctttycccacattattatccctctctgaagtgtataatctagacatgacatttaacttatctaagcttcttttcctcatctgtaaaatgggggaaacaataatattaatccatgagtttgaggaaaagagaaggggagacagtgcagggggagacacacttgccaacagaaagagtacgataaatactagctacagtattcaggcatggtttgttcaagtaactcaaagaagttcagtactgctggtgcttagagtggaaacaggacctgacaatagatgcagctggcaaggcaagcaggggtcaagtcattaa

SEQ ID NO: 14980 - DNA, 502 bp, Homo sapiens
tctttttcttctcctgtgacttgccatgcctttaacaggtcatgttaaacatgctatatggcatgatacattattaataaatggaaaataaaactacatttcagaatgctggttggggttcataatattgaattgttttattgacttttccacyatggaaacacccagtggttcaatataaattcctcatttgttttggactcctcatgttttcaaatatttggggcaatttcttataagactgtttctttctctaattatttccaaacaacaaatgatgacttttttaagtaaaatattgaagaagaaaggctttaaggagttataagaaaactactgtaatcaaagaagcaggtgcaaaattattaaaaaagaccgcaagaataactggccaatttgaatgagatatttttctccaatttctgactaacttatattttagttcctgaaaaaaacatagagaaggacacagatttaggtaatatcagagaactcatggaca

SEQ ID NO: 14981 - DNA, 649 bp, Homo sapiens
aaatgaagaaatgtgaaggtttggataaaagtcagggagaacaacaaaaccaagaaatctcagaaagctatctgcaccaagcctttttctgtgatttcagggaaactaaatattcctaactatgagaaaggggaaagtaccaagttctgtatttacagaaagtcattataagataatatgaygcaaattaatgtgtatgtttgaaggatccttgaggtgtcacctttctggctggatacctctgtggctggtggtgtgtttgcccaagttttgtttgggcctgctgggcttgttctgcccacttggcctggcaggctgcattcggctcatgctaccagtctggatcccatgcctgccaagggtgagccaggcagggagcagtgaggggtagtgtgagtgagtgagcatggtgtttgaccactgttcacagtcaggcacactggcagctgcagcagggcatgcagctctaggtgccagcatgggtgccagctctctgtgaggctgtggctagaccaggtacaccacaagcagcttccacagctgccaccagggaatgtggtgacgcccagaagcttggagactccaggaactgcagggtccaaaagagagagtcacaaccctggctcagggagctcccaggtctagctca

SEQ ID NO: 14982 - DNA, 715 bp, Homo sapiens
ttttttttttttttttatacagagtcttgctttgttgcccaggctggagtgcagtggcacaatctcgactcattgcaaactctgcctcccaggttgaagcaattcttgtgcctcagcctcccaagtagctgggattacaggtgtatgccaccatacccagctaatttttgtatttttagtagagatggggtttcgccatgttggccaggctggtctcaaactcctggcctcaagcaatccacctgcatcagcctcccaaagtgctgggattataggcttgagccactgtgcccagccatcatgttycttccctcttaatgctcagttttatgggaaagaaggacatacaaataaacatagacaaaacaagaaaagtttaaatgtgccaagccagaattataaccaaagtgcccttagcatccagaggagagtggatgactgtctcaagagttagaagggttttgcagaaggatgatttctctttcctcttgggaaggagggatattcaggaagacaagtcaggacatgcaaaagtacagatttgagagagtccatgcactgagggaagaaggccaacctggttggagcacaaaggccatggagtgagtgggcaataagatatgagaagaaggaggaagttatagtctaaatacaaagtcttatctaccaagttcaagattttgaattggtttccatattggtaacggaggctttg

SEQ ID NO: 14983 - DNA, 567 bp, Homo sapiens
acaatggccattaaaacataatgaccctttttggacatttcctgcttttcataatctgacagacaaacccttctctttcaatctttacgacatgatgtaaaatctatctgaatccggaaataccactcttaaaaatcagaaatgaccctctggccacagtaaccattattaagcatcccttgggatacttgagaaaaagcataagcatttgccacagaacygctcagctcttagcaaagggttccccaggactccagagacaaatgagcaactcctccaactaagggcatcccttgatcttggcctcaccctttcctgtcttttatcagttgctgggagagaaaaacagtcaacataaactgagttgcaatgttggcctgggtatttctctgaaggcttcccttgaaagtaactagagggaaggagaaattaacatggaaaatttttttaattaaaaaaatacctcaaggaaatgggcaagtgttgatttgaagcaggaactgacagaaaaaaatatcagagaacagtggcaaatgtgtggctggatcatcagggaacacaaggcaa

SEQ ID NO: 14984 - DNA, 546 bp, Homo sapiens
tttcagtaagactgggcacacatgaaattgacatcctgttaatttctatataacatattcacttttattattatttcttcttttcttattttaggacttttaaaataaaatagctttttaaaaattgaattttataaaaataaatattgtatttttaaaatatttaaggatcaagattaaaacaaagatgaagcttgggcaatatagggagagcctatctctacaaaaaaattttttaaaaattagtcaagcatggtggcacccacctgtagtccaggtactctggaggctaaggtgggaggatcccttgaacccaggaggcgaatgttgcagcgagctgagattgagccactccagtctgagacagagcaagatcctgtctcacaaaacaaaamaataccgttgaagcctagagatgctgtagttatttaataaaatctttgaaaaatagttttattcaggtaaatcactcacttcctttatagttacttttatctgaaatttttccactaattgatttgctaggttgtataatttggaaattta

SEQ ID NO: 14985 - DNA, 625 bp, Homo sapiens
tggttattaaatattcacattttataatgtaatatttgattacttgtgtgatcagattcaccagttactaaaggttttcacaaaccaaacatatattttattaacaaccactttacttatattttttaaatggcctgaaattaaattatcggattgcttgttctatcctgtgtaaattttaagattacagagctcatcatcttttattctcagatctcaggtgttgttttatcactggtacataaatacatatatatatattttgttgttgttgttgtttgtttgtttgttttcttttttgagatgggagtctcactctgttaccragactggagtgcagaggcacgatcttggcttactgcaacgtccacctcctggtttcagacgattttcatgcctcagcctcccaagtggctgggactacaagtgcacaccaccacatccaattaattttgtaattttagtagagatggggttttaccatgttggccaggctggtcttgaactactgacctcaagagatccacccgcctcagcgtcccaaagtgctaggattacaggcgtgggccactgtgcccgcctgtttggtacatatattctaatggatctgtatttcagcaattct

SEQ ID NO: 14986 - DNA, 352 bp, Homo sapiens
actgcctactgtttctgatattagacataaaggaaacacttaaaaaaacctgttaaatgggatgggcgcggtggctcatgcttgtaatcccagcactttgggaggccaaggcaggcggaccacctgaagtcaggagttcgagaccagcctgaccaacgtggtgaaaccctgtctctactaaaaatacaaaaattagccagaygtagtagcaggcgcctgtattcccagctacttgggaggctgaggtgggagaatcgcttgaacccgggaggaggaggctgcagtgagccaagatcccaccactgtactccagcctgggtgacaagagcaagactctgtcaaaaaacaaaca

SEQ ID NO: 14987 - DNA, 352 bp, Homo sapiens
actgcctactgtttctgatattagacataaaggaaacacttaaaaaaacctgttaaatgggatgggcgcggtggctcatgcttgtaatcccagcactttgggaggccaaggcaggcggaccacctgaagtcaggagttcgagaccagcctgaccaacgtggtgaaaccctgtctctactaaaaatacaaaaattagccagatgtagtagcaggcgcctgtattcccagctacttgggaggctgaggtgggagaatcgcttgaacccgggaggaggaggctgmagtgagccaagatcccaccactgtactccagcctgggtgacaagagcaagactctgtcaaaaaacaaaca

SEQ ID NO: 14988 - DNA, 551 bp, Homo sapiens
atgtgttacttatgtgagcatgtaattgatatgttattttaaattaatacgtaaaattgtatccgttttagtgtaaataaattaacaaatcaatattttaaaataataatagtttttaatgtatgatatagttataaaaaggtctttggggtccagtggtaggcagaattcgaaggtggtccctacgtgtcccacccctgagtcgagacatctcctcaaatcctctccccctgagtgagggcagaactctgaggatgttaggagtcagctgactttgagttaataaaaaatgagawgatttggatgggaacagcctggtgagggaagcccttatcaggaactaagtccttcctgaagtcagagagattggactcaggagagggcctggtggggtgggggacagagggccaggagcttagtatttccccatcagcagcagcaataacatcaggtcctcagccacacaccacaaggacatgaactctgcccaggagccaggtttgggaagctgatctgaacctcactggacctcgctggatcccactggagcc

SEQ ID NO: 14989 - DNA, 527 bp, Homo sapiens
tattaaatctaacaaatgttataatttttttttttgagaccgagtgtccctcctgtcacccaggctggagtgcagtggcacaatctcagctcactgcaacctctgtctcctgggttcaagcagttctcctgcctcagcttcctgagtagctgagattacaggcaggtgccaccacacccggctaatttttttttttatttttagtagagacggggtttcagcctgttggtcagtctggtctcgaactcctgacctcatgatccacccgcctcaaatgttataaattttaaataagatattgacccatgygcaatcacagttgtaggtgaaaagtatattacttaatgggtggaagcatttttagttttaagaaaatttcgcattgaaattgtaccaatttgcaatctcactagctgtgtctaagagtatattttgtgttcatacttttaagacggaagttatgtatcatacttttagttctcaattcaaagacaaaacatcatcaatcatggcactgtacttttttg

SEQ ID NO: 14990 - DNA, 527 bp, Homo sapiens
tggctgtgtccaccactgtggagggcygtgccaggcagggaattcagccaggcgaccaagcaagtgacggggcactgtgtccacccagcaaaggcatgtaggtgactgagctggcattggcctcaaatcgcgcaccccctgtggtctggcctgctcccagccggggcatcagccaggctggctaacggttgctgccaggtggaaaatgaaaatgcaggaatggtcagagtgaaatccacaaatttaaaaataggtctctagagccccctcttgtcctgattgctactcaggaagcggctgagaggagatgacaccttcctggaaacagtttcatgtagggaccaaaactccctcctgagatgtggggaccaggatgtgaaggcggtagacatggatgtgaatttaagcttgtgtgtaggaggccttggattcaaattctgatctctcctggaaacacccacacagacacacccagaaatgaagtgtgatcagctgtctgggtatcccttagaccatcaaggtgacac

SEQ ID NO: 14991 - DNA, 896 bp, Homo sapiens
tttagggcagccttatacaccacattttcactccagacaccaaatagtttgctgaatatctgcagaaaagtctaccgaattcttcatgagaaagaaggattaccaacaagtgcttcaatgagatttgccttcccctgccaggcagggcacctacagagtgtttgaatctccttgtgatggtactatgcgtgctaaggcctaatgcagtgtatataatttgttttattcatttgagatcattcagcagggattcagtgcaagttagcctggaggatgttttgtccaatacatttcatttaaaaatgtgttctcccatgataatgtactgttattccaacaarataggtgatgcaaaagtttaatctcagctgtcttggaatgttttgccccttaagaggaactgatatgtaacatctcttttttaatcgcagagtctcttgtaattggttttgtgatatatgttcagcattggagaatcaatgctaatagtgttggtatatttcagaccttttcagatcatagaacaaatgggtgaatctcacttttcagaataccctaagccaataccctagagtgggattagcaatagcatgcctgccttcaggtggatgcatctacccaaggcaccctgcttgcagctcccacttgctccttcagttgggtacccttgtgcagtatacaatctggataagatacataatagccttagaatcatcctcgtgatcactaatacctctctaatccaacactgagtctgtgggaggaaactggaagcaagataatcttataaagaaaaatgtagggctcagagaaaaaagatatggagcaagcctatgaggcagacacaatgatgatataattttcagtagaggagaatgtgatagaaaacttgagat

SEQ ID NO: 14992 - DNA, 508 bp, Homo sapiens
aggcagtctccagagtgcacactatactgtgcattttctctgtttcacgtaagaattattatataagcatatagagaatagttgacattgttgcaatgaatgtgatcactggaatagtgaaaaaagtgtatgtcagacagaaactaaggaacacccaatctactgatggttccctgtagtctttaggtttaccttccattctggcagctcctagtcattgatgtctgctctccaggaccatccatctgggcagcttttccttgtacaagtaccttacaaacaaatccaggaactatctccaagcctgcttttgagaacctgaatggacttgaatttgcactctaaaccacataaattaacccttatgataaactttaagttgactattaatggaactttcttccctttcctactttccattgtatagccttttccagacacgcaaaaacaatgaatgtgatcaaggtcacacatctctctctaaactatckcttttctgggatgcttt

SEQ ID NO: 14993 - DNA, 503 bp, Homo sapiens
ggaggtggatttgcatatctgagagtgaaaaaaattctgctgcagaggcttagtgccaccagagatgctgagcccccttttgtctgtttgagtaagagctggctaaaggctgaaggataattagtcccccgtgggcaacgctgtcccccctccttgaagatttaaaggcgcagcccacatgctcaagccactcgggtctcagccccttcccccacaggccctccccgccccctcgactccgccctaaggaggggacggcagctctggcaggagccgatgaatgagcattttatctgattaaactgggagtgaactggctggtctctattatctgcggacttgattggatatttagcaccaaatgtgtgtgtgtgtgtgtgtgtgtgtgtgtstgtctgtctgcacacatggactgggcttttctagtccgtgtgtcaggaagaaattggattgtactgaaaaacatttaatctgaactcaggagtgcaccctgatagagtcac

SEQ ID NO: 14994 - DNA, 580 bp, Homo sapiens
tttgtattaaggtttcaaaaatcacaacacacctcggtttggactagccacatatcaagtgctcaatagtcacaggtggatagtgacgacctattgaacagcacaactctggaatctccttttccaacacttccctactgcttcaacttcccttccccatccaaaatacaaagtgtctttgcagacattgagttcctgtctccggaagtgtctgagcagagggtgggtgactaccatttggtggtaatattgtggaactctgaataaagagcgtcagtggaagtttggacaacgaaagtgttaaaatcctttctaatccctaagttttgtgatgctgtgatactgagaaaggagacatgaaattgtgggtttggaaagaacttctttccgtattagatgtgctatttcctgccattatctcttgatttgtaattcactcctttgctacttctagtatgaatgcaatgattacttatagggtgctatatagcctataaaccactctcataaacactagtgtttcattcaattatttcytcactcacttagtaaaagcatattagtccctgcaatgtattag

SEQ ID NO: 14995 - DNA, 558 bp, Homo sapiens
tggaccaataagacaataacatttttatatttattattattattattattatttttttttttttttttgagacggagtctcgctctgtcgcccaggctggagtgcagtggcgcgatctcggctcactgcaagctccgcctcccgggttcacgccattctcctgcctcagcctcccgagtagctgggactacaggcgcccgccactacgcccggctaattttttgtatttattattattattttttagatagaatctcgctctgtcactcargctggagtgcagtggcatgatcttggctcactgcagcctccgcctcccgggttcaagtgattctactgcctcagcctcttgagtagctgggactataggcacccgccaccacacccagctaatttttgtatttttagtagagatggggtttcaccacgttggccaggatggtcttgatctcctgacctcaagtgatctgcccacctcggcctcccaaagcactgggagtacaggcgtgagccaccacgcctggccataacatttttatattattctatagaaattaa

SEQ ID NO: 14996 - DNA, 2017 bp, Homo sapiens
cagtgaaatctctttatggctcaagaatgaaatatttaagaaataaaggtatggacagagcaagacttggtctaagaagtcctgacattaactaccagtgttgccatttactatatgatgtcagacggttacttaacttctcagggtgtcagtttcttctaaggttcttttcagctctaaaaatgataagattatttatgatatcagatactatcttctatggcccacacacatacatatgtatgtatgtacacacacatatacctacatatatacatgtacctttattaaataatacaagtatattttgaaagatatggtaacttaaagcccattaagaaacaaagaatgaaagtgtgaatgagtatgtgtgtgtagagggggagtgttctgagcccacacatcattctcagtagttagggcattcacacagcttcaagacacctgaattaaccaagtaagcctttaaacccttacaatggaacattaaaattcaatgtggctataatctcttccttacaaaacatgaacccaaagagtctggcttcaagtatggttttaaaaaagggggaatgtattatattcaccacccagctcttccatatgaccatgttaaaaaaaaccacacaaatgaaaactcacaggcccattgtaatatattgaaccacttctgaatgcaacacttagctcaggcttactactctgacaaataaaggaaagcactttatgaagccaatttaattgggaagtgacagaaaacatacagccattttctttagccttatcactgaattggcttcagctccaatctctggcaaatcccactcaacagaagaaattaaccaggtcagcagaacaggtgctaccttgtgtctgtcaagggcctggcatcaccacaattacttgcacacaatgaagcagtaatctttacagatcatctctcccaagaagcatatttgggagggggaggaaaactgaagggtgaggggagtgggaagaagaaggggaatgggaagcaaagagaaaaggcaagaaaagaaaatgaatgtgcagctgccttgcagctcakcagatgtcggaatgtgatgtacgaggctaggataagctgtcgtagcccgctgccaaagagtggtaagtgattaaaacctgcacagttctaagcaccatatttagaatctgcagggtttcaagacttgcacccattccttgctgtgctgccagatgttggcaactggtccagttcctactgactgtgcatggatggcagcagttggtgtagcagcaaagcaatctggaatgcttccggagatgctgtacattaacaagtgtcacccatcattcacctttacagaaggctgaaacaactccaatttgctgccacttccctcttgggaaacagccaagataaagttgtgcctggcagccccatttgtttcactcaggtgttttagctgccttgctgacctctattagtttaagttttaatttagattaaccccagcaccccaattaaccagcaaggggaaaagctaagatgtgactagtcataactctgaaatcagaatttatcgaagttaaaattattaattgggatgaagggccaatcaagtaatgctatttctttttaaacagacctccaggcaaaaaaaaaaaaaaaaaattcagactaaggattgccaacagaggcaacttctccccagtaatttcactttattttattaagcctatttaatttatgatgcacttttcatcgaacaatgtacacttcaattaatgaggactggaacatttttgattgtctcccgtgatctcacacaattatacagcattaatatcccatatcaggtacttccttagacactctagaacaaaatagagttccttactcttctgacaaatgaatataataagagaagaggaaaaaagaatcaggacctctgacagggaacagctgcagccacaccaatctttttttcctataccctctagtcattacttttaagacttacttatggca

SEQ ID NO: 14997 - DNA, 1127 bp, Homo sapiens
tgcatttatacaatagttgataaaaatattcctctggattctactagaatagaaggaccactgataatagtatatgatattaatcagacttggcttctttttctccggcttcaccagaagctggactcttcttggttttgctttgtccattttctgcaggtaaatctatagttttttggttagcctgatcagcctcttttctctttgctccccttttcccttttctttataccttttacatgtatatatgtgtgtgtgtrtgtatatatatatgtatctataaatatttatatacaaatttatatacaaatatatatttatatacaaatatatatacaaatatatatacacatatatgaaagctaatttttgtaattttttgtctagacagggtttcgccatgttgcccaggctggtcttgaactcctgggctcaagcgatctgcctgccctgacctctgctggcattacaggtgtgagccactgtacctggccctgtttgtactttcctgctgccttttttgacttcatttccacttttcaggagcaggtttagctgacaaccatgcctgtcttcctctttgactctttcttcactttgacttccacctctgtttagctgactttcctcttgggcatcattgcagtggggagagtacatactgggtgctagtgggccatggtgcacagagagcctcagtgagctgggctgccgggccgctcctccaactgcctgagctactgatacccgctcaaagagtgactttgttatgtgtaacatatgggaggtgtattttatgttttgtccacataagaacctagaagcaaaggtactctagtagcaacgagcaaaacatagtgtctagttctttttttttttttttttttttgagatagggtctcgctgtcattcaggagtacagtgctacaatcacggctcactgcagactccacctccccggctcattcgattctcctacttcagcctgctgagcagctgggactacaggcacacactactaccctagctaactttatagagatgggcttttgccatgttgctcaggctggtctggaactcctgggatcaagtcatcctccctaccttgtctacccctgtgctggtat

SEQ ID NO: 14998 - DNA, 1127 bp, Homo sapiens
tgcatttatacaatagttgataaaaatattcctctggattctactagaatagaaggaccactgataatagtatatgatattaatcagacttggcttctttttctccggcttcaccagaagctggactcttcttggttttgctttgtccattttctgcaggtaaatctatagttttttggttagcctgatcagcctcttttctctttgctccccttttcccttttctttataccttttacatgtatatatgtgtgtgtgtgtrtatatatatatgtatctataaatatttatatacaaatttatatacaaatatatatttatatacaaatatatatacaaatatatatacacatatatgaaagctaatttttgtaattttttgtctagacagggtttcgccatgttgcccaggctggtcttgaactcctgggctcaagcgatctgcctgccctgacctctgctggcattacaggtgtgagccactgtacctggccctgtttgtactttcctgctgccttttttgacttcatttccacttttcaggagcaggtttagctgacaaccatgcctgtcttcctctttgactctttcttcactttgacttccacctctgtttagctgactttcctcttgggcatcattgcagtggggagagtacatactgggtgctagtgggccatggtgcacagagagcctcagtgagctgggctgccgggccgctcctccaactgcctgagctactgatacccgctcaaagagtgactttgttatgtgtaacatatgggaggtgtattttatgttttgtccacataagaacctagaagcaaaggtactctagtagcaacgagcaaaacatagtgtctagttctttttttttttttttttttttgagatagggtctcgctgtcattcaggagtacagtgctacaatcacggctcactgcagactccacctccccggctcattcgattctcctacttcagcctgctgagcagctgggactacaggcacacactactaccctagctaactttatagagatgggcttttgccatgttgctcaggctggtctggaactcctgggatcaagtcatcctccctaccttgtctacccctgtgctggtat

SEQ ID NO: 14999 - DNA, 508 bp, Homo sapiens
tgccattttgatagcagcttcgtattccttctctccaggaactggagaaaacttgaggctaatctagccagagaagcagcatcccgtacagattgttcttgtctaagggaatttctgatgttgsagagggaccataaaggatgccaagtgaaacgtccttgcctatctcctgtatgggctccctgacccaatcatttcccccgcttgaatttgcagggaaaagagcatgacatttggcatcagaaggctggatgtggaatcccatcctctcccaccactgcacactgggcactttcggataagtcagttcttctcccaggctggaactcaatccttgcattcatgttataaaggaaaacctacgccctgaaagatggcaaggtcaactgtaagcaaacaaaaatgcaaacatgctgtgtttttgttttagctttagcttttgtcttatttttttcacaaaagatcttcatgtaaccaaactgagttgacagactccttatttcatggc

SEQ ID NO: 15000 - DNA, 508 bp, Homo sapiens
tgccattttgatagcagcttcgtattccttctctccaggaactggagaaaacttgaggctaatctagccagagaagcagcatcccgtacagattgttcttgtctaagggaatttctgatgttgcagagggaccataaaggatgccaagtgaaacgtccttgccyatctcctgtatgggctccctgacccaatcatttcccccgcttgaatttgcagggaaaagagcatgacatttggcatcagaaggctggatgtggaatcccatcctctcccaccactgcacactgggcactttcggataagtcagttcttctcccaggctggaactcaatccttgcattcatgttataaaggaaaacctacgccctgaaagatggcaaggtcaactgtaagcaaacaaaaatgcaaacatgctgtgtttttgttttagctttagcttttgtcttatttttttcacaaaagatcttcatgtaaccaaactgagttgacagactccttatttcatggc

SEQ ID NO: 15001 - DNA, 971 bp, Homo sapiens
gtaatattgtctaccacagagatgagcctgctggaagaggcaggggaaggaagaaaaggagaaccaagagataaaaatataaagcaagaaatgtcatgactaagtcacctggataggcttctcccagatttttctataaaattagcgagtcaatttctttccttaatgtagtttgttttttcactcaacaaatgaaaaaaacagtctctgaaaatagtcatgataaacatttccttccacaatatacctggtattaccatctccaacttgaaatgtctttgtaataccatcaaaaaaaaaaaaaaccataaacttgtggtaaagagccttaaaaatttataataggtattattaagaatgacttctaattagctatttaagaaattttggaagataaaagcacactgtggtgggtaagattgtggctttagagacatacagacttggcttatgtgtcaaatcctggctttgtcacttatgggctgtgtgactttgggcaagttgctcaatcyctttatttctcatctcatgaagcctgaaaaagaagtacatgaaatggcttccaccatgcctaccacatagtaagcactaaataaatgataactattactgattatactattactgcttctaattgttgtcaacattggtagtagtggtatgtcttagtctgttccaactgctataacagaacaccgaagactgagtggcttaccaacaacataaatttatttctcacaattctggaggctgcaaagtccaagatcaaagtgccagtagactcagtgtctagtgagagccctcttttttgtttatagagggcaatttctggctgtgtcttcacatggcagcacagtagggaagctctccagagtgtcttttataagggcactgatcccattcatcagggctccacaatcgtgacctaatcacattgtggcttaggatctcaacatgtaaattttgggaaa

SEQ ID NO: 15002 - DNA, 1073 bp, Homo sapiens
tcactgcagccttgacctcctgagcttaagcgatcctcctgcctccggctctcgagagtagcctggaccacaggcatgtgccaccacgtccagctaatgttttgattttgtgtagagatggggtctcgctatgttgtccaggctggcctctaactcccgggctcaagcagtcctccctccttggcctcccaaagtgctgggattataggcatgagccaccacacctggtcttcaaagggacttttggtgaggatcagagataggagccaccattctagggttcctggagtttgtgagggaaagaggacagaaccgttttggtaatgcttacgggaagcacttcctgagagagaaagaataaaaagcagttacccaagagaatttcctgctcagcctcaagacaagccctgaccctggggactactgacatgtcccacctgtggctgggagggttttctgaggtgggaggtctagacagagcagggggcttgggagccctgatggaaagtgcagggaattcagaacacaaacatagggtaggttctacttgtgagaacacaacctagactctcgcctgcaaactaaaagggaaatctggtcttaccatgtgagattttccacagcagagtaaaatgcatttgggaaatcgaacagaagttatttaaattccctatggctggacttgaaattgacaagaaaaggcccaatagggaatgccagtgtgtccccaggtgtggaacatggcaccarggtagaccttaacatcggtatgtacaaccccacactggtgtattttacaatatttctctttttcttttccttttttttttttgaacagggtcttgctttgtcaccaggctggagtgcagtggtgcaatcatagcttactgcagccttgaactcctgggctcaagcaatcctttcacctttgcttcccaaagccctgggattacaggcatgagccaccgcgaccggcttacaacatttgtcttcgtagctatttttacatgttgaagaaacaaaactagcacaccaaactggtggattttatgaagattgttgtgtaggtttaa

SEQ ID NO: 15003 - DNA, 525 bp, Homo sapiens
aaaacattactgactcagtcgtctccctttcctctttcccccttcagtattttgaacttggtgtggatctttctagtctgtggatttttttaattaatttattaattaatttatttattttttgagatggagtctsgctgtatcgcccaggctggagtacagtggaatgatctcagcttactgcaacctcctcctcctgggttcaaacgattctcctgcctcagcctcccgagtagctgggattacgggcgtctaccaccacgccaggctaatttttgtatttttaatagagatggggtttcgctatgttggctaggctggtctcgaactcctgacctcaggtgatccacccgcctcggccttccaaagtgctaggattacaagcatgagccaccacgcccagcctatattttttaaaataatatccacacaaatacatatatgtacacatacacaaataaatgtatagacccccaaatagcagtcttattttgtgtttttgacatttttcttacatggtttcag

SEQ ID NO: 15004 - DNA, 525 bp, Homo sapiens
aaaacattactgactcagtcgtctccctttcctctttcccccttcagtattttgaacttggtgtggatctttctagtctgtggatttttttaattaatttattaattaatttatttattttttgagatggagtctggctgtatcgcccaggctggagtacagtggaatgatctcagcttactgcaacctcctcctcctgggttcaaacgattctcctgcctcagcctcccgagtagctgggattacgggcgtctaccaccacgccaggctaatttttgtatttttartagagatggggtttcgctatgttggctaggctggtctcgaactcctgacctcaggtgatccacccgcctcggccttccaaagtgctaggattacaagcatgagccaccacgcccagcctatattttttaaaataatatccacacaaatacatatatgtacacatacacaaataaatgtatagacccccaaatagcagtcttattttgtgtttttgacatttttcttacatggtttcag

SEQ ID NO: 15005 - DNA, 525 bp, Homo sapiens
aaaacattactgactcagtcgtctccctttcctctttcccccttcagtattttgaacttggtgtggatctttctagtctgtggatttttttaattaatttattaattaatttatttattttttgagatggagtctggctgtatcgcccaggctggagtacagtggaatgatctcagcttactgcaacctcctcctcctgggttcaaacgattctcctgcctcagcctcccgagtagctgggattacgggcgtctaccaccacgccaggctaatttttgtatttttaatagagatggggtttcgctatgttggctaggctggtctcgaactcctgacctcaggtgatccacccgcctcggccttccaaagtgctaggattacaagcatgagccaccacgcccagcctatattttttaaaataatatccacacaaatacatatatgtacacatacacaaataaatgtatagacccccaaatarcagtcttattttgtgtttttgacatttttcttacatggtttcag

SEQ ID NO: 15006 - DNA, 483 bp, Homo sapiens
gatcctttctggaagcagatagaatgtaaaacatggataaacagatgaatgaatgcatgcctatatagccctgtatcatgagttataaaatgagcaaatgaccaccacactttactgagtgattatcatggaactcctttacaaagaaattttccccaacaaatataaaatatgatttcacttcctaaagttcaatgtatatgccacagtttggggctttttctgtcttacttattgtaggaaaatctggaaatgatccaaaacaaggacaaaaatktcaaatcatctgtaattcctccacccaaagataatgtttctataaatattctttctatgcatgtacataactttttgtaaaacaaacaaacaaaaaccatgactgggcacagtggctcacgcctgtaatcccagcactttgaggtagaggtgggaagattgcttcagcccaggagtttgagaccagcctgggcaacatggcaaatc

SEQ ID NO: 15007 - DNA, 528 bp, Homo sapiens
attaaataatgccttattttattaactgatgagagtaccacccctgaaaaaagaaagggtggtacttcctatcaaataagggtaagtgatttttggtggcactgaggttccaataacagtgttcagtatatcagcaatgccattttgttccagtgatggcaactacacttataagttgtcttttactccacagaagcattctaatcccaaaggaatccaatcctaaagaatcacggtcagtrtcttcatggttaaaaacaaaacaaaacacaaactgatgtggcaggttgcccttttgttttgcattattcagagacttcaataattttattttccatgggtttctaccaacctcgttttattattcttctcattctttcttttgctgaatttttattatacctctcattctttcttttgttggataaagaaaatccagtattaaaatgggtaccccaaaaagagtactgtgaggatttcctaaactgccattctttgtcccatttaggggtacaaagctatgattcc

SEQ ID NO: 15008 - DNA, 514 bp, Homo sapiens
ggttggtgttaacattcaactgcattcctgaagcataygtcagctggggtggggaaggcagccagaagtgtgctaagcatcaggggaaaactggatcaggcttaaaaattaaccacaattaattccataatgtggataataaaaagttcactgtgattctaagtttcctttcaactctaaaatcccagagaccatacaacaccttgaaaagaatgtgctccatcctctctctctgtcgccagtacattgccccaatgttgaagaagcagctgtaacatctagttatatgaccagttttgtttctgctgggccaaaaatctgggtaattgtatcaggacttttctgtcgcatcagagaattacccacaattatgtgagaaaacgaaaatgtctctaacagatgcacgctctttgagcaatcacagggaaatgatgacaggcagctgagagtatttgggcttgtggagtattgatcttccccagatgagaagggttagctattgagacagagaggc

SEQ ID NO: 15009 - DNA, 514 bp, Homo sapiens
ggttggtgttaacattcaactgcattcctgaagcatatgtcagctggggtggggaaggcagccagaagtgtgctaagcatcaggggaaaactggatcaggcttaaaaattaaccacaattaatyccataatgtggataataaaaagttcactgtgattctaagtttcctttcaactctaaaatcccagagaccatacaacaccttgaaaagaatgtgctccatcctctctctctgtcgccagtacattgccccaatgttgaagaagcagctgtaacatctagttatatgaccagttttgtttctgctgggccaaaaatctgggtaattgtatcaggacttttctgtcgcatcagagaattacccacaattatgtgagaaaacgaaaatgtctctaacagatgcacgctctttgagcaatcacagggaaatgatgacaggcagctgagagtatttgggcttgtggagtattgatcttccccagatgagaagggttagctattgagacagagaggc

SEQ ID NO: 15010 - DNA, 514 bp, Homo sapiens
ggttggtgttaacattcaactgcattcctgaagcatatgtcagctggggtggggaaggcagccagaagtgtgctaagcatcaggggaaaactggatcaggcttaaaaattaaccacaattaattccataatgtggataataaaaagttcactgtgattctaagtttcctttcaactctaaaatcccagagaccatacaacaccttgaaaagaatgtgctccatcctctctctctgtcgccagtacattgycccaatgttgaagaagcagctgtaacatctagttatatgaccagttttgtttctgctgggccaaaaatctgggtaattgtatcaggacttttctgtcgcatcagagaattacccacaattatgtgagaaaacgaaaatgtctctaacagatgcacgctctttgagcaatcacagggaaatgatgacaggcagctgagagtatttgggcttgtggagtattgatcttccccagatgagaagggttagctattgagacagagaggc

SEQ ID NO: 15011 - DNA, 850 bp, Homo sapiens
ccagataagttgttttttttttttatagacaaggtcttgcattgttgtccaggctggtcttgaacccctgggcttaagtgatgctcccccatcagccttccaaagtgctggactacaggcataagccaccatgcctggctcttaaacattaacttttagcatcattggtagatttttttcctatgactataaagttaagctattactatttaactaaccatttgtttattttagaagaaatttgttttagaagaaaaattatataatttttaagtagttcttagaaaatagctaaaaataatgaygatgggaacaaaaagaaagaactaataaggaaagaaaaaatttcactttctagtaaaatttagatgaatctttacctgtgaagtggaatttcactgattctgggagacctaaaagagtaagagagacaatcagtatattaaacactttgggatcagagagagataggaaaggtacaaaacaaagggcagaggttaggaagctaaagaatgttttaatctaaattattcttttttaaggaaagatcaccaggtcatttgctaatgttatgttgaatttaatggtgtcaacattaattttaaatagcaaaaaggaccacatagtggaataattttatatcgcagcagttagcgtgatttataatacattcattcagaacccattttatcacagtacataaaatcctacaaatcggtgaatgcgggtgagtcgtatatcactgacagggctctcaggtgggtcaattccattgtagaactgagtgatgccgagacattgatttacacactgtaaccatgtgagagatttatcttgcagcatttatccc

SEQ ID NO: 15012 - DNA, 642 bp, Homo sapiens
gcattaggcccaagatatgggccaggcactgggctgtgtacttttatccatgatttttctcttaatttgcacaatcactcycctatgaggttggtagaataaaaacccacctagatctggcttaactcaaaccataactgaactgtttcattgccatctgtaatttagtctcctaatcagtctgaaccagttcctgtgtgggccagttttaaagacaagtaatacttgtggagcatttttcactggcagctccactaatctctcctggctttatgctggtgatcagctaagggatggagagttattggcttgttcctttttcagacagcaatcttccatgtatttaaaaacaactagccatctggtacaatatggtggctagagaaaaagtgcagaacatttggagtcagacagatcaggatttggctctatctcatcatacctgtgttgcattaggcaaattaatttacttctctggggctcagtgtacttatctgtaacatgaggatgacaaaacctatctcactgggacgttgtgaaggttaaatcagatgatcattgtgaagtgcttagcttgcaatacacacacacacacacacacacacacaatcatgcaccgcataatcacgtcaacaatggacc

SEQ ID NO: 15013 - DNA, 559 bp, Homo sapiens
caaaaaaccatttcacacttaactttgattacaagtcaaccttctcttgctaattcagcacgcttgctacgagttattggtttttctcatctcttcctgaaagtgaagcaaatgtcccttctcccatgtgaaatcctcaaactttcactaactcctccaaagttccactcttgacaaaacgtaagctgagtgagtctgagatactccatcaacaaaatcaaacatgttcaaaattttgcaaaggggaaaaaaacccagcagagcaataggtcttattmtcggccggatgcagttgctcacacctgtaatcccagcacttcgggaggacaaggcaggtggatcacttgaggccaggagttcaagaccaggctagccaacacggcgaaaacccgtttctactaaaaatacaagcattagcctggcatgatggcaggtgcctataatcccaggtatttgggaggctgaggcaggagaatcgcttgaaccccaaaggcggaggttgcagtgagccaagactgcgccactgcactccagcctgcactagagtggtattccttaa

SEQ ID NO: 15014 - DNA, 619 bp, Homo sapiens
ggctggagtgcagtgtggcgctatctcggctcactgcaagctccgcctcccaggttcacaccattctcctgcctcagcctcccgagtagctgggactacaggcgcccgccaccatgcctggctaatttttttgtatttttagtagagacggggtttcactgtgttagccaggatggtcttgatctcgggttcaagcaattctctgcctcagcctcccgagtagctgggattacaggtgcacgccaccatscctggctaattgtgtatttttagtacagacggggtttcaccatgttggccaggctggtccctaactcctgacctcaagtgatccacccgcctcggcctcccaaagtgctgggattacaggcttgagccaccgcgcctggacccgtggctctctgagttttaaggctgcttcctcctttcattcaaatttcccttttcttcagcttagatcctctgcctacccttatttcttctcctactttatgcaaagcaaagaagagtcaataaaataaaaagcaaggctttaaaagccaaaaccgacaggcagagcaaagaaccctggcctcctttgagaacctacaatctcctctggattttgcctgttgctttt

SEQ ID NO: 15015 - DNA, 1574 bp, Homo sapiens
tcgctaagtctgggggcagagcctaggaagttgtattttttcatttaaaagatttttttcttaaagacacagggtctcactacgttgcccaggctggttttgaacttctgggctcaaagcactcctcccaaaagtgctgaggttgcaggcrtgcaccactgtgtctggccaggaatctgtattttaagagctctctctcaggtgagtctgacacccagttgggtttccgatctgctaatgatgatttccatacggatcatggaatcaggttgcctggttttcatacagagacagtccatatgtggccaatggcattttggaaatgagtattagggaataacaaaggctctgccccaggagtgtcagcaggagtttggcactcaatgtggaaacgaggaggaccagggacgaggccctcccacacccctgccaggggcagcgccgtcacctcagctcctggcttgttttgctcacacccctccagtggagttgaaaataaaagaaacagggggagtagtcaaatcatttccccatccctagagctgcctcttgccattgtcaggaaacagcagcccacaaagagggcaccccagctgggcagacccagacatctaggcagccagtcagagcctgcaagtagggcggtgagaggcagggagtaactgagcatcacacagagcactttctgcaggcaaaaccacacagcaggtagtaagggaacttgtggaactcattatgccaggaagttgtacatgctagatagtataaataacttctttagcaggttagagaaataaggagttctagaagggacctctctatttttctctattttgtgaggaaaacaaggactatcctgagctggatccttcagttccaagttgacttcatggaggataaccacgcccttccatttcatagtccccaacactgctgacagatgcagctggcagcccgtgatcctgagccggaattaaccagaatagaggtatttccttgtagttcacaaatgcctctgtaacactgatggattttaataagtgtcatgcaatctctctaaccttgtttcctcatctgtaaaatggatcacgacttcatggggttattatgaactattgtctgacaggtactaaatgttcaataagtattggttactgctattatgcaagaaaagggctccatgatccagcaaacataaaacctcagactgaaaaagcaaaacgggtttccttagcacagggcttctcggagcctttgactatgctgagcctcacagtattccaggaggggtatagtaagtaacagctggttctgggaccacttttgctcagagcattctgtggaatatgggtctccagaacattctctgagaactattactcagtctatttaaacacacaaatataactctgtataagagggaggacactggctggccgtggtggctcacacctgtaatcccagcactttgggaggctgaggtggacagatcacttcaggcctggagttggagaccagtctggccaactctgtctctactaaaaatacaaaatttagctgggcatagtggtggg

SEQ ID NO: 15016 - DNA, 1574 bp, Homo sapiens
tcgctaagtctgggggcagagcctaggaagttgtattttttcatttaaaagatttttttcttaaagacacagggtctcactacgttgcccaggctggttttgaacttctgggctcaaagcactcctcccaaaagtgctgaggttgcaggcgtgcaccactgtgtctggccaggaatctgtattttaagagctctctctcaggtgagtctgacacccagttgggtttccgatctgctaatgatkatttccatacggatcatggaatcaggttgcctggttttcatacagagacagtccatatgtggccaatggcattttggaaatgagtattagggaataacaaaggctctgccccaggagtgtcagcaggagtttggcactcaatgtggaaacgaggaggaccagggacgaggccctcccacacccctgccaggggcagcgccgtcacctcagctcctggcttgttttgctcacacccctccagtggagttgaaaataaaagaaacagggggagtagtcaaatcatttccccatccctagagctgcctcttgccattgtcaggaaacagcagcccacaaagagggcaccccagctgggcagacccagacatctaggcagccagtcagagcctgcaagtagggcggtgagaggcagggagtaactgagcatcacacagagcactttctgcaggcaaaaccacacagcaggtagtaagggaacttgtggaactcattatgccaggaagttgtacatgctagatagtataaataacttctttagcaggttagagaaataaggagttctagaagggacctctctatttttctctattttgtgaggaaaacaaggactatcctgagctggatccttcagttccaagttgacttcatggaggataaccacgcccttccatttcatagtccccaacactgctgacagatgcagctggcagcccgtgatcctgagccggaattaaccagaatagaggtatttccttgtagttcacaaatgcctctgtaacactgatggattttaataagtgtcatgcaatctctctaaccttgtttcctcatctgtaaaatggatcacgacttcatggggttattatgaactattgtctgacaggtactaaatgttcaataagtattggttactgctattatgcaagaaaagggctccatgatccagcaaacataaaacctcagactgaaaaagcaaaacgggtttccttagcacagggcttctcggagcctttgactatgctgagcctcacagtattccaggaggggtatagtaagtaacagctggttctgggaccacttttgctcagagcattctgtggaatatgggtctccagaacattctctgagaactattactcagtctatttaaacacacaaatataactctgtataagagggaggacactggctggccgtggtggctcacacctgtaatcccagcactttgggaggctgaggtggacagatcacttcaggcctggagttggagaccagtctggccaactctgtctctactaaaaatacaaaatttagctgggcatagtggtggg

SEQ ID NO: 15017 - DNA, 1574 bp, Homo sapiens
tcgctaagtctgggggcagagcctaggaagttgtattttttcatttaaaagatttttttcttaaagacacagggtctcactacgttgcccaggctggttttgaacttctgggctcaaagcactcctcccaaaagtgctgaggttgcaggcgtgcaccactgtgtctggccaggaatctgtattttaagagctctctctcaggtgagtctgacacccagttgggtttccgatctgctaatgatgatttccatacggatcatggaatcaggttgcctggttttcatacagagacagtccatatgtggccaatggcattttggaaatgagtattagggaataacaaaggctctgccccaggagtgtcagcaggagtttggcactcaatgtggaaacgaggaggaccagggacgaggccctcccacacccctgccaggggcagcgccgtcayctcagctcctggcttgttttgctcacacccctccagtggagttgaaaataaaagaaacagggggagtagtcaaatcatttccccatccctagagctgcctcttgccattgtcaggaaacagcagcccacaaagagggcaccccagctgggcagacccagacatctaggcagccagtcagagcctgcaagtagggcggtgagaggcagggagtaactgagcatcacacagagcactttctgcaggcaaaaccacacagcaggtagtaagggaacttgtggaactcattatgccaggaagttgtacatgctagatagtataaataacttctttagcaggttagagaaataaggagttctagaagggacctctctatttttctctattttgtgaggaaaacaaggactatcctgagctggatccttcagttccaagttgacttcatggaggataaccacgcccttccatttcatagtccccaacactgctgacagatgcagctggcagcccgtgatcctgagccggaattaaccagaatagaggtatttccttgtagttcacaaatgcctctgtaacactgatggattttaataagtgtcatgcaatctctctaaccttgtttcctcatctgtaaaatggatcacgacttcatggggttattatgaactattgtctgacaggtactaaatgttcaataagtattggttactgctattatgcaagaaaagggctccatgatccagcaaacataaaacctcagactgaaaaagcaaaacgggtttccttagcacagggcttctcggagcctttgactatgctgagcctcacagtattccaggaggggtatagtaagtaacagctggttctgggaccacttttgctcagagcattctgtggaatatgggtctccagaacattctctgagaactattactcagtctatttaaacacacaaatataactctgtataagagggaggacactggctggccgtggtggctcacacctgtaatcccagcactttgggaggctgaggtggacagatcacttcaggcctggagttggagaccagtctggccaactctgtctctactaaaaatacaaaatttagctgggcatagtggtggg

SEQ ID NO: 15018 - DNA, 578 bp, Homo sapiens
tttaaaatatacattgatcatctttcctgttgtgttagctttatttcctggggaagggtaaatacccatccatcattctacacaagtcactgggtgacrtctgtagctccaccaacctggtcaggcttattggacccatttgcctggcgggagtttccatcaagcctttctgggcctcctcaccaattatctcttcagatttgggatgtttttgatgagtgttttgacaagaacactgtttccccaaagccgagccaaccaaaccgctacatggtgaattggaggtgaaggaacactcgtctataaatagttccccatgggatggcctggttttgcctgtcctgtgtgttcacccagcagcctgcatgccgctggccagcttttagcgatgttgtggcaaccagggagtggaccaagctgcagcttcatgctgctgaggaggccgcagccgaccgaagtctcgctctcctcaggatctgtatggggtacccattcagaagccacctgtgtggcctcgttgtttttttcaaggtttgaataacaaaggcagcttttgttgtttgtttgtgactgctaac

SEQ ID NO: 15019 - DNA, 574 bp, Homo sapiens
ttcattttacttctttaaagaccctacctctaaatatagttacatccgaagctactgggggataggacttcaacgtatgaattggggagacggtgacaattcagcctgtaacacacctattttccatctcaaaccctatccttaggaaaacattttaactggcatttcttgggcacatgtttccgctcagtactgagccgatttacttctgtttcttcatttagtttttccaataacctcaaaagtattatcacatcattttgcagataagcaaactaaagtgcagagagcttaatgacaagccaaggtcccacagtacggtaagggccttgaaccccttcttctggccaagtccatggcttctacatcaggtttgctgatggattctcaccatatgatattagtggctgataacacttaatctgttaccctccctggttgttctgttgcagtggtggctggtggccagccagccacagcagagcaaacactstgttctcatagtctcttcctccataaaggttttcctcacttcccattgctgtgttctcactggatgtctctgccttttcat

SEQ ID NO: 15020 - DNA, 589 bp, Homo sapiens
aagagtatagttgttagcctgaagattttctctatatacttttgcttgagttttattcagattggttttaagccttacatttgagccatatattttaatttaagctctatttgaatgtaaataagcactgtgtgtgtgtgtatatctatggaaatcagtttatttttactttattgggagatttaaaattttaattaaacatttctctgtgtttattttccatattccatcagtgagtaaattttagtttagaattacagctttacccagggtttatgtcatcaagttcccttcaagtrgattacttgcaaggaaatcttactttgatatttcctaaatattaagcaattgatataaaagtttgacttaattacttgatttatagaattacttggtctataaggttaattatttggtcatattgaataaatcagattttttatattctttggagatacgtgctacatccttttgttaaaaagtctttttagtgatactaattctgtgttcagtgtgtgaaaagtaaaataccacaattttaaaagtctaattatttttaattttgtttaatgacagagatatagatcag

SEQ ID NO: 15021 - DNA, 526 bp, Homo sapiens
tggaactaagctatctccaggtgccatattgacttcttctgatcagagctactaacaagtagccttattatcagccagacactctgctaagcacacaccatagatgatctcatttaatgctcacaacaactccaactctatggggtagatatgcttcttgtttccactatatggatgctatgatttgaatgcatgtgtctctacagaattcatttgttggagctgaacctccaaggtgatggtattaagaggtgaggcccattggaggtgattatgaatgagattggtgmccttttttataaggctcaaatggactagtcagctcttctgtcccttccatcctgtgaggacactgcatctgttctgtccagaggatgcggcaataaagtgccatttcagaagcagaacacaagccctcttcagacacttgccttgatcttggacttcccagcctctagaactgtgagaaaagaaaaagcaattctgttgtttataaactacctccagtattttgtctcaggcattt

SEQ ID NO: 15022 - DNA, 535 bp, Homo sapiens
gtccatcctggagatgttccccaatcagagaggagggtccactccttcactgcaagcttttggactcacatggagttctgggctttcctcaagcttggggtccctggagccagactgcatctgcggggaaggtctgtcctgcttcctagctatggaagccacattgcatagtttgcccttgttctctgcagactcagctgctggccctttctcagactccagcggatacctttgctggattcttgctgcctttattacagtaatctacatactaaactgaaataactggcatttctgtctgtcttcctaactgatctcggaaatagaagcttccttatttttactttaatttcaagcacaaagtgtcttatacaactagggtttcattatgtgcttgataagtgaattaatgaatgtrcagagccaatgggcaaactttacaggacatttgagcctattgggaaaaaattctaacagccagagctgtccaacaatggaagaggctgccttctaaggtagagaactccccatcatc

SEQ ID NO: 15023 - DNA, 535 bp, Homo sapiens
gtccatcctggagatgttccccaatcagagaggagggtccactccttcactgcaagcttttggactcacatggagttctgggctttcctcaagcttggggtccctggagccagactgcatctgcggggaaggtctgtcctgcttcctagctatggaagccacattgcatagtttgcccttgttctctgcagactcagctgctggccctttctcagactccagcggatacctttgctggattcttgctgcctttattacagtaatctacatactaaactgaaataactggcatttctgtctgtcttcctaactgatctcggaaatagaagcttccttatttttactttaatttcaagcacaaagtgtcttatacaactagggtttcattatgtgcttgataagtgaattaatgaatgtacagagccaatgggcaaactttacaggacatttgagcctattgggaaaaaattctaacagccagagctgyccaacaatggaagaggctgccttctaaggtagagaactccccatcatc

SEQ ID NO: 15024 - DNA, 555 bp, Homo sapiens
tatgaaagcctgcttagatatraggggagcccctgtcggattttgagccaggaaatgaccagatcagagctgtgctgtaaatctgtatcatgcacctttcactttgtactaaaatgacctcttcccttgtttctgttcccagaccctgtcttggagctccttagggaaacgtattcacgttattgccccagtgccttgcgtagtgcctggtattcatttgctaaatgagtgagtgaataaattaatgaatgagtgaacaaactctgctacctagttgtattctgctattttggcttccttcttttttcctgcgctgttcctgattttagttgaggattaaacatgggctctgcaaacaggccctaaggctgtgagtctgtgtgtgtatgttttacatcagccaaaccaaataaacaaacacatggcagaaccccaggcatgtggctccctcacttggcacagccagctggcacgtggctgcccctccccagcttcccagcacctccccctggagtcaggatgctgcctagaggcttggctgtggatttgacaacc

SEQ ID NO: 15025 - DNA, 555 bp, Homo sapiens
tatgaaagcctgcttagatatgaggggagcccctgtcggattttgagccaggaaatgaccagatcagagctgtgctgtaaatctgtatcatgcacctttcactttgtactaaaatgacctctycccttgtttctgttcccagaccctgtcttggagctccttagggaaacgtattcacgttattgccccagtgccttgcgtagtgcctggtattcatttgctaaatgagtgagtgaataaattaatgaatgagtgaacaaactctgctacctagttgtattctgctattttggcttccttcttttttcctgcgctgttcctgattttagttgaggattaaacatgggctctgcaaacaggccctaaggctgtgagtctgtgtgtgtatgttttacatcagccaaaccaaataaacaaacacatggcagaaccccaggcatgtggctccctcacttggcacagccagctggcacgtggctgcccctccccagcttcccagcacctccccctggagtcaggatgctgcctagaggcttggctgtggatttgacaacc

SEQ ID NO: 15026 - DNA, 719 bp, Homo sapiens
ggttactatagcaggcattgtgtgttgttcttcaatcaccattcttcagtggtaatataactcccacattttcggtggctattaacaacaaaaactgtgtcttccaacctcctctgagcaaggtgtgaccatgtgacttaatcctgttacaatcaatgggatttacatagaaatggagtgtgcaactttaaccagtgtccttaaagagtcataatgtgctctttaccttctttcttcctttctgcaggatggaatacagatgtgatggctggagctggagtaatcatcttgggccataaatgaccttagcagtggaggtcatgcacagcaaggtagaaacaaaccatggaacaccatgcaaaccgtggctgtttctttcaaactttcaatgagaaagaaagaaactttgattcttattaagccactgctatttcaggattttctaaccctccagctgatcctaattttaattaattatcacctacagcaggggctagaacacaaatgccaccaggagccagataggcaacataatttagtgatgcctacagagagccagagtctaggaatgcatttatttattcattcatttttacktatttagtcattcattttttcatttaacaagtatttacaaagctgcattatgtaccaggcactcttaggcatcaagaaggaaaagataaatgggctcagtcctttcttagagaagatctggg

SEQ ID NO: 15027 - DNA, 554 bp, Homo sapiens
ggcctcaagagccccgttacggaattttctggggtttaaataccctctagaggtttccatcggttacttggtgtacgtcctatgtagatgaagaggatggagtgaagttatatagtcatttactgggtgcatgccctatgtaaatggagaggatatttcctgtcatcgccgaagtgtctccatttgatttcgttctgttctgggaagtcagcgtgaagcggccatatgttccctgcctccagaccctattctcctgcctcagaaggacactgccaattgttatctccatttaagagataagaagaccgaggttcagagagcttaagcaccttgcccatggtccactaaggaacattttctaccccacaaagaggtagaaaacacaytcaaactgcggtccatccatgccaaagtctgcacaccttctgaggatagtcacaataatggctgatgattgtcagcactcaacgatcaccccatctctgctgtacatctgccatctcatcaactcccttcattcatttattcatccagctaatatttattggcctctg

SEQ ID NO: 15028 - DNA, 537 bp, Homo sapiens
agattttgtctctgtttctcctgtcacatatttctcaaaaactgcatgcttactgtaaatacatagagtaacttcatttccatttttggaagttgaaaagccctgccactaagacagggctctggggagcttgccctccacccatccactattccaataccattcaaggtgcagtgctggtcctgtcccacctattccaactaaaaccacatgtcatcagtgaattattgtgggcaatgcaaaaagggaaggtggagcagagcagcgatggtgaagagagagaatctgtaagaaaatagggagggtcaagggccactgagaaacctgtgatggtaggtaacagagaaagacttccaagcaggaaaacgaggggaaaacgagggatgttccatttgatattattgtttacattgttgcaagtagaacatcccccaactcagagtcaaaccttctgttaagtcagtatcacacatgtgatgtatgagtctattttcstgcagaaattaaaggaaaaaactggttttcatatttgaatca

SEQ ID NO: 15029 - DNA, 573 bp, Homo sapiens
attgtcttggaccacacataaaatacactaaaaacagctgatgagaaaaaaaaaatactaaaaaaaacccctcacattttaagaaagtttacaaatttgtgttgggttgcattcaaagccatcctgcatgtggcccatgggctgtgggttggacaagcttgaaccagacatatggctctcaaacctcactatrcattagactcacagagcgtccggcaccaactccagaatttcgatttcaggagatctagggtgcacgcaacaatttgcctttctcgtaagttcccaggtgatactgatgctactggtctagggactgcatttagagaacccatgagctaaatctatggcttctgtttccttagacagaaggaaaaagaaattatgacctgaaggactttgaattcttaggctccatcagggctgtcttgggataagtctcaggaggaaatggggcggcgctaagtctctccaaggccaaatctagagttcatttaaagaagcaatcctgttagaggagcctgcttgcattgtgaagccccaacccacatggctaagggaaggatagtgctc

SEQ ID NO: 15030 - DNA, 636 bp, Homo sapiens
agagatttgattctaatttgggtggttataaatagtaaacccaggctagggtttcttttgaacttaagagttattggcattcttctggtttgatcaaggtgagcacttcctcatcatccaaaatgacagtggaagcttactgtttactaggatgtcagggattggtttggcttggaagtaatgatattttcatctgacattagaaatggatgtcagaggaagcactgttgcttcataggctgtagaaaatttttgcattggtattcagagttcaatgggaagtcaaattgaagttctttgccacaaaggagaatgtcttaagcgtatatatacagtgaactcgtagttggtactaactgggttgaatattatgtcagagaaatattagataaaatattagcagcagtaatggtaatttgtctaaagaagctcaagagatgggtggccaccgataatatgaagggaaacagtgtcagagcagtaatgagctagacatggccacgtaatgagataattagagcactaggagagagaactagctgtgagatgttattataaagagtatctgggaggactcttccactagactttttggagaatccacctagtaacwcttagtgaggagaccagagccta

SEQ ID NO: 15031 - DNA, 573 bp, Homo sapiens
aggcaaggaggagcaagtcacatcttacatgaatggcagcaggcaaagagagcttgtgcagagaaactcctgtttttaaaaccatcagatctctaacaattcccgtttttaaaaccaaaaactctcattttaaaaaccatcattcactatcatgagaacagcccacccccatgattcagtcatttcccactgggtctctcccacaacacgtgggaattatgggagctacaagatgagatttgggtggggacacagagccaaaccatatcaagtaccaaggaatttgtggcgatctgtaagctgccacactttataatgtaatagtggccattaaaaagtattatactgctaattattgaatagcaaagaggatgatcattttgagtaacattattttggttgtgattataagcaaaataatttgattttcaaggaaattctaaaagaagaaaaatatattacataatggtggaatgtttaataagtaaaataaaataaaatgcttctatggcaattcctttgaagaccagcaggtatttataatgttttgaaaagtttatgcaagctrttatc

SEQ ID NO: 15032 - DNA, 536 bp, Homo sapiens
gcgagaccatgtctctaatttaaaaaaaaaaaaaaaaaggccgggcgcagtggctcaagcctgtaatcctagcactttgggaggcttaggcgggcggatcatgaggtcaggagttcgagaccatcccggccaacatggtgaaaccccgtctctactaaaaatacagaaaaattagccgggtgtggtggcggcgcctgtagtcccagctactcaggaggctgaggcaggagaatggagtgaacccaggaggcggagyttgcagtgagccgagatcgcaccactgcactccagcctgggcgacagagcgagactccgtctcaaaaaaataaaaataaaaataaataaataaataaatagataaaagaaagcgtggtcagacttgagactgtgtgttaataaggatatatgcatttccatccctgaagtctcctctgcagggaactaggtagcggggagccttgggaagccccctaaattcttcctgcaccccagaaacacacacacacatatccatgcctccaactcgactggtccca

SEQ ID NO: 15033 - DNA, 536 bp, Homo sapiens
gcgagaccatgtctctaatttaaaaaaaaaaaaaaaaaggccgggcgcagtggctcaagcctgtaatcctagcactttgggaggcttaggcgggcggatcatgaggtcaggagttcgagaccatcccggccaacatggtgaaaccccgtctctactaaaaatacagaaaaattagccgggtgtggtggcggcgcctgtagtcccagctactcaggaggctgaggcaggagaatggagtgaacccaggaggcggagcttgcagtgagccgagatcgcaccactgcactccagcctgggygacagagcgagactccgtctcaaaaaaataaaaataaaaataaataaataaataaatagataaaagaaagcgtggtcagacttgagactgtgtgttaataaggatatatgcatttccatccctgaagtctcctctgcagggaactaggtagcggggagccttgggaagccccctaaattcttcctgcaccccagaaacacacacacacatatccatgcctccaactcgactggtccca

SEQ ID NO: 15034 - DNA, 1418 bp, Homo sapiens
gggattacaggtgtgagccactgcgcccggctgcattgtaacaaaactttattatattattaggtgaatattagagtttattacattaatattcagagtaattctcagttgtacactgatattgccatctcaaaaagattaatttgcccaagtatacatagcttataagaggtgcagtccacatctgacacagaacagactccaaaatcattaatctttcactgttctagtctgcattccttagtgcttcaacagtatctcaagaaataaacatttctggatattaagaatggataacatttcactaacccaaggagtatgactagaaatgagatctttgaggatttttagatttaatcgagtgtgatccygtctgtagtcagcaaccacatgacttttcaagtttttttatggagtcaaatagcaatgatggccttctaattacactatattctggaaatgtattaaagtaatttagaagtgtgaggaattccattcagcaactcctcatgatccttgcaggctgtacgatggggttgaatcatacacaacttaaccaggtgaactcaacagtcaatgttgtgagaacagtgggtgttatcaaccctgaaacgtgctacacagattggggatgctatgagaagaaagtgtgaaatgattttttggatttccttatcatcagacaaaatgcagttattgttcatgtggatttgtggtggtgactcctttgaaagtcattgttggaaaataaaatgaataattagttgataaccacagagaaactttaaccaccttgctgaggattctgtgtattccaaatatgttaatgatttaatataatatcactctttaacaatcaagagtttttgtttgtttgagatggattttcactctgttgcccaggctggagtgcagtggtgcaatcttggctcactgcaacctccgcctcctggggttcaaacaattctcctgcctcagcttcctgagtagctgggactacaggcgtgagctaatttgtgtgtgtgtgtgtgtgtgtgtgtgtgtgtgtgtgttttgtagagatggggtttcactatgttggctaagctggtctcaaactcctgacctcaggtgatccacccacctcagcctcccaaagtgctgggattacaggtgtgagccaccgcacctggccagtctaagatatttttcaaggattactttgatcatgcatgatttttaccttgtgcaccgattttagaaattaatctcagtgatatatgcaattccattgtattagtattttacagatattgattctggcatacattattcttgatcaataatactaatagtaactaacatttttgaaggcatagtaatagtacatacaggcacaatgcttacattctttatatgggtatctcaattctattagg

SEQ ID NO: 15035 - DNA, 890 bp, Homo sapiens
aaggaatgtgtttccaggggtgtttgtgctgaaataaaaaaaaaatgtgataatcattacatggatagtcaataattataagcatttcctcttggaatcacagagaaaaaaatacagggaccatatcaaactcaaaaaaaaatcactgaatttctatctggtatattaaggcacctggttggggcctatggccacacttcctttcaatgctgctgcattttgacattatttgtaaccctgattgaagttgccacactattttgctaaaagtagtgctgaatttgyccaaatgtttttttcttaaagtgaaacactctagtagaaccaaagccgcaactgtcaaaaaatgcaacattatattttgtatgtcaggtacattctaacctgtaagtggcagctgattctagttctagggaaaggtcaagatgcattacaaaatgagatcttcgcgggcaattacaggcaccctcgaatgtcatacggtatgtatattaggtcgtatgatctgtacttaaaaggggcatggttgctgcttcagagactaatatttcaaaatgtagtaggttattttccaccacacattcttgtctttttcactagttcaaagcaaatggcctagaagcttgggcagattccacttgctcaactcaaaaaagacttaccttcttagttttttcttctgctgtttaatgcccacaatttaaatacattattttaaagaccaagtgaaatgtcctaaataaaggctatttgcacgtcaagttgggatgctctcaactgtgctagaatccatcttcaggtttcacttcccaaatctctgtccccctttaagtccaaagggattcataaagcaaagtaaccccaagcagggactaaacagcaaccggttg

SEQ ID NO: 15036 - DNA, 489 bp, Homo sapiens
gagaaatccattccacattgcctgcataaagatgtaaagctgatgcataaatcttaactttaagaagaggtaaattcaaaccagagttaggagctcgtgccttttgaggccatagcaggaatattaatgactcacagttatgtaattatttgagcctrtttatatctcaggaacaccaaatgccatttctcttcttcttgaggtatccattcagactctgcgagtttggagtattagtgaaacccactgcctgccatggccgtcctgttcagagttcactgcatttctttgttggacagaagtctttggcttcttttctcttttgtttatttgtgttcatttggtggaagaataactccttcatccctgagctggtttgattgaaaaaaagaaattcagaacttgttttcagtctgttccttttaaaactgtccccttcatcccaattttgctctcaagagatataaccattgtggaaattaaattata

SEQ ID NO: 15037 - DNA, 381 bp, Homo sapiens
cccggccccctgtacttcttttttctctttgccatgcttctgtttacccattactgccaacccatttgaccctccttgcttaggaattgctagcatttattttctttactactcatttggtatgcattcatattatttgaagacttcatatattgtctttttatttaagtttataatagtgattattgtatttctgttttctstataatggcattgcaaatttaatgagagcttatttacttatgtggatccctcccacacctaggcatgtctgttacatgatgaccattagttaaatgaactaaagaatgattgagcttatattctgtagtatcgtatttggaagttgtgtgttcaataaaactcttttagtataattca

SEQ ID NO: 15038 - DNA, 559 bp, Homo sapiens
tctcaggcattaccctcagaaggaggtgggatgtggagtgtcacccaccggccacaccagcagggagaggagggcactcaccactgagcccagggacatgctttggggtcatttaatgatagcaatttgggcctctggacagttagttcatgaaatcttggttctttcctattgtggtgaacttttgatcagcttggttttagcaaaaatttccaccgaccatgggaggaaaggctcatcaaagtatctgtccttttatcctgggaatccgaccctttagatggttggagagtgttgggtaatggaatagggactctgggggtggtggggcgggtgctgaactcacctgacttccctggagcccgtgaagtctgaggctcttcttctcacaccacttcttctgcrtgagtcaaagctgggcaacccatccaagatcaaagcagcatgagaggcaggaaaacagaaggaggtcagctcagctcctgctttctaacatcaaatcccatggacagccacacaaaacgttaagaaaaacgacctgaaaagaaacatatttaag

SEQ ID NO: 15039 - DNA, 1509 bp, Homo sapiens
gagagtctcactagatccttgttcaccacatcaatgctctgctcattcctctcatcaaacaagggcaattttgtcagtttcaatgggcagtccttaggaattcaccttacgggctgctttcattccttytaaattctttttgtttcctaatgataaaaagtctccttgccttgcttggaaagatgagagaaagtctccttgccttgtttggacagatgagagatgagatcctcctcttctctcccaggacagaatggtgagacttgagtttcctttctcctcactcttctcctccttgagggagctgctgtgccggacagacctgcccccgtgtctagacactggtagactcgtttaagttcctcacaggcaatcctccatggggtcaaagtggaaggacttatttcttcagggctcagtagtccacatcctggcgcgcaccttcaccagcccagggcggggtagaggagggtgaaagggcgtggctcagagcccgcttcttccgctcgggcgtatcctgggaggaacccttgtccggtgagcatgtcttcgtctctaccaaattccctagtgggacatttctggcagccctacttgttcagcagcttacgggggtcaggtggacctctgctagtcaccagcctgaagccctttctccatttcagctattttggcagttgcctaggtgacttttgaacctcattatccagaacagcaaacggacgaggggtgagaagagtggccgtctgggtttgcagcatagtgctgccttctaggagttgtgcagtcttcgattgtgtgaaacttcacctggctgatttgtggcaatgcctccacaaattcgctaaattcagtagcttttgccttccaagattcatttacacaatgttgaatgctttaaatgaatgagcatgaagagagctggcctggaaagtgatgagatggatggtagggactcctcggagtagaggagtagagttttactattatgactaggaggcaaataaaaagaagctgaacgtgatccataataaaagaagcacacactcacagagctccataccaactacattaaaatggaaatcatgatatttggaaatacaacttaattggaaatcattaagtaatctcatcaacctttttacagtgggtggcagggctatggagggaaaacagcaatggttctggcacctacttaacttgattccattaaattcacccaacaggcctccagagaacatattactgctttgatattacaaagggaaaaacagctatggcgtctctgaaaagcacaacgtgctaggactggaatgactttaaaaccacacataaatttctgagagatttttgccataaggtaccatccaccttactgtaaaccacatcctaaaattgtctgcagtgcaaatggattatgtgcatccaacaggaaacagcataggttgagaagctgttacttaatagcttcattgtcaccacgagtgtaaagtgtggggtctcatcact

SEQ ID NO: 15040 - DNA, 648 bp, Homo sapiens
cccccttccctggtaacaccaatattccaccatcctaattccctcacaagcattcagtctctccaccctgaggtggtgaaatccctgcaggcatttataagtatacctggacagaagaaatacaagataccgttctattaactcaatatagtgttgctaagttcgtacttgtgcttggtttattttattttataaatacgtatcactcgcatggttccaaatgcggtaggcacagagagtatatatgatggaattacatcctccttccctgcactcagcaaccgagatcwtcccgctacgggcactcaaaggtttcattgtctgaaatatcagcctaaacgtagtttatgtttaggaagcaacaaccgtaaataggcccacatccaaacggagtggatttaggtttcactttttcaaggaaaaaccatcaaagaatttttccacatacttataaaccatcccacgtatagaatccatttttactgacacaaatttagtaccaataaacgactcttcttctcaatttgttttatttaacaataagtcttgaacgtcattcccagttaacattttgaagagtttcctctctttcgttctgttttagctgcaaagtattcttccgtaaggatgaacgtactataatttatt

SEQ ID NO: 15041 - DNA, 567 bp, Homo sapiens
ctgcaattttcgtggaattcatgttgctctgacgggagtccttttcagtggatgtctcatccttcttagtgcctcaaactagatctagttcagaaaggttatcagaagttaggacaagtttattttagtgcaaaccagtggaaatccatgcatmgtttcttcaccatgtgcattttctatgaacctttggaagaccacctgtgttgaacattgcccaagtcctgggagagaagtgggtgcggtccgcttcctgtcctcaatttgcccgcagcggcggagtgcacagagcagggaaaggcagccccagagggatcccgccctccagcatgcagcagactgctggcccagtcctggctccaaggggtgctgtgtgggcccaagcaagttgaccaacctccctgaaccttaatttcatcctaggtagcccaattccagtagccattataggactgccctgcagggacagttacttaactcaggaaaagcaacctagctccaagtttagcaaccgggagttccagttgattccattagcgcaccccctgaggcattcccaagctggagtct

SEQ ID NO: 15042 - DNA, 567 bp, Homo sapiens
ctgcaattttcgtggaattcatgttgctctgacgggagtccttttcagtggatgtctcatccttcttagtgcctcaaactagatctagttcagaaaggttatcagaagttaggacaagtttattttagtgcaaaccagtggaaatccatgcatcgtttcttcaccatgtgcattttctatgaacctttggaagaccacctgtgttgaacattgcccaagtcctgggagagaagtgggtgcggtccgcttcctgtcctcaatttgcccgcagcggcggagtgcacagagcagggaaaggcagccccagagggatcccgccctccagcatgcagcagactgctggcccagtcctggctccaaggggtgctgtgtgggcccaagcaagttgaccaacctccctgaaccttaatttcatcctaggtagcccaattccagtagccattataggactgccctgcagggacagttacttaactcaggaaaagcaacctagctccaagtttagcaaccgggagttccagttgattccattagcgcaccccctgasgcattcccaagctggagtct

SEQ ID NO: 15043 - DNA, 514 bp, Homo sapiens
caaggaggcggccccggaggcaagccgccatttgggagcggagcagagcccggccggtgctcccgaaggcagcaagatgttgcgagccacagctccctgctgsttcccacctggatacccagaagctaagaaggtggccgaggaggcggccctcgaggctccagaattcccactgccctctcatcagcctgcccagagcttcgggctctgggtgccccagatgcacaagcaggcctcagcatttgtggacatccaggcggagccccagaacaggggtccggcggtgcccccagcgtggcccaagatggtgacggagtcgtgctacttccctgcgcagaggggatcggcctgccgcttgccagccgccccaaggctgacagagaggccctcgggagtccgcatctcagcccccaggaagaggaagacgatcgcccactcttccagcccttgcttggtcacaggttacacagatgccaagagaacccgggtggccagcagcagccaacgctcccgt

SEQ ID NO: 15044 - DNA, 1013 bp, Homo sapiens
catatgagtatgaagttgaatccaggaaggtctcacatcattggaaagttaacagatctacagtttgtatgagagtggcaccttcttagtggccagcaaacttctctcaaatgtccctcagtgacagattttatcacttaaatgtaacttcttttctttcttcttaggttttattcagggagaagagtattttttccccaaattccaggacttatatttaggatgatcttaagtcctatttttcctgggacagtctcattttacctattgtttcagaataatttttagtaaatactccttaaattctccaaaagtccctgtttgtgagataaattacatggtcacccaacttctgttgctcaaagttcttctggctccatacacttctctgcttttctcctcgtgtgacggagcagcttctccactagccattcacaggcatagattcctccagtccctgtgtgactcctctcttcactctctgatcagagcaatggagatgggactcacttattttgttttagacccccctacttgaccagatcttgtattttgataacaaaagagaaagtataatttttccctcagcaaagaatcagggcacaggagcttatatattagggagaaaattagagagtttaaaacaatgcaaataaattacatgtgtgtacaacatactttcagtaatcatgaaatctcaagggatttcaggaaacrtatagttgaatcttctccttttgctaaggaataacgtgaggcttacacagaggaagcgatttgtcatggagtataacctaatttgacctagttagaggaagattcctgaccaccaatgaatttgatatttccattacccaagtcaggtatttttatcgcataagaagaatatgataactgttttcttacaatatcttttctgggcttctttgtatcttaaaacaacatatttgttttcctaaatgcaattctatttggcacatcttagaaaaagtataaaatagatgtaagccaaa

SEQ ID NO: 15045 - DNA, 1013 bp, Homo sapiens
catatgagtatgaagttgaatccaggaaggtctcacatcattggaaagttaacagatctacagtttgtatgagagtggcaccttcttagtggccagcaaacttctctcaaatgtccctcagtgacagattttatcacttaaatgtaacttcttttctttcttcttaggttttattcagggagaagagtattttttccccaaattccaggacttatatttaggatgatcttaagtcctatttttcctgggacagtctcattttacctattgtttcagaataatttttagtaaatactccttaaattctccaaaagtccctgtttgtgagataaattacatggtcacccaacttctgttgctcaaagttcttctggctccatacacttctctgcttttctcctcgtgtgacggagcagcttctccactagccattcacaggcatagattcctccagtccctgtgtgactcctctcttcactctctgatcagagcaatggagatgggactcacttattttgttttagacccccctacttgaccagatcttgtattttgataacaaaagagaaagtataatttttccctcagcaaagaatcagggcacaggagcttatatattagggagaaaattagagagtttaaaacaatgcaaataaattacatgtgtgtacaacatactttcagtaatcatgaaatctcaagggatttcaggaaacgtatagttgaatcttctccttttgctaaggaataaygtgaggcttacacagaggaagcgatttgtcatggagtataacctaatttgacctagttagaggaagattcctgaccaccaatgaatttgatatttccattacccaagtcaggtatttttatcgcataagaagaatatgataactgttttcttacaatatcttttctgggcttctttgtatcttaaaacaacatatttgttttcctaaatgcaattctatttggcacatcttagaaaaagtataaaatagatgtaagccaaa

SEQ ID NO: 15046 - DNA, 547 bp, Homo sapiens
cccagctgggaccatcactatgcttctaaccactgccaaaattcacaagcagaaaattgcttggagtctaaactcagtgtctttgcaaagttactgtaagcatctgtggttaaaattgaccaactttgaattgttaaaacaggtacataattatctgaggcattcagacatttaatctgtgagactttgtgcattatactaatcctaacaggtggagtgaaatccacactcttagtaaaaaactcctctctccttgatgaaaaagartgctcagcaaagaagagaaatgttgccaagtgtagaaatagcaaatcacgttcttaagttgacaagtgtctctgcaggcacgtgcacactcacggacacacacacacacacacatgcatggacacctttgagaataactattacaacctgaacagaaaaatgttactctctactgtgaaaacctttgaccaagaaaaaaacaaactatgatcctataaaatggtaaataagtacataaacaaaataaacgcaaccaaagacaagtatttgtgctctattt

SEQ ID NO: 15047 - DNA, 1055 bp, Homo sapiens
catgcagccagaggctgcccccaaccaggcagccctgggctctggacttctggggctgctcctccgctgctcccatccccacccccacccccaccccgagtcctcttgaccaaaggtatcctttggagcctctctggacttgaggttgaaaatgtaactagaactttaaagaccgcttttggccagggtggccctttttatttgctaaattctgtactttaccaacagaaaaaaggagcacaacaaacatgcacatgttactgacttctgcattctcgtcrcattgcacacatacatttcacctgctgtctgcagtgtgcacacactgtcaacactttacagtagttcatggatcctccgtgttcatgcacatcccattttcagtgtggctgtgaccttcctccaggtcacctactgtagagctcgctaagccattcccctctgcaccggcattgggcttgaagtgaactcaacaccattgctcccatgattccttttctctcaaggattattctgggaaagtgggctctccaagccacccagtgtgtagagtccttgatcattctcatcatacatttatgtcctgctctccagaaacactgaatcagtcagactgtagagtgtcaccagtttccctctagccttgcaagtgctgggtgtatttatgtgtacgtgtgtatatatagagagagactctgtgtgtgtgtgtttagcaggtgtgtaggtaattcccccattacagatgagaaaacttaggaccgaagggatgaagtcacttttcccagggttgctcagccagcaagtggcagcccccagtctagaggtcacatcccctaagcctcagtcagtgttctgttagacaaaccaccctgcctctgatggttgcttctagacttgtagacaacaggctcttcctacttctctcatcccttgtccgtggcggaaaacagaaacacaacttgtcccctcatggtttccatgtcatgcagaccaggttctcggcttcacctgggcccttccgcaaacctatgagatccaggccctgaggagttcct

SEQ ID NO: 15048 - DNA, 540 bp, Homo sapiens
tgaagacaatagagaagtaactctccttcacttccaggaagcagaagtcaaaatttggctaatcttttaacactatacatatattttttttcatgttgctcacctgctaaaagtcccaggaaccatcaaattagccaattagctaaaggatataatcaaattttttatcctggtttctaaactcacaataatctggtcccatccccaataatcatgcatcagatttgtccattcttctttagataactactcaaaatttcctacatagacattttattggacctcattttcctctttcagttttttttttaaatcttgggtttgttttagaaaacaaaataagaygttatagataatactgctttgaaaactgccttgcacagtgctaaggaactatgcaataaaaagtgtttttttttttttgagacggagtttcgctcttgttgcccgggttggagtgcaatggtgcaatggcactatgtcagctcaccacaacctctgcctcctgagttcaagcgattctcctgcctcagcctcctg

SEQ ID NO: 15049 - DNA, 527 bp, Homo sapiens
tcacccctaaataacagtaatgtaaccaaataccacctgttccacaaraacccattgaaatttaaaaaaggttacttggtcaaatagctttaggaagtattagatttaacattttttaaaactgcagggcatcttagagcctctagccaagagtgggagagcagggatggtgtatttgaccatgggatcctcactcttgttgtttttccagacaacacctgtgaatgtcttgaggctgtggtggtttgtggcatatggtttgggacaagctacattaggttactcaactccagcccagctctctggttgacagagtcaataattgcaactctttaacttggttcagaggagatgtggaatgcatcagacgggttctaggctttcaaatcccattttcatctcttatctgttggacttgtgactccgctttcttttgataagagctttctgcaatgagaaacaaaattaaaaaaccagtgtatctaggagaaggacctgggaagccacgttgtgggcttgatagagat

SEQ ID NO: 15050 - DNA, 535 bp, Homo sapiens
cattgccagggtgacatgaagccttgtagtaagtgagcagagtgtggctcttcatgggaatggcttatctggtagaggggacctcaagtgtacaagccctgagctgggaccatgcctggtgagtccagtggggcaggggcaggctgccttcctraaatgccacatcaaaaagaaagctattgataggttgtcgattcgctcaacaatatctgctctgtgcctgatgctgtggatggaggatgttaagaatcttacatgtcatgaaacaattggggaaaatatcagattgggaagattatgaatgatgtaaccagtagttactgggaacctgccacagtagacacggtatcagaaaatatagatgttggtatatacaaatgtgaaccttggtacagctgatatagatattctggaggcaaagatagaagagaaacaaggcacccacctccctacactcaaagaagcttccggttgaattggagacaacagtacatgtgtacagatgtaatgtacaaatgcgtgagccagtgaccca

SEQ ID NO: 15051 - DNA, 535 bp, Homo sapiens
cattgccagggtgacatgaagccttgtagtaagtgagcagagtgtggctcttcatgggaatggcttatctggtagaggggacctcaagtgtacaagccctgagctgggaccatgcctggtgagtccagtggggcaggggcaggctgccttcctgaaatgccacatcaaaaagaaagctattgataggttgtcgattcgctcaacaatatctgctctgtgcctgatgctgtggatggaggatgttaagaatcttacatgtcatgaaacaattggggaaaatatcagattgggaagattatgaatgatgtaaccagtagttactgggaacctgccacagtagacacggtatcagaaaatayagatgttggtatatacaaatgtgaaccttggtacagctgatatagatattctggaggcaaagatagaagagaaacaaggcacccacctccctacactcaaagaagcttccggttgaattggagacaacagtacatgtgtacagatgtaatgtacaaatgcgtgagccagtgaccca

SEQ ID NO: 15052 - DNA, 535 bp, Homo sapiens
cattgccagggtgacatgaagccttgtagtaagtgagcagagtgtggctcttcatgggaatggcttatctggtagaggggacctcaagtgtacaagccctgagctgggaccatgcctggtgagtccagtggggcaggggcaggctgccttcctgaaatgccacatcaaaaagaaagctattgataggttgtcgattcgctcaacaatatctgctctgtgcctgatgctgtggatggaggatgttaagaatcttacatgtcatgaaacaattggggaaaatatcagattgggaagattatgaatgatgtaaccagtagttactgggaacctgccacagtagacacggtatcagaaaatatagatgttggtatatacaaatgtgaaccttggtacagctgatatagatattctggaggcaaagatagaaragaaacaaggcacccacctccctacactcaaagaagcttccggttgaattggagacaacagtacatgtgtacagatgtaatgtacaaatgcgtgagccagtgaccca

SEQ ID NO: 15053 - DNA, 509 bp, Homo sapiens
tcaagacgtgttggatgctcctgttctccgaattctgatasgcttctgggcataatactgaaacacaaaactgcttttgctctctctgtggttggccgaaaataggattctttttcgtgcaggtgtcgttgtttagtcggctttactaacatattgaaatggctctacccaaagacgccatcccctcgctgtccgagtgccagtgcgggatctgcatggaaatcctcgtggagcccgtcaccctcccgtgtaaccacacgctgtgtaaaccgtgcttccagtcgaccgtcgaaaaggcgagtttatgctgtcccttctgtcgccgccgggtatcgtcgtggactcggtaccatacccgaagaaattctctcgtcaacgtggaactgtggacgataattcaaaaacactatcccagggagtgcaagcttagagcgtctggccaagaatcagaggaagtgggtgagtaaaccatggcgtgtttgttggccaaaagccgcaagtctttgaaa

SEQ ID NO: 15054 - DNA, 529 bp, Homo sapiens
attttgtccagatcttataattgttagctgaaagatggttcactcaaccactttactagcatcactgcattcttaaaagaagaatctcgaaattctaattaatgaaaaatttctcacatccttgatttctattccttccaccaagttaaaatctttacctcatcagacaagaatttgaagtactcccacttccacttccagtctttttttttttttttttttaatctcacatagtacactgagtaatttcttgtctggtatattacttgtatcattataaagaatgtttttggctgggtgtggtggcttatgcctgtaatcccagcactttgggaggctgagacaggtgggtcacttgaggccaggagttcaagaccagcctggtcaacatggtgaaactccatctatactaaaaatacaaaaattagctgggcgtggtggtgggcgcctgtaatcccagctactckggaggctgacgcatgagaatcacttgaatccaggaggcagaggttgcagtgagccgacacat

SEQ ID NO: 15055 - DNA, 537 bp, Homo sapiens
aggtttaaaatatatatatttatacagatatctgtatcaatatgtgtatatttcaaaagttgaaatatttgaaattataaattatatttgaaattataattcatatggtggtatttagactttatgtgaaaactgcatttcccaacattttactttttgagtctagcatccactgataatsttttgctcaattaattatctttattggagatggaaagatattcattttacatttattagccaaagtttttctttaatgaagggcacttcctgagtgacaataggtgaataacaatttcacctaaaaatacagcataagtatttaatttgctactctattaccaatttttagagtaaggagtccatgtaagagtcactttcaatgtttgtaatttagtgtgttttccctgctttcttaatatctctaaaaacccatggatatgtatctattcagtgtgttacaatccattgtaatcattattcttttcaatgttcaaatgctgacaaatatggagaatggaattactaagttggctc

SEQ ID NO: 15056 - DNA, 494 bp, Homo sapiens
attgtagttctgagactgcagtatctctgagatccaaagtttttctgacctaagcttcctgatattccaggcatatgccttttgggaatgtctgtgttgtaatactgaaattaattttataaataagtatactgagagaaatatcatttcttgctcataaaaagccactgtggtctccrttaaggtttcagtgtcaggagtgatggcagcatcagaatgagaggcatagcctgaaccatagaggttttatcttcaggattccaccaggtagtatcactgtgttatgctaccaccagcagcaaggggaaaggagcatgtcttagaaagggtcagaatttgtagttagttttcattttggttttataacagtagattttctctgccagtggcaataatagtaaagttccaaattgaaaaacaatgagcagccgggggagaggtaataggattcttcaactttcattggctaggcaagaataactaagaatgctctt

SEQ ID NO: 15057 - DNA, 494 bp, Homo sapiens
attgtagttctgagactgcagtatctctgagatccaaagtttttctgacctaagcttcctgatattccaggcatatgccttttgggaatgtctgtgttgtaatactgaaattaattttataaataagtatactgagagaaatatcatttcttgctcataaaaagccactgtggtctccgttaaggtttcagtgtcaggagtgatggcagcatcagaatgagaggcatagcctgaaccatagaggttttatcttcaggattccaccaggtagtatcactgtgttatgctaccaccagcagcaaggggaaaggagcatgtcttagaaagggtcagaatttgtagttagttttcattttggttttataacagtagattttctctgccagtggcaataatagtaaagttccaamttgaaaaacaatgagcagccgggggagaggtaataggattcttcaactttcattggctaggcaagaataactaagaatgctctt

SEQ ID NO: 15058 - DNA, 344 bp, Homo sapiens
gaattttaattaattaaaaaaaatgaatttttcaatatatactacagaggacattgactgtctagccaatttgtggaaaaagtaygcattgattacacaataaacttacttaattccatgggattaaagagttaaatgcaatacaaactttgaataatataaatttaaaattagaggtgattatttatataaaacgtgaagttggaaatgagttttcatacaaaatatgaaaggtagaaattatgttgaaataaaaacataacttgaaaattttaaagcgttaaaacttatgtgtatatatttatatatacacatctacacatttatatatacacatatgaaac

SEQ ID NO: 15059 - DNA, 295 bp, Homo sapiens
tccctctttttaatgcctttatcccttgttcttcccctgactttccaaactcagtattttrcagaaacattcaatccattgtttgagctagaagcagagtggttgagtcatacttgattctttccacttaattcatgccagtagcaaattcagtagcaagtattgctgtcaaaagcttgtctcaaacatcatcaccttttcctggctctctaatgaaccagtctagtttctttcccattaattcttatttccttccaatctttctccactaacagacttactaaaatgattataa

SEQ ID NO: 15060 - DNA, 295 bp, Homo sapiens
tccctctttttaatgcctttatcccttgttcttcccctgactttccaaactcagtattttgcagaaacattcaatccattgtttgagctagaagcagagtggttgagtcrtacttgattctttccacttaattcatgccagtagcaaattcagtagcaagtattgctgtcaaaagcttgtctcaaacatcatcaccttttcctggctctctaatgaaccagtctagtttctttcccattaattcttatttccttccaatctttctccactaacagacttactaaaatgattataa

SEQ ID NO: 15061 - DNA, 527 bp, Homo sapiens
ccagtaggtggcatcttgagtgttgaacagaaccactcataaaagctgagttttgctttctccaggtttaygatgcctttaaatggacccagcaagcgaaggtttcttctttcttttcctttgtaaaaatattttatctacagaaacaaccttgttactttttcttgtataatcatgtggcatttgctctggtccggtagtacttagccacttttaggttacaaatccccttgagaatctggtgaacgtttagggacttttctgcagaaattgcagaattcccagagcccttccatgagtataggcctgtggagtcctaatgtaaagcccagaactccaagccaccaatgtcccatggacacttgtcactgatgttttctggctgtgggtgccacctccatggccagctcagggctgcttgctctgaggaggacatgtggatttggggctggtgtttcattcccaccttctcctgaagatgaacagcccgaggaataagatcctcttgtggtacatgggacagactt

SEQ ID NO: 15062 - DNA, 544 bp, Homo sapiens
aatgcttcttagaatgcagcttctctggactatctcgtaacccatctgtgaagcagggagaagtccaagcttcctcatgaagaggatcacatcaaggtagccaattgatagtttctggattttctccttgtaagaaccatctactcaaatggaagcaaaaggggagggaatgggagaaaaaaaaccataaaactaagcatataaacaaaggagactcttttarctcagaagagatgacattatcttttaattgacaactttaaattcttgacattatctgaggagagaactctaattagaagacagcagcaagagaacataaggagatttacttttattgaacatctgatttatgctgatgaaaatatacttgctgcacatactccctcagtctcatttatctcataatattcacctcatcctttaatttattcatttacttaacaaagagttaacacatgcttatcttgtggctgcaacatagtaacctggagattgtcagtggggcctgggacaaagggaccagaggtaggaaacccttaag

SEQ ID NO: 15063 - DNA, 542 bp, Homo sapiens
aaagaagtcaacaaatatatggttataggtttaatatttgctaggcattgctctaattgaatttatacataatctttatgtagtcttgatgtaggtattatttttatcataattttacagatgagaaaaaatccagggaaattaagcaactcatgcgagaccacaaagtttattagtgtcagaggtgaaattatgaacctagatagtcattctctatacccaatcgacatacagtacttttaagacaggatatgtctaggacattgactgtaaaacragggaatatgaaacctctttgaaaaaaaatacatgaaaaggaggagacggagaacaaaacaaagaaggcaataaggatgaaaaatgggcagaaattcttattttaaacacaaggatggtggtatctgattagtacacctaagaaggggaggcttactggttaaaacccaggagagctgcatggattatacccatgtaactttgagaagcttgaatttatctgttttgcataattggtttatactttatcatgggcatgaattagt

SEQ ID NO: 15064 - DNA, 2129 bp, Homo sapiens
tttaacacacaaaaaaacactacgatgctgtttcacaggaaaaaaatagtaaccttttcggaagcaggtagaagttaggtagcactagggtagtataatgtaaaaggagagtttctctgcctccaagagagctaaacagttagccaggccacgggtgtatcactccaagggaaggccttgaaactttctctgagcacttgatgtgcatgtccctgtttataaagacttcattttccttcatctcttccaacattgtcttcacccctggctacctttctaacagcccaacaagctgtgacacttgcaatctgctgaataaggacaaggcttaaatcagatgcaaatttctgaatgcttcctttccacctacttacatttgccatttatatgcaaatgtaagtctactctccgttctcattgtaacactctgtccctccagctttgccctaacctggctttagatgaaggagggcttcgcgctcgttaaatctagatccacatttaactgtccacttggtaactcaaaaaccaaatgtctcggatcataattcttcaggaaatagctctctataaaaatatatatcagagtctgggtgataatgtaatcaaaaactacgggtgttagttaaagtgcttaaaggtaaattttctggctgtattcccacattcatgaaaaatgatcattttttcaaaatctccagtttagcagtctaatgcctttggcagaaatatgcactaatgtatcgggaacaggcttgtttagcacgtagaaaaccccaatcaggacacttcactgatatatacgtctgcattgatttttgtgtttttcttaaatgcttatttctgatgaaatctgtcctattggctccactcctgggatagaagctgagctctgcattcttcccagcagctcagggtgaaataaacgcttgtctaatgctgtatggctcaatgcccctgtgtcatatctatgcatgccataaaagcagtgataaacatgatatatttttatgactctgaatgctctatgtgtcaataaaatattttttaaactggatgaaggctgcagtgaacctgcctccctgctgaagcactgagtcccagtatcccgggcttgattctgcccggatggcagaatcatcaatcgtctgtgatgaaattaggtgtctagtgcttgtggcatatgcaatgctttagtcctaatggcctaagagtttttttctctgatacacattgagaagcgtttcccttgcttcttgtaggggaaatggatcacagctataatcgaccagatgagctaaatgacctttccttatttgaaatgccctgggattttacgagaggaaaagatccatatatgcaagagaaactgcagtgtaaacttttcaaagacattttaataggctgctttaaaaatataatttaaatgtggaggagcttctttccagaatactttcattgaccgaagacaagatgcctttcaaactttggaggggcagcattgtttgytgtgttgcaaactacaaatgaatgatactgctaattgtattacttatgtctacacagtgctttctgtttgctaaagcattttatgtttagttctcataataacatttagaagaatgagttatgtcttattccatttgatagtacatagagcttaagaaactttacacagaacaaataacagcactgggactagagcacattagaatggattagatcaggatgagttcctcaactattcccagtaggagtatcagccattctataatgaaagtattttgaatacaggacaatgagtaaaaagcatactttaaatgatgcttttgcctgttcacagataaagatcaaggacaaacatcaagtcatgcttttggaaagaggagaacgttttcatttctaaacttgcaagtttcccagataagctgaataagaacacttttctgcccttgcatataaagcgtgcatgttttatattttccttagttaactctatatctgagttttattatttgggaattaatgccgtttaattttgttttattatcattggagataaggaagtggctgtgaaaggaattaatattcatctgctatttattgtcactggtacatgacactaggtc

SEQ ID NO: 15065 - DNA, 549 bp, Homo sapiens
ctacttattaaagtgcttatgaaagtggtrtcatggcatggagattgggaaagcttagttggatctgtattcaaacttttctgagatttataaaatatcttaacgtaggttttgttccatccagcatggattcctgtagtctgtggctgtcaaagacagttgtctctagtgttcacttccctacttcactctaccattttaactgtagcataccctcccctctggctttcaagaatgagagggttgatcctacctgatttttgagctttatcattagctatcctttactcataatatctgtactttctagcaaaacttgactattaaggatcaatatatgtgaagttaaggatgcaatgtatagttcagtaccttgtatctaattgtcactcattcattatatgttgaagaaaagtaatttgttgtttattttacattttgtcctttcaaactcattagaataacgtgagcatacctatttcaatgtttgtgtaatttgtatagttgcaaattacactgttattaagtagaactttgtaagatggtctg

SEQ ID NO: 15066 - DNA, 549 bp, Homo sapiens
ctacttattaaagtgcttatgaaagtggtgtcatggcatggagattgggaaagcttagttggatctgtattcaaacttttctgagatttataaaatatcttaacgtaggttttgttccatccagcatggattcctgtagtctgtggctgtcaaagacagttgtctctagtgttcacttccctacttcactctaccattttaactgtagcataccctcccctctggctttcaagaatgagagggttgatcctacctgatttttgagctttatcattagctatcctttactcataatatctgtactttctagcaaaacttgactattaaggatcaatatatgtgaagttaaggatgcartgtatagttcagtaccttgtatctaattgtcactcattcattatatgttgaagaaaagtaatttgttgtttattttacattttgtcctttcaaactcattagaataacgtgagcatacctatttcaatgtttgtgtaatttgtatagttgcaaattacactgttattaagtagaactttgtaagatggtctg

SEQ ID NO: 15067 - DNA, 536 bp, Homo sapiens
tcccggyctgctaagtagtgggtgtttttccttgacactgatgctaccgctagaccacggtccgcttggcaatgagcatcttcccagacgctggcgttaccactagaccaagcagccctctggtggccctgtctgggcataacagaaggctctcactcttgtcttctggtcacttctcactatgtcccctcagctcctatctctgtatggcctggtttttcctaggttatgattgtagagcaaggattattataatattggaataaagagtaattgctacaaactaatgattaatgatattcatatataatcatatctgtgatctatatctagtataactattcttattttgtatattttattatactggaacagctcatgccctcggtctcttgccttggcacctgggtggcttgccgcccacacatattttagatttaaagctagttgctgaggaccccaaatggagtaacctagtgtttgttcccaaaggtgcatggttcaatatggcactctagaaacataaagtctatttt

SEQ ID NO: 15068 - DNA, 669 bp, Homo sapiens
cacctatttcagacatcactagttttcacataattctgagaaagaatgagcaattctaaagttcagtcaagactgattatgtcttttgagtatatttataaatatgaatttacattttggaaataaggatcyattaatttattcaacaaatactgagtaccttcagagtgatagacatcatattaaaagatgggaataagctgacaaagtgtagtttctactctcaagtaacttgaagtctggatgtaaaaatagaatgttatgtaataaagtgacatcttttctgagtgatatgcttatattatcgtgacaaggtatacaaagaaatgtaaatcagcctgaaggaaagagaaatgaaaaagaaaagaatagaggagtcatactagaaagacaggtaagtaaggtggtttgggggaattacttttcagtgttggctaagtttgaggtgactattgaacatccagtgggcaactggaatgtgtttccatagttcatgagagcattttgagctaaagggtatagattttggtgtcataattatgtaaattaaaactgaaaataaataatgtgtatgtgaataatatgcataagaataaatggaagaaccatgggtggaatcctagggaataccgatatttaaggagatcgatagaaaaaatagaaccctgg

SEQ ID NO: 15069 - DNA, 548 bp, Homo sapiens
tttgggaggccgaggtgggaagattgcttgagcctgagttcgagaccagcctgagcaagagtgagaaccgccgtttcaactaggggaaaaaaaaaaaagccaggcgtggtgggacacacctatattcccacctgaggtgggaggatcgcttgagcccaggaggtcgaggttgcagtgggccgtgatcgcgccactgcacttcagcctgggcgacagagtgaaaccctgctgcacaaataaaagagaaaagggaaaaagagcggagacaggcagccccgctttacaggtagggaaagtgaggcacagagaagtaaaacgacctacccaaggaaacccatctagtaaaggcagggaccgggatcgcaggctcttggagctcaccagtccccgccgggcggtgcttggcccctccttcccctccggcgggcgtggcccggccgggyccgccccctcccctgcgcgcgttcctggcagcccggccggcgtttcctgcctgcgtcgctgagctggcgggcgggcagcccatctggcggcccccgcggggcggc

SEQ ID NO: 15070 - DNA, 558 bp, Homo sapiens
acaagacggcataagaaagtagaaaacttacaggtaaaagtaaatatatacatagacatagaataacatagtgctgtaatggtggtggataaatcatttttagcccaagtataaaagttaaaaaaaaaaaaamaacacagtattaggaatagctataggctgggtgcaatggctcatgcctgtaatcccagcgctttgggaggccaaggcaggaagatggcttgagcctggttggttgacaccagcctgggcagcaacacaccgaaacctcatctgtaacatatatatgctaccatcaaatgaaccagtatacatattatggaacacaaacaggtgaagataaggaggaaagaaacagaaagcttatttaaagaaataatagctgaaagcttaccaaatctggggagagacatggacatccagatttatgttgtacagattataaattaaccagttgtgcatggtggcatacatctgtgatccctgcaacatactatgacttcatctgtacactatatatacatatatgtgtgtgtgtgtgtgtgtgtgtgtgtgtgt

SEQ ID NO: 15071 - DNA, 547 bp, Homo sapiens
catcaatccatcatttagcaaaaatttaacaaatccctactgatatggtttggttctgtgtcctcacccaaatttcatgtagtattgtaatcctcaatgtcagaggagggacttcgcagcaggtgattggatcacgggcggcagatttcccctttgctgttctcgtgatagtgagtgagatcccatgagatctggtcgtttgaaagtgtgtagcacttccctgttcrctctctctcacctcccaccatgtaaagacgtacttgcttcccctttgcacttctgctatgattgtaagtttcctgaggctgccccagccaagcttcctgtacagcctgtggcactgggagtcaattaaacctcttttctttatacattactcagcttcaggtagttctggatagcagtgtgagaacgaactaatgcacctcccatatgtgcatcatgttcctgggcattacaggagattctacaatactaaaactgctccccttcttcaaggaacttacagtagtataagatgtgaaaaataatgtattataatattttc

SEQ ID NO: 15072 - DNA, 735 bp, Homo sapiens
caggcttgcacagacattttaaaaagttacattttagccagagctgaatacyacaacatattatgtagatgaggaaacaaccaagtccacccaggtcctttgtgggtatctggcatgagaaggccagtggtccacacaagcaagaaagggcattttaatcaaggagggctggaaatgaactggaaagctcatttttattcttggagtgcttctattcttaaaaggatgtacaattctgaagtttgttcaaaactatttaaggaaataaaagattaatgtatcagtaaactggatgagcctgtcagtatggagagtccagatgagagttattttaaaatacgtgtcgttccatgatcaaaacgatgcctcatagttctacaaatgagaaccttcgtcacaaagatccctatatacttcccttcatcctcctaggagcagggaaaaggcagaagcctcaagctctgagatagaagatggcttaaaagaggctgtagtcattgtctcacctacttccgttcctgttgtatatagctaagaaaatggggtcaaagtttcacatacaaatattttgccggtcctagaggacgctggaaggcagttgtttgtatcgtgttggcctccgtgtgcatcattttctctgctggtaccttccattaggagccaccttgacatcatcttattcatgtcttatccaggaccacaccacattccaaagacttctccaaattatcaaac

SEQ ID NO: 15073 - DNA, 612 bp, Homo sapiens
tttccattaacactctgctagttaatgaagtagataatataaattgtaaaatggtattctaagaagcaataataaagggctgagggctatcttcttaacagaaatattggaagacagaagacaataaagttgtatstttaaaaggctttatgacaataattgccaacatggaattctatactttgtgaagatgtttcaaaaatctagatgaaataaagactttcccatcaagcaaaagctttgaagatttgttgccagcacagcacatctaaatgaaaagaaatactaaataaaattcttcaggcagaggaaaaacagttccagaagcaatggtggaaatgacaaaaggaatgaagagcacgagaaaagggaaattcatgaactcaacgtaaaaacaaatgaagtttggctatgcaaaacaataggtctgcaaacactgactatgaaaaacaatgatgtctttgcagggtttcaaatatatgtaaaatagtcacaaaaatgtatgacaacggtaattcaaaaggaaagaaggggtagaattgcagtaaagtgccctaaatttctaatattatcagatagaaggtaaaagtaaatatacagcccatagtaagc

SEQ ID NO: 15074 - DNA, 532 bp, Homo sapiens
tatcattatatctgaggaaactgagactctgagaggtgaagcgacttgcccaaagccacacagctgggaaatggaggagttgggatttgagcccaggctcttaatcggcaccaatgccacttctcacttgggacagaaaggaagccctgactccttaggcagctgtacggagcctgggatgataacgtgctgagagccagggctactgtctgctgcaccctggggctcagtctccccatytgtacaaagggacgttccttaggtacctccagccctgagacactgggttttaactttaaatttctgatgaacaacaaatacttttttagtataagtatgccccaaatatgaataaagataaatataaatacctgccaccgacccctgcacaaaccgcaggttccagactacaagtcccacaacccactgcggcctcccttaggaactgactatcatgactttctatttttcattcattcattcaaaaatggtataggccacccgccgtgcgccaggtcttgtgctagatgcc

SEQ ID NO: 15075 - DNA, 1797 bp, Homo sapiens
tgtctactcttgtgttttgctgtgtcctaaaacagggtgttggtccattcactctgtttcctgttagcatctatgtagatgttatatttgagctggggtttcactcttgttgcccaaactgtagcacaacggcgcaaacttgactaactgcaacctccgccagcagccccccgccccaggtttaagtgattctcctccctcagcctcccgatagctgggattacaggcgtgtgccaacacatcaggctaatttttatatttgtagtagagatggggtttcgtcacgttggccaggctggtctcgaactcctaacctcaggtgatccacgtgccttggcctcccaaagtgctaggattacaggcgtragccatcccgcccggccctcggtttttttttttctgtaatgctggagtggaaagggaactttgtcattacatcccagttttacccgttactaacgatgagatcaagattgggggcgacagcaactggaaggttccagttcattctcgtgagctccagcttgtgtttgtgccttctgacttatccaggctgtctcttatttaacatccatcttattttccccactgtctggcctgtggacttcaattgttagcatcagtcctgaagacaacaaacttactgggaccacttaacccgctcccacagccgcataagtccaatgtctgtaacaaatctttttataaaaacacaccacatgcaggcacacacacacacacacacacacacacacacgagagagagaatgagaatcttttagtggtttggtttccctggttgaaccttagccgacatatatacaatatataaagtgccaggattatggaagatagtcaataatgaatggacagatgaatgacagagacctgcttgtctgaatgaggatggagaaagtgaggaggtacacaagaacttaaatttcttgagcacctactatatgccagaaattatgctctatgttgagggtacagttgtgtaaaatcagacttggttcttgttttcatgacagttgcagtttagtggcattctttatcttcattgctagcttttctgacttcctgctgatggccattttaaggctacacggcatataggtaatgttgaagttactaaagaaagcaaatgaaatacacacattttcttctttttcaacacctcgcaatcatgactgatccacttgctgtaatactcagcaaatgtttaatggaggaaggaagttagggcaggtgtgattctgacatctaacaaaggagacagagcacccactcctctgggatatgttgcgagcttgtgaggagcaggctaaccatactgaccaggttttctatttccctgttattaatcccttccacaaggaacattttgaccaagtaggaaagtctaaataggggtctggctctctttgctgatatggtctttaagcagaaaggccatctctctggcataagctggtttgtgatcttgggctcttcagaattgttatctctctacggtatgatattgacttagaaaatttttataatctattgtatatctttgatgtataggattccagaataaaaaaaaaattgtcaggaaggatctggtaaggttactgcttactaggagttttactaagagtatataccacaaccatgacatgggcagtaaataataaagacaggtgtctgaaatcctggaggtcatgtccttatccttcaggtcatgaggaacagccaggttggttgaagactcaggttggttttggagaagaaccagggcacacaatggaagca

SEQ ID NO: 15076 - DNA, 668 bp, Homo sapiens
accttctgattcctggacctgcctaaagggctagcatgatttggatcctttgtttcattttgttttgttattttctttacttttctcgacaagattacctaaaaggaccctttgtttactttttggaagacaggcatgtcttcaggcagggactaaggtccagcatttctagacataagttcctttctatttttatcacacagttcagcaacactgcctgtcaccttccgctgtgctgaagaaaataaccaggtggacaagaggatcactcgattcgtgttacccgttggtgcaacaatcaacatggatgggaccgcgctctatgaagcagtggcagcggtgtttattgcacagttgaatgacctggacttgggcattgggcagatcatcaccatcaggtggggcatgrtgtcacattcattgtcatcactgatacagggattaccgccagtaaaaattgtccatgaagggacaccaagaatgtcccagtgatgaattctttttcttgatctataaagtcccttcccaagattaaatacgactatatcctggtatgcaagatttctgcttcggggtctgggtagccaaagccatcactctgtgctcagtttactgaagccagtaggatctaggcacaggctagcacaaagactcaaggctgagtaagg

SEQ ID NO: 15077 - DNA, 562 bp, Homo sapiens
ttccctggcctctttccaacagttgccagtagcaccccttccagttgtgacaataacaatgtcttcagacactttctgagaacaaaattgctacttagtaagaatcactgttttataaagtgttacctcatctctacatggccctttctccaccctttacacctgcctttacctagaaaacacttacacatgattaaatggttagctgagacattgcctcctcctgaaagccctccctgacttcccagagcagctaggtgcccctcctctggatttcattaacccttctttcttcatctgaattatggtatctgtcactctttatggcaattgcctgatgatcctccagtagactgtaagttccttgggatcaggactgacttactgctcatgtcatactcccagtgcctggtagagtgagctatatttgagagacattggagaaytgtttgtggataaagaaagtaggtgagggcccacagctctcattatacgcatggtaaaaagctgaaagctctaagatcagaaacaagacaaagatgcccactcccatcacttatat

SEQ ID NO: 15078 - DNA, 536 bp, Homo sapiens
aaattacccttgctacattctgactctgaatgaataatatttcctgtgtagtgacatgctctacactatagacttggaattgaatggcatctgattcaggtggatttttttttttttttcctcccaaagcaagtagatggaaaaagcggtcaactctacccttgtcggagcataatgcaaatctaagtctgtggaccttgtatcataaatgaaatgctttagtaaatgtgtcaatgttttccttctgttaattgaaacttgaatgtaatatcaaacttttgggataatattttatacagaaatacctagatttttttttcttttctctctctccatcgtaatccgatagagctgagcacatagggtggtgtggtattactacggtggtgaaatttattagaaaggcaactttaacctacactttttataatttmataagtataggtgtcactgccatttggaatagtctctataacaatctctgcctccacatttactgtgttttaggaaatttacctaacagatggtgagtggga

SEQ ID NO: 15079 - DNA, 515 bp, Homo sapiens
actgcaacctccacctcctgggttcaagtgattcttgttctcagcctcccaagtagctgggattacaggcacgcgtcaccatgcctggttaattttttttttttgagaccgagtgtcgcactgtcatccaggctggagygcagtggcgcaatcttggctcactgcaagctctgcctcccgggttcacgccattctcctgcctcagcctctcgagtagctgggactacaggcgcccgccaccacacccggctgattttttgtatttttggtagagacggggtttcaccgtgttagccaggatggtcttgatctcctgacctcaggtgatccacctgccttgacctcccaaagtgctgggattacaggcatgagccaccgcgcccggcccaggctcccctttctcagtgagtgctcagtaaatgtgtgaaataagaggacaagggaaagcctgtttctggccaaggaactgccagtccccaagggggatgtgtgctccttgagccctgagaggtggg

SEQ ID NO: 15080 - DNA, 515 bp, Homo sapiens
actgcaacctccacctcctgggttcaagtgattcttgttctcagcctcccaagtagctgggattacaggcacgcgtcaccatgcctggttaattttttttttttgagaccgagtgtcgcactgtcatccaggctggagtgcagtggcgcaatcttggctcactgcaagctctgcctcccgggttcacgccattctcctgcctcagcctctcgagtagctgggactacaggcgcccgccaccacaccyggctgattttttgtatttttggtagagacggggtttcaccgtgttagccaggatggtcttgatctcctgacctcaggtgatccacctgccttgacctcccaaagtgctgggattacaggcatgagccaccgcgcccggcccaggctcccctttctcagtgagtgctcagtaaatgtgtgaaataagaggacaagggaaagcctgtttctggccaaggaactgccagtccccaagggggatgtgtgctccttgagccctgagaggtggg

SEQ ID NO: 15081 - DNA, 515 bp, Homo sapiens
actgcaacctccacctcctgggttcaagtgattcttgttctcagcctcccaagtagctgggattacaggcacgcgtcaccatgcctggttaattttttttttttgagaccgagtgtcgcactgtcatccaggctggagtgcagtggcgcaatcttggctcactgcaagctctgcctcccgggttcacgccattctcctgcctcagcctctcgagtagctgggactacaggcgcccgccaccacacccggctgattttttgtatttttggtagagacggggyttcaccgtgttagccaggatggtcttgatctcctgacctcaggtgatccacctgccttgacctcccaaagtgctgggattacaggcatgagccaccgcgcccggcccaggctcccctttctcagtgagtgctcagtaaatgtgtgaaataagaggacaagggaaagcctgtttctggccaaggaactgccagtccccaagggggatgtgtgctccttgagccctgagaggtggg

SEQ ID NO: 15082 - DNA, 565 bp, Homo sapiens
  misc_feature (1)...(565): n = A,T,C or G
aagaacaaaagggaggatgttaaacggtgacgaggctgaggaggttgaccagctgccggcctaggatggaaggtgcccccacgtaactccagctctttccacttcccgctttgtttcctttggctggaggacaatgtggatcaatggctggaatggcccccggggagcaggccatgaccacatgctggtgacaacggtgcagaaacctctgcaaacgaggagctggtgtctttctttgctccgtcccgtcacttttcacgctatcctccacgtggytgctgtacctagatggctcccacaggagtcagtgaggcctgggtgggggtgggcggcagcccctccgcatggggcccagtgcctggtgcgcccgcactggcctcacgtggctcccctgctcacntcgcctacctggcctgtcacctctgcctctggcccatcctcctctgtggaccctcagttgcctccgttcctcaccctcctactttcacaacaccgtttccccatagggcaccttcaagagaaatctgtggtcaaattccccaccttgccccgcacccacccgtct

SEQ ID NO: 15083 - DNA, 565 bp, Homo sapiens
  misc_feature (1)...(565): n = A,T,C or G
aagaacaaaagggaggatgttaaacggtgacgaggctgaggaggttgaccagctgccggcctaggatggaaggtgcccccacgtaactccagctctttccacttcccgctttgtttcctttggctggaggacaatgtggatcaatggctggaatggcccccggggagcaggccatgaccacatgctggtgacaacggtgcagaaacctctgcaaacgaggagctggtgtctttctttgctccgtcccgtcacttttcacgctatcctccacgtggctgctgtacctagatggctcccacaggagtcagtgaggcctgggtgggggtgggcggcagcccctcygcatggggcccagtgcctggtgcgcccgcactggcctcacgtggctcccctgctcacntcgcctacctggcctgtcacctctgcctctggcccatcctcctctgtggaccctcagttgcctccgttcctcaccctcctactttcacaacaccgtttccccatagggcaccttcaagagaaatctgtggtcaaattccccaccttgccccgcacccacccgtct

SEQ ID NO: 15084 - DNA, 559 bp, Homo sapiens
ttcagggtcatgggcacccttgcctgggtgccaccgtgttcccctcaaggtgacacacctggtctggctgtgggccccgcatggagtttgctcctgtattggtgcttgggggkgctggctggatcccacactcgctcactcacgtgctcccgcctgcaaacggctgagttcggcggcatccctgctgcaagtccagcaaagaggccaagagaaaattcctgtgtcccttctgcgcccactgcagagatccaggctctgacgcaccagccggccttgccccgggaggccatggccactaagaagaggtctctcaggtcccagtcagccccttgcttctgggcacagagtcgtcacccaagaaaaggctgtggaatgaatctacatgggaattctgcttacttggattaatatgctgctcgctttgaactaacgaaagccgagctccactatcccagtatcattttttttgtcccaacatggacctcagagttaaatttttattgggaaagatgtagggcaagaggctgtgcagtacaaattctgtcccactctatttgca

SEQ ID NO: 15085 - DNA, 559 bp, Homo sapiens
ttcagggtcatgggcacccttgcctgggtgccaccgtgttcccctcaaggtgacacacctggtctggctgtgggccccgcatggagtttgctcctgtattggtgcttgggggtgctggctggatcccacactcgctcactcacgtgctcccgcctgcaaacggctgagttcggcggcatccctgctgcaagtccagcaaagaggccaagagaaaattcctgtgtcccttctgcgcccactgcagagatccaggctctgacgcaccagccggccttgccccgggaggccatggccactaagaagaggyctctcaggtcccagtcagccccttgcttctgggcacagagtcgtcacccaagaaaaggctgtggaatgaatctacatgggaattctgcttacttggattaatatgctgctcgctttgaactaacgaaagccgagctccactatcccagtatcattttttttgtcccaacatggacctcagagttaaatttttattgggaaagatgtagggcaagaggctgtgcagtacaaattctgtcccactctatttgca

SEQ ID NO: 15086 - DNA, 558 bp, Homo sapiens
gagtgaagtaatggagaaaaggtacactatgtgaaaaactgttctatgagggaatatattgtttaaaaattattatttggtagaagatcytctgcccatgctggcgcatgcctggcacaggtcaacattgctgaagtcaaagcagaccaagagtgctaggcatgggagcccagtgccatgatggcctgagagtggctggagagctgctggtccctaccccctccctacccatatctgtccagggagagcagggaggactccgcttccatccctagaagtgacagctcaaggcagagcatgcctgtttatgtgcccctctgtggttttggaaccaacagggctacgcttctgaaggtgtggggaggtggtctcacaataaatacaaaagagtcagaaaaaacatggccctgtgaaccccctcagcagggaccttaacatgctgttagtctccaggcattccccacactttcctgctgggtatattcttagctgcacagacacagaggcaccagctcaggttgctgtgaatctgcccagcagctggaattagaagtcagg

SEQ ID NO: 15087 - DNA, 558 bp, Homo sapiens
gagtgaagtaatggagaaaaggtacactatgtgaaaaactgttctatgagggaatatattgtttaaaaattattatttggtagaagatcctctgcccatgctggcgcatgcctggcacaggtcaacattgctgaagtcaaagcagaccaagagtgctaggcatgggagcccagtgccatgatggcctgagagtggctggagagctgctggtccctaccccctccctacccatatctgtccagggagagcaggraggactccgcttccatccctagaagtgacagctcaaggcagagcatgcctgtttatgtgcccctctgtggttttggaaccaacagggctacgcttctgaaggtgtggggaggtggtctcacaataaatacaaaagagtcagaaaaaacatggccctgtgaaccccctcagcagggaccttaacatgctgttagtctccaggcattccccacactttcctgctgggtatattcttagctgcacagacacagaggcaccagctcaggttgctgtgaatctgcccagcagctggaattagaagtcagg

SEQ ID NO: 15088 - DNA, 558 bp, Homo sapiens
gagtgaagtaatggagaaaaggtacactatgtgaaaaactgttctatgagggaatatattgtttaaaaattattatttggtagaagatcctctgcccatgctggcgcatgcctggcacaggtcaacattgctgaagtcaaagcagaccaagagtgctaggcatgggagcccagtgccatgatggcctgagagtggctggagagctgctggtccctaccccctccctacccatatctgtccagggagagcagggaggactccgcttccatccctagaagtgacagctcaaggcagagcatgcctgtttatgtgcccctctgtggttttggaaccaacagggctacgcttctgaaggtgtggggaggtgrtctcacaataaatacaaaagagtcagaaaaaacatggccctgtgaaccccctcagcagggaccttaacatgctgttagtctccaggcattccccacactttcctgctgggtatattcttagctgcacagacacagaggcaccagctcaggttgctgtgaatctgcccagcagctggaattagaagtcagg

SEQ ID NO: 15089 - DNA, 558 bp, Homo sapiens
gagtgaagtaatggagaaaaggtacactatgtgaaaaactgttctatgagggaatatattgtttaaaaattattatttggtagaagatcctctgcccatgctggcgcatgcctggcacaggtcaacattgctgaagtcaaagcagaccaagagtgctaggcatgggagcccagtgccatgatggcctgagagtggctggagagctgctggtccctaccccctccctacccatatctgtccagggagagcagggaggactccgcttccatccctagaagtgacagctcaaggcagagcatgcctgtttatgtgcccctctgtggttttggaaccaacagggctacgcttctgaaggtgtggggaggtggtctcacaataaatacaaaagagtcagaaaaarcatggccctgtgaaccccctcagcagggaccttaacatgctgttagtctccaggcattccccacactttcctgctgggtatattcttagctgcacagacacagaggcaccagctcaggttgctgtgaatctgcccagcagctggaattagaagtcagg

SEQ ID NO: 15090 - DNA, 589 bp, Homo sapiens
gctggagtgcagtggcgtgatctcagctcactgcaagctccgcctcccaggttcacgccattctcctgcctcagcctcctgagtagctaggactacaggcacccgccaccacgctcagctaatttttttgtatttttrgtatagacagggtttcaccatgttagccaggatggtctcgatctcctgacctcgtgatccgcccacctcggcctgccaaagtgctgggattacaggcatgagccaccgtgcccggccctttttttttttgagatggagttttgctcttgtcgcccaggctggagtgcagtggtacaatctcggctccctgcaacctctacctcccaggttcaagcaattctcctgcctcggtctcccgagtagctgggattacaggtgcccaccaccacgcccagctaatttttgtatttttagtagagatggggtttcaccatgttggccaggctggtctcgaattcctgacctcaggtgatccgcccgcctcggcctcccaaaatgctgggattacagtcataagccaccgtgcctggccatgctcaaatatattttactgtcagaaacacataatcaa

SEQ ID NO: 15091 - DNA, 589 bp, Homo sapiens
gctggagtgcagtggcgtgatctcagctcactgcaagctccgcctcccaggttcacgccattctcctgcctcagcctcctgagtagctaggactacaggcacccgccaccacgctcagctaatttttttgtatttttagtatagacagggtttcaccatgttagccaggatggtctcgatctcctgacctcgtgatcygcccacctcggcctgccaaagtgctgggattacaggcatgagccaccgtgcccggccctttttttttttgagatggagttttgctcttgtcgcccaggctggagtgcagtggtacaatctcggctccctgcaacctctacctcccaggttcaagcaattctcctgcctcggtctcccgagtagctgggattacaggtgcccaccaccacgcccagctaatttttgtatttttagtagagatggggtttcaccatgttggccaggctggtctcgaattcctgacctcaggtgatccgcccgcctcggcctcccaaaatgctgggattacagtcataagccaccgtgcctggccatgctcaaatatattttactgtcagaaacacataatcaa

SEQ ID NO: 15092 - DNA, 580 bp, Homo sapiens
tttaaccatagtgttttcttaggattgaatatgttttgtacttatgcctcatttattggtagtattaataacagtatttctgatttgtgtggtcaaagtatgattaacaaatacgtgtataacactttttaatctataatttttttcaaatatattattataagggccatttaacaacattgaaaattagttacttataattcccatctaaagaaaagaaaactgggtataggggactaagggaagagaaggatttctcagtctgtgaaggaatttataattagttcactaattttttagaaattcttgaaatgatcatataaaatgatgctgaaacaaaataaaacaacttcatgaggcatggtacttcaaataaaaatgagtgatacatgatactcattackacttcactgaataattttattgttgaaaaagaaaccactggtatagaatattctgctacaacataataagattcttacctcatgggtctttccaggcttctgtctatagaggactgatacaaggaggcctgttaagataggataatagtaccatgaaaaattttaccgtggcaaaa

SEQ ID NO: 15093 - DNA, 643 bp, Homo sapiens
ctgaattcaataacccagaatgttcctgattactctattttaccttttatttaatatataaatattttgatcacttctcagttttaacacacactctgatgtttaccacagggtaaataatttgaaattgcaagttgagacgctagaaatttgcatattttcttgagactctatacctgcaattccagtggtcaccactatgtgtcagtagtacctcctacaacacaacggttctactggttgtgtttcccagttgcacatatttaagacttttaatgaaaataagatatttattgtgttatagtattcacttaagaccacagagcaactaatgtgcaaaaaacagtttatttacttcgttcccatgctagttgcttctaagagttccttgcaaggaggcttttatatagctgatggctagcaaaacagtgccatttctgcttgtgtcttctaatgagtcatttatccactttctaaagtaattttctgcttttctttgcagagagcaggktaacaagcttttgactctgaatcatttctgcctgtatcattctctctttcaaataaaactctgattcaaataaaaatatacattggctgccataaatttttcacctagttgattattataggctcttaagta

SEQ ID NO: 15094 - DNA, 569 bp, Homo sapiens
aaaaacaaacaaataaacacaagaaatcattgccaaatctggtgtcatgaagctttcccactatattttcttctaggagttttatggttttagctcttacatctttgatccattttgagttaatttttgtatatggtgtaagggaaaggcccaacttcatatccacaaccttttgtaacagaaaaaaaaattagagaacaacagtagagttttgggaaatggagccataaacaatttctctttctagaaagttgggtctcttgctccctmctgccttgtgctccatctggcttccacacagtagtcagcgtgatcttttaagaaactcacataaatgaaccacatcacttccctgtttaaagtcttcaatggcttcctgttacactcagagtaaacccaaacttcttgccatagcccaaaggccctgtgtgatttgactcctgcagatttccgctgccgcctctcctgttgcctcctttctggctcactacactgtcgtcacatgtgatttctgaccattcctgcagcccatcaggctctttcctgctacagggactttgtacatgctg

SEQ ID NO: 15095 - DNA, 390 bp, Homo sapiens
cagctcataacaaatataatagcaatgtaaaaagctgtkaaatatttcaagatttaccaaaatgtaacacagacacaaaatgagcacatgatgttagaaaaatggcattgatagagttgctcaatggagagttaccgcagccttcaatttgtaaaaaaaatgaaaatgcagtatctgtgaagtgcaataaagcaaagtacaaaaaatgaggtattcctgtacatgtgctgccaaagtgagcgctatatacattcttaacctggaccaagagcagtattcaaaataacaactctggccaggcacggtggctcatgcctgtaatcccaacattatgggaggccgaggcaggtggatcacttgaggtcaggagatttgagatcagccctccgc

SEQ ID NO: 15096 - DNA, 542 bp, Homo sapiens
tttttttgagacacggtctcactctgttgtccaggctgaagtgcagtggtgcagtcttggctcactgcagccttaacctcccaggataaagtgatccttccacctcagcctcccaagtagctgggactacaggcgtgcaccccccccacaccaagctaattttttgtttatttttttggagagacgaggtctcactatgttgcccaggctgatctcaaactcctgagcttcagggatatacctgcctcaggctctgtaagtgccagaagtacaagtgtgagccagcaacttatatttattgaacaaatgtattagtgttatgctttgctacagtcacagttcatgttagtcaatttctagaagggtgatgcatttctgaatgatatgttgaacacttttaatttttrttgactacttcctttcccctcccataagaataactgtattcccatgtaactgaagtgcatttacacacccctgccaggagtatacctcttccattacgtgagaaagagctgtgcagatgtttatgtggcatttga

SEQ ID NO: 15097 - DNA, 543 bp, Homo sapiens
tttctgtaacctcaagatggaatatataagattygctaccccactgggggttgaggtaatcactctatggttctctgtgctcattaataaatttgtatgccatttctcctatttatccatctttgctcagttgattttcagtgaactttcagagagtaaaggggaagtcttcccttggcttcaacaaggttatgtcatgaaaaatttctagccaggcacggtggcttatgccagcactttgggaggcagaggtgggtggatcacccagaggtcaggagtttgagaccagccttgctaacatggtgaaaccccgtctctactaaaaaatgcctgtaatcccagctactcaggaggctgaggcaggagaatcgcttgaacctgggaggcagaggttgcagtcagccaagatcatgccattgcactccagccagggcaacaaaagcgagactccatctcaaaaaaaaaaaaaagaaaagaaaagaaaaatttatattcatctcagaattttacaagtttagctaaagccttaattttgagtcccat

SEQ ID NO: 15098 - DNA, 644 bp, Homo sapiens
ggaaaaggttctctcttttcaaattccagatatgctgtggaggtgccctttggagctagaatgggggctaattaggctatttacatgaaacccatggtggagcatgatatttaataacatcagtttgacagataattagaagataaatcattcaaactacaatgctactgcattctaaaaatacaatgcaaatactgttgacagcatttacaattgcacctgttcatttaatttttcagttaacagaaaagaaagcagaaggcaaatttattcaccagccaatctagccggcaaattctggcaagggttgagcttgggcacacaccaatcttgcatgaaataggaccctgcttctcatttatagggaacattgaaaagttacacaacctaatatgtggtttggggtcttttcttattgactgatggtaaatactagcctttgggtctttgggttatgtgggaaatagcaatacatgtttatggtattcaaagttttgcccagaaagtgctgcagaggcagtctctaaaggtttctcatcccyctcccagttgtttaaatgcttataaaaacttgtttatgtgtgctgagtctttttctaaagcatttatctttggataaaagcaaaataaaaataccagagaaa

SEQ ID NO: 15099 - DNA, 539 bp, Homo sapiens
attatttatctgctcccttttcctctttaaaaacttctcaacccacccactaaaaagacagagccaaggctttaagttctcctttccagagctacaatatttgggctttgcccttttccttccactgatatcctcagtagcaaggtatctgtaccaacacaggcaggtctaccttcctgattaccatggtaagctcttgttacagtctgagaaagcatcaaccccaaaccagaggcaaccaggaaaatagccggttacagcgcttaaaggaggagcagtgttatcaaccagaggtacataggttccggagcyatactgacccaagctcgactgcacaaacgccttctcctctctgagcctgagttcttcatctgtaaaacagggatatggtttgtcttaaaggatgaatttcgaagattaaattcaatgataatgacaggtactataatcaagtaagtgcttaacaaatgtttgttgaatatttttttaaaaaacgaatgccctggtagcgtgatgcctccagctttgttctttcggct

SEQ ID NO: 15100 - DNA, 539 bp, Homo sapiens
attatttatctgctcccttttcctctttaaaaacttctcaacccacccactaaaaagacagagccaaggctttaagttctcctttccagagctacaatatttgggctttgcccttttccttccactgatatcctcagtagcaaggtatctgtaccaacacaggcaggtctaccttcctgattaccatggtaagctcttgttacagtctgagaaagcatcaaccccaaaccagaggcaaccaggaaaatagccggttacagcgcttaaaggaggagcagtgttatcaaccagaggtacataggttccggagccrtactgacccaagctcgactgcacaaacgccttctcctctctgagcctgagttcttcatctgtaaaacagggatatggtttgtcttaaaggatgaatttcgaagattaaattcaatgataatgacaggtactataatcaagtaagtgcttaacaaatgtttgttgaatatttttttaaaaaacgaatgccctggtagcgtgatgcctccagctttgttctttcggct

SEQ ID NO: 15101 - DNA, 578 bp, Homo sapiens
gaaaagaccagattggtttttagaagttcgacactaaaatctctgcccacacacttataaattatctctcctcaaaaatatgtacaaacaatctggaaatatgatgagtatcactaaaggaacaaggacttgacctctgcaaccctttctgatgttactaataaaagtaaataagttataatttccaaaataatcattattttttggtttcaatgaagtacccgcaatgttgcctatttttgggggtatgttttttgcattttttagacttcatttgtctccttcttcccctcctcctcctcgtctcctcctctgtttcttctgcatcaaataaaattagaccatgaattttgttttarttattggcaacagcagtattactgccattaatagatctgctatgcaggctgctctatagtaaatgatttgcatatatgttttaaatttacaataaccctggaaggtaaattctatgatgaaagaagaaagaaacaaccaaacccattaactaaaggatttattaagaatgctggaaatacaggaagtagcttagaatgaatatcctacagggagcaagt

SEQ ID NO: 15102 - DNA, 593 bp, Homo sapiens
gaaattctccattgaaatataatcaatttatcaagacttatctagtgattacatattataaacaaggaggacactgagcaatcttcaggtcctttgatataataacaaatgtatataattgccacttattgtttccaattcaaatattatgaatatttagaaacaaacattaatttgtaggcaattgttaagccactttgtgtacttgaacttgagtatgctttttttaacctgaaaagtgcaccatcattgaaatatatttatattagtatgtcttactttcacataaacaaaattataaagactgaatttctctcatagtctgttagtttttttggttactgttttttctttctttttaagtttgataaagatagaattctcacaatagttagaagtcacttaawatttgaggaatgccagttgcttttattatccttccttttaaagatgaaatgaagaagcaaaattcttgttatatgatggccattccagaaaaaatgaagagaggtttatacataaaagacattttaacagttgtactcttctgaatttgagcttgaatgcagtaaaagcaacattttaaaagaatt

SEQ ID NO: 15103 - DNA, 518 bp, Homo sapiens
ttttctgggtgtggtggcatacgcctgtactcccagctacttgggagactgaggcaggagaatcacttggacccaggaggcagaggttgcagtgagscgagatcacgccactgcattccagtctgggtgacagagtgagactctgtctcaaaaaaaaaaaaaaaaattgctagatgaagaagaatgaacacatttgttgttgatttttttctttgacgtgtttgtcgcatctacaagtcacatataaattgatgaaaactgaaatgttaccatatgacataattttaaatggcctcataattttatttctcttctcacaacatgttatttaacttcttatttattctatcaagtagttatatacatataaaaacacttacaatgtggtggaggcttttcctccccctttccagacacgttgctcggaaccttcctatttttcatgtaataatatatctcagagatctgttcatattagaacataatgactttgacatttttaacagctaaataatatt

SEQ ID NO: 15104 - DNA, 518 bp, Homo sapiens
ttttctgggtgtggtggcatacgcctgtactcccagctacttgggagactgaggcaggagaatcacttggacccaggaggcagaggttgcagtgagccgagatcacgccactgcattccagtctgggtgacagagtgagactctgtctcaaaaaaaaaaaaaaaaattgctagatgaagaagaatgaacacatttgttgttgatttttttctttgacgtgtttgtcgcatctacaagtcacatataaattgatgaaaactgaaatgttaccatatgacataattttaaatggcctcataattttatttctcttctcacaacatgttatttaacttcttatttattctatcaagtagttatatacatataaaaacacttacaatgtggtggaggcttttcctccccctttccagacacgttgctcggaaccttcctatttttcatgtaataatatatctcagagatctgttcatattagaacataatgactytgacatttttaacagctaaataatatt

SEQ ID NO: 15105 - DNA, 483 bp, Homo sapiens
gagcattaattccttctctgtttggactctgctaattatccccattggtagctcagtctggatctctgaaagaagsaaaggaagcaaaagccctctgctcccctccccccagccctgaattttaattacaccggttctcctaataaacttacaagccctggcagagcttattattaatgggccacgtctgagcctcagtacagaatagctctgttctcccaacacacacacacacacacgcgcgcacacacacacacacacacacacacaatctctctctctctctctctctcagatattcctcaggtacaccttttccagaggccactggttacttgcctggtggctggtgggcaacctgaagtgtcagctttccagggaagaagatggggcaggtggtcaccaggctggtcataatctgagtctctggggctctgtccaggttcatagggtcaggccaaaaagtgggagtatccctcccat

SEQ ID NO: 15106 - DNA, 519 bp, Homo sapiens
tttgctgcaaggatgcagaggaatctaggacctttgagaatgtaataaataatycttttatttggaactcactgaaaatttgacatttaaaaatgttttccttttattatttaaccatcttttattttcagtttgtgctttttttatagatacaacatgaaaatgatgttcctatacagaattctatcaatattaaggggtatagaaaagtttatttgaactatatatttattgtttctttttattattattctttattgaatttctgtgagattacagaattttcaatcaaagtactggtaggatttgatctactctctcttgaataatacaaacaccctattttttcactaagataaaatcaagataatttacaaacactttaattaaaccatgaatgttttattttatatacataaacatatattaatccattaagactccatcaccatttttgaatactgacagagtgaattccttagtcttgtaccatggagatggctattaatatagcgcatc

SEQ ID NO: 15107 - DNA, 551 bp, Homo sapiens
tgattgcattttttccatctacaatgtgacttatgagtctgatatagtctcagtcaattacatgtgtataatcattattgaaccaaaatagacaatggcaggtctggagccagtctagtctgataccttaatgggcctttagagacttttaatacactgactactggaataatagtcagtctactgaatgactttgtatattttgatttttttaaactcttgaggtacaaaagaaagttcttagaggaaggaacattaagagtaacaatcacaatgccatatgaaaatacttgaattccagatgtacttgactatgctccacataggaagcgatgagcaatttgaaaagaaatttaagagttgcttatatttggaaccactgtagtacttttgcctctaatcaaagaaaatatacagtgggattcagagttccytgtaactttatgttctttctaaaaatagatgtagtggacaaataacccaggaaaattcctaaaaggataacaggggtgtaaatcaaaagatactagtaatatccacatatacctagt

SEQ ID NO: 15108 - DNA, 604 bp, Homo sapiens
tttattaaaggaacatacgtggaaaatgttattgctctgttctttctcacaccaccatatgttacacttgccaccattttctctcaactccaccctgagttaaagctgcttttcccaggatttggagacattttgcttatctttccttaactcgatccattatgtgccatcactagaatttaaaattgatttcatatccatttaaattaatttgatcctcacaataatcccaagaggtagacagagtggattgtattgttagtgaacttctttctcatatgaggaaagtaaggcccagaggggtcgtatgggttgcctctggtgatgaggttttcgcttttcaaatgttgcatgtgtggctacaaccatgcttcattgttcttcccacagaagacagtgtccacaaatcaggctttctctctctctctctctctctctctctctctctctcwcacacacacacacacacacacacacagagacacacacattagcaaaacttgaatacttgtgacatgctaacatcaccaccattttctctcagccccgccctgacatatcagggtgagactatcagagtggagctgagagaaaatggtggcga

SEQ ID NO: 15109 - DNA, 507 bp, Homo sapiens
cagtcaccttgcaggaaaacattatctcatacctcaggaagcagttatctagatgctctcacgattcaagttcaaagcaaaygaaacaattctaccaaaataaaactttgagatagaaaatatttttaaacttttaagagacagaattggggaagagggacagaactaaatagttatgtttgagttcacagataaataaagctaactttaacctggaagtctcataaatcttgctttgacatgaattttaataaaaatctgattagttaatgaggaaccatgtactaatcttttacaaagctgcaaagcattcatttaagttataatagtgatatatcactattatatattcattttctcatttctagcattttgcagtttttattatatcaattttggccactattatatatcaaaattgtttgatttaaatatcatttaaattcaatataatgttacagcaaattaagatatttgctgtttgtaaaaaagaaccacttataaaag

SEQ ID NO: 15110 - DNA, 225 bp, Homo sapiens
ccccccaaaatggaatctgaaattcatggttctaaaattctataggtgattctctccattcctcatcatactccacagactggatgcttgtttgatgaggktttacctacaccgattgatgttcctggtctcaggagcttggttctcaaaaaggagctgagacaaacactccggaaccccagaagcagcccccagacacttgggagtgactacaactccaggaaa

SEQ ID NO: 15111 - DNA, 563 bp, Homo sapiens
tgacatttttcaccatgctcactgctacaagcctagttcaagtcactatcccctactgcctggatgactctagcagtctattcccaacccagctgtgcctacttttaagtatttaagtacaattttgtttgtttccaaaaagtgtactggattttaaccctaagtttctttaagggctcaagaactcttgaatcaatacagtcaagctgccgctttctttttctttttctttttctttttttttttcttttttttttgagatggagcctcactctgttgcccaggatggagtgcagtgacgcgatcttggttcaccacaacctcsgcccccctgattcaagcgattctcctgcctcagcctttctagtatctgggactacaggcgcaagacaccatgccagactaatttttgtatttttagtagagacagggtttcactatgttggccaggctggtctcaaactcctgacctcatgatccacccacctcagcctcccaaagtgctgggattacaggcgtgagccaccgtgcccggccactttatttttctatattaagaatgg

SEQ ID NO: 15112 - DNA, 563 bp, Homo sapiens
tgacatttttcaccatgctcactgctacaagcctagttcaagtcactatcccctactgcctggatgactctagcagtctattcccaacccagctgtgcctacttttaagtatttaagtacaattttgtttgtttccaaaaagtgtactggattttaaccctaagtttctttaagggctcaagaactcttgaatcaatacagtcaagctgccgctttctttttctttttctttttctttttttttttcttttttttttgagatggagcctcactctgttgcccaggatggagtgcagtgacgcgatcttggttcaccacaacctcggcccccckgattcaagcgattctcctgcctcagcctttctagtatctgggactacaggcgcaagacaccatgccagactaatttttgtatttttagtagagacagggtttcactatgttggccaggctggtctcaaactcctgacctcatgatccacccacctcagcctcccaaagtgctgggattacaggcgtgagccaccgtgcccggccactttatttttctatattaagaatgg

SEQ ID NO: 15113 - DNA, 660 bp, Homo sapiens
aaaaaagttaagcacatagataacacatcaaacttgaattatcaacaccttattagtctatgaaaaccctcactaagctgtcagagccccacgagaaatatattttttttccaggtattgcaattgtcctggtgggagtgaattcagcaaaggaaataatgtgccatatgtctagcatattcagtgtgtatatttacgctgaatcgtcaattacaggtttattcccttttcatcttgcctcttaaccttctgaaagaagaaaagataagttccagggaaaatttgtgaacaggattatcaagcasatgttgccctaagtctcatatttgaagatatctaagaacattcaccaaagcctcaccttccttgtcactgtgatcagacatgttcattaccatccttggggcttaggtctctgagacgcccccacagaatttctagtggcttcttgttacccagggccaggacacacaatgcatgatcatgcaaaacagtagcacaaactaatgctcactcacaaagcatctctgaaccacctcacaaccattaggatggctcctatcaaaacagtaagtaaaataacaaggatttggagaaattgcaacatttgtgcactattggtgggaatataaagcagtgcagctgccatggaaaaaaata

SEQ ID NO: 15114 - DNA, 497 bp, Homo sapiens
cgtaaggcaagcaaagctctgaggaataaatatccccattttaccagtaagggagctgaaattcagaggaataacattcccatttaactggctaggaaaccgaggttcagaggagtaacaacaaatgccagagaccttattagtaaatgccagcctctaacctgggtctgcggacrccaaagtttctccttcgagtgaggacaacagaaacgaccgaacttgcccgggttcagatccacggaaagtggacatcacgggttgtgagggtttctgggcatttagtccagcgacccctacgcggcgaggccagcattgccctataaacgttgctctaagcacttaccgcgcggggtgactgtctgaacgcagtgacccccaagccctgtgacccccatctgctctcctttgggagaaaagagtaagtggaagttgtgtcccccttcgagggtggtatggagctgcccggccaggagagcgatctctgttttcccagctgg

SEQ ID NO: 15115 - DNA, 546 bp, Homo sapiens
ttgtatttttagtagagatggggtttctccatgttggtcaggctggtctcgaactcctgacctcacgtgatctgcccacctcaacctcccaaagtgctgggattacaggtgtgagccaccacgcctactgtatatatcttctttaaaaaaawtttttttttcattacaaggaattgaaattttattccaggtatttatttatttaatttttttccttctaacttttattttaagttcagagggtgcatgtgcacatttgttacatgggtaaattgcatattgctggggtttggtgtataaattattctgtcatccaggtagtgaacatagcacacataggtagttttttttgcctaccctccaccctcaagtagtcccaatgtctgttgttcccttatttgtgtccatgtgtactcagtgtttagctcccacttataagtgagaacatgcagcatttggttttctgctcctgtgttaattcacttagaataatggcctccagctgtatccacattgttgcaaaagacatgattttgttcttttttc

SEQ ID NO: 15116 - DNA, 546 bp, Homo sapiens
tactcccatcttgctgatggaacttgagaccaatttaagtattcttccaggacttaaataaattaatggcaggaccaggaagattgcagaataattgtctcctactgcagaccaagccccaagtcttacacacacccctgaggtcataatgctacctttgttgtcactgccacgtcttgcaaatgtttccaccatcacatgcatggagatggcttgatgccatgaggtgagtgcaaaccagatgcaaatagcaagttaacctaggtcatagtttggtttgttaggagctgagaattccttgccaatccaaaatgcagaacttatggttcagaaatatcagattcccaagtttatttattcctgttcttcagaaagcatyctagaaaaatcacccactttatattcagttggtaataactgaggaatggacatggaaagtcacaaagacttgaaggaaaacagatgttttttgttttttctctgatactggaaaaaaaaaaaaaaccacaacaacttagaaaaacatgacttgcttgagtgtttttt

SEQ ID NO: 15117 - DNA, 584 bp, Homo sapiens
atattggtttcaaatttcagaatatttttcttcttttattttatttatattttctaaatataatagaatatactttaatactgtagataatagaaaaagaataaaatatttgatttggagtgaaaaaggagaacatataggattcaccaaatgataaatctgtagcattcaaatcagctaaaattttgaacaggaaaagaataggaagagccttttttctagcgcactccccttttttgttgtttctctccctggagaaaaactttaaaaagcacaatratttggaacacttatggaaataaatgttgtagaaactcacgttaataataattccaataatgttgtcatgttagataaaccccctgaaccctcagaatcatttatatttatatttttttggctttacttaataacttcataattacataattatgtccctgaaattagggtgcaggaatgtttagtcagttaccaggactgaggatttggggttcatttacaaaatgaacaattcattattattgaaaaaaacatcagtttaagtgactgtcaaattatagcttcttatttcaggactgcaagca

SEQ ID NO: 15118 - DNA, 578 bp, Homo sapiens
aggtgagatgtcaggcttcatttgtcaagcctgcaggaaatctaaggtttgaacattttcatcattttctctcccttcccaaggctgagctttgcaatctggagacatgttgtgtgcctgccctgggtcaacgtgtaaggccatcccttacctaaactgtactttcagagttagatcaagtgtgggaatttgtctcttcctttgagctttctcagttacattttgcaggttacttctgaattgtaaatctctgtcaatcccagaagagggaattcctttttgccattttacactattattttttgttagagwttgtatttttcctacttttgaaagtcctccttttctccagtgtagttgaaataaaattatacatcaaaaagtagaaagatggaagaaggaattctgtctcaacaatgtaccatagaggccaggtgtgggagctcatgcctgtcataccatcactttgggaagctgaggcaggaggatcttttgagcccagggattcgaggcagcagtgtgctatgaccacaccactgcattccagcctggatgacaaaggaagaccaagtctctta

SEQ ID NO: 15119 - DNA, 563 bp, Homo sapiens
cataaactattggttatacaaccatgaagccattttgtttgcctctgttctcaaaatactttccaatatcaaacttttatagcgattaagagctaccaactgaaggcaaatatgtttttaaattactccaccactttttaattttttttaatagagatgaggtcttgctgtgttgttcaggctggtctctgactctggcttcaagcaatcctcccactttggcctcccaatggtctcggattacagacaygaacctctgtgcccagtcataccccaccaattgatgctatgacattttatgcaacatgatcattttttgtgaagctttatgctagatacctcatcagcttaagtcccgctctgagccagttatctgtgaagcagcaaagcaacaagtgacatctgaaaaggtgatttcaaatgaagcatttctcaatccaaatcagataggaaattaaggtataattatttgataagataaagaatgtttaagttattaaacagatatagtatgtaaaatatagccatctgttttaaaaattttccaatggctatcacctgaa

SEQ ID NO: 15120 - DNA, 336 bp, Homo sapiens
gtgtttttaaggtttccatcaacatccattctcctgtattcattgttaggccaaaaggactcaacatctttgagtcttccctatttgagaccaagtctatactcagcttctaatttcagctctagcttccattcactctcagtctttgttagcattatctaagtttargttgagattattgcattattgacttgcattataaacttcttctttcaagaataatatgaccttttaatcttgttatatatgtttacccatcatttacataaatttttattttatattctatatggttttattccaacagtcttttgtagttaaatattttatactcat

SEQ ID NO: 15121 - DNA, 529 bp, Homo sapiens
atcatttaccttacaccaaatgatctccagctcgtggaaaaatatgtaaagttgcccagctgcattaagcttaaactcttctgaaggagaaaagaagcaatggagtagggacattaaagcaggagtgtggtgatatggctgagacttctacttgcacactgtggtagctgtgtggagaatggattgaaaaaagggcaatgacagaagcttaaattagtatcaaatatggcaatcctgtaaatttaggtgtccttgaaataagaatgtataatagttctcattatttccccaagaaatctctgcayttggccttgtgagggaagcgctatagttaccaagtggtgggggtgggaaggtgaatttgaaacaacatttggaattactacactttaaaggtaaagctggcaggaattccatacacgtcagatctgaaaatgtgtgtgtgtgtgtgtgtgtgtgtgtgtgtgtctgtctgtgtgtgtttgtgtgtgtgtgaagcagggagagagagcaagagtgaaagtgagca

SEQ ID NO: 15122 - DNA, 529 bp, Homo sapiens
atcatttaccttacaccaaatgatctccagctcgtggaaaaatatgtaaagttgcccagctgcattaagcttaaactcttctgaaggagaaaagaagcaatggagtagggacattaaagcaggagtgtggtgatatggctgagacttctacttgcacactgtggtagctgtgtggagaatggattgaaaaaagggcaatgacagaagcttaaattagtatcaaatatggcaatcctgtaaatttaggtgtccttgaaataagaatgtataatagttctcattatttccccaagaaatctctgcatttggccttgtgagggaagcgctatagttaccaagtggtgggggtggraaggtgaatttgaaacaacatttggaattactacactttaaaggtaaagctggcaggaattccatacacgtcagatctgaaaatgtgtgtgtgtgtgtgtgtgtgtgtgtgtgtgtctgtctgtgtgtgtttgtgtgtgtgtgaagcagggagagagagcaagagtgaaagtgagca

SEQ ID NO: 15123 - DNA, 529 bp, Homo sapiens
atcatttaccttacaccaaatgatctccagctcgtggaaaaatatgtaaagttgcccagctgcattaagcttaaactcttctgaaggagaaaagaagcaatggagtagggacattaaagcaggagtgtggtgatatggctgagacttctacttgcacactgtggtagctgtgtggagaatggattgaaaaaagggcaatgacagaagcttaaattagtatcaaatatggcaatcctgtaaatttaggtgtccttgaaataagaatgtataatagttctcattatttccccaagaaatctctgcatttggccttgtgagggaagcgctatagttaccaagtggtgggggtgggaaggtgaatttgaaacaacatttggaattactacactttaaaggtaaagctgrcaggaattccatacacgtcagatctgaaaatgtgtgtgtgtgtgtgtgtgtgtgtgtgtgtgtctgtctgtgtgtgtttgtgtgtgtgtgaagcagggagagagagcaagagtgaaagtgagca

SEQ ID NO: 15124 - DNA, 529 bp, Homo sapiens
atcatttaccttacaccaaatgatctccagctcgtggaaaaatatgtaaagttgcccagctgcattaagcttaaactcttctgaaggagaaaagaagcaatggagtagggacattaaagcaggagtgtggtgatatggctgagacttctacttgcacactgtggtagctgtgtggagaatggattgaaaaaagggcaatgacagaagcttaaattagtatcaaatatggcaatcctgtaaatttaggtgtccttgaaataagaatgtataatagttctcattatttccccaagaaatctctgcatttggccttgtgagggaagcgctatagttaccaagtggtgggggtgggaaggtgaatttgaaacaacatttggaattactacactttaaaggtaaagctggcaggaattccatacacgtcagatctgaaaatgtgtgtgtgtgtgtgtgtgtgtgtgtgtgtgtstgtctgtgtgtgtttgtgtgtgtgtgaagcagggagagagagcaagagtgaaagtgagca

SEQ ID NO: 15125 - DNA, 1315 bp, Homo sapiens
tccgcctcccgggttcacgccattctcctgcctcagcctcccaagtagctgggactacaggcgcccgccaccgtgcccggctaactttttgtattttkagtagagatggggtttcactgtggtagccaggatggtctcgatctcctgaccccgtgatccgtccacctcggcctcccaaagtgctgggatgacaggcgtgagccaccgcccccggcctatttatctatttattaactttgagtccaggttatgaaaccagttagtttttgtaattttttttttttttttttttttttttttttttttttttgagacgaggtttcaccgtgttgccaaggcttggaccgagggatccaccggccctcggcctcccaaaagtgcggggatgacaggcgcgagcctaccgcgcccggaccccccctttccccttcccccgcttgtcttcccgacagacagtttcacggcagagcgtttggctggcgtgcttaaactcattctaaatagaaatttgggacgtcagcttctggcctcacggactctgagccgaggagtcccctggtctgtctatcacaggaccgtacacgtaaggaggagaaaaatcgtaacgttcaaagtcagtcattttgtgatacagaaatacacggattcacccaaaacacagaaagcagtcttttagaaatggccttagccctggtgtccgtgccagtgattcttttcggtttggaccttgactgagaggattcccagtcggtctctcgtctctggacggaagttccagatgatccgatgggtgggggacttaggctgcgtccccccaggagccctggtcgattagttgtggggatcgccttggagggcgcggtgacccactgtgctgtgggagcctccatccttccccccaccccctccccaggggatcccaattcattccgggctgacacgctcactggcaggcgtcgggcatcacctagcggtcactgttactctgaaaacggaggcctcacagaggaagggagcaccaggccgcctgcgcacagcctggggcaactgtgtcttctccaccgcccccgcccccacctccaagttcctccctcccttgttgcctaggaaatcgccactttgacgaccgggtctgattgacctttgatcaggcaaaaacgaacaaacagataaataaataaaataacacaaaagtaactaactaaataaaataagtcaatacaacccattacaatacaataagatacgatacgataggatgcgataggatacgataggatacaatacaatacgatacgatacaatacaatacaat

SEQ ID NO: 15126 - DNA, 1315 bp, Homo sapiens
tccgcctcccgggttcacgccattctcctgcctcagcctcccaagtagctgggactacaggcgcccgccaccgtgcccggctaactttttgtattttgagtagagatggggtttcactgtggtagccaggatggtctcgatctcctgaccccgtgatccgtccacctcggcctcccaaagtgctgggatgacaggcgtgagccaccgcccccggcctatttatctatttattaactttgagtccaggttatgaaaccagttagtttttgwaattttttttttttttttttttttttttttttttttttttgagacgaggtttcaccgtgttgccaaggcttggaccgagggatccaccggccctcggcctcccaaaagtgcggggatgacaggcgcgagcctaccgcgcccggaccccccctttccccttcccccgcttgtcttcccgacagacagtttcacggcagagcgtttggctggcgtgcttaaactcattctaaatagaaatttgggacgtcagcttctggcctcacggactctgagccgaggagtcccctggtctgtctatcacaggaccgtacacgtaaggaggagaaaaatcgtaacgttcaaagtcagtcattttgtgatacagaaatacacggattcacccaaaacacagaaagcagtcttttagaaatggccttagccctggtgtccgtgccagtgattcttttcggtttggaccttgactgagaggattcccagtcggtctctcgtctctggacggaagttccagatgatccgatgggtgggggacttaggctgcgtccccccaggagccctggtcgattagttgtggggatcgccttggagggcgcggtgacccactgtgctgtgggagcctccatccttccccccaccccctccccaggggatcccaattcattccgggctgacacgctcactggcaggcgtcgggcatcacctagcggtcactgttactctgaaaacggaggcctcacagaggaagggagcaccaggccgcctgcgcacagcctggggcaactgtgtcttctccaccgcccccgcccccacctccaagttcctccctcccttgttgcctaggaaatcgccactttgacgaccgggtctgattgacctttgatcaggcaaaaacgaacaaacagataaataaataaaataacacaaaagtaactaactaaataaaataagtcaatacaacccattacaatacaataagatacgatacgataggatgcgataggatacgataggatacaatacaatacgatacgatacaatacaatacaat

SEQ ID NO: 15127 - DNA, 587 bp, Homo sapiens
cctgtgacacttagatcctaatgctgactccaattccctcctgggacctcccctcccttgcagcatgctgggctttcccttagaaaaccccacgtcatttccttccatggaacatgaatcagcttcacccacagtgtctgcatgtctctgtccatagcaaacgtttttattaccttaaaatatagatttttaccttaactagccaagacctaggaccctttttccaagctcttttagatgaagtaataaatgcaaatattagagatgtgtatatgtgtataaatatatggagaaaagatgttgcctagttgtacaaattagctttaataaaactcctgatttaaattatttaattgtgagaagggmgattctaactcaacacgccaacgaaataaaagccttatccctctgctccgccaaaatatcccatttagagcctgcgtgtgtgtgtacacacacgtgtgcactcatccccacctgaccatatcaaattattatttaaactagatatttttactttgttgcatagtagtaatggtttctggaatgaaaaaataaaaaacaggagaataaaactgtttaaatgt

SEQ ID NO: 15128 - DNA, 982 bp, Homo sapiens
tttctttctttctttctttctttctttctgtttcgtccttttgagacagagtttcactcttgtttccacggctagagtgcaatggcgcgatcttggctcaccgcaccttccgcctcccgggttcgagcgcttctcctgcctcagcctcccgattagcggggattacagggaggcacccccacgcctggcttggctgatgtttgtgtttttagtaggcacgccgtgtctctccatgttgctcaggctggtctccaactcccgacctcctgtgatgcgcccacctcggcctctcgaagtgctgggatgacgggcgtgagccaccgtgcccggcctgttgactcatttcgcttttttatttctttcgtttccacgcgtttacttatatgtattaaygtaaacgtttctgtacgcttatatgcaaacaacgacaacgtgtatctctgcattgaatactcttgcgtatggtaaatacgtatcggttgtatggaaatagacttctgtatgatagatgtaggtgtttgtgtcatacaaataaatacacatcgctctataaagaagggatcgtcgataaagacgtttattttacgtatgaaaagcgtcgtatttatgtgtgtaaatgaacgagcgtacgtagttatctctgttttctttcttcctctccttcgtgtttttcttccttcctttcttcctttctctccttctttaggtttttcttcctctcttcctttccttctttctctctttctgtccttttttccttcgtgctttatttctctttcgttccctgtgtttccttcttttttctttcctctctgtttctttttcccttctttccttcgtttctttcctcattctttctctctttttcgtgtttctttccttcccgtctgtcttttaaaaaatggagtgtttcagaagtttactttgtgtatctacgttttctaaattgtctctcttttctccattttcttcctccctccct

SEQ ID NO: 15129 - DNA, 608 bp, Homo sapiens
catacaaatggccaataggtatatgaaaatatattcaacaccrctaatcatcagggaaatgcaaatcaaaaccacaatgacatattagctcacacttatcagaatggctatcatcaaaaagagaaaagaaaacaagtgttggcaaggatgtggagaaaagggaatcctaatacactgttggtgataatgtaaattagtacatccattgtagaaaaccatatggaaattcctcaaaaaattaaaaatagagctactttatcatccagccatcccatttctgggtatgtagagccaaaagaattgaattcagcatctcaaagagatatattaaactatttttctctaattttaaataacctgcttcagtaggcctgtatttttctattttaagaaaaaaagctttcaactttttccactttcaattttttagttaaaaaagaacacacacattcatcagtctatggtaattatcccatcagaagagataaaattaaattctgaggagttgtagacaggcatcacattagccagaatgggagaggaagacttctctgaggaggaggcatttgagctaaatcctgagtgatatgaaggaaccagccttgagc

SEQ ID NO: 15130 - DNA, 1193 bp, Homo sapiens
gaaggttccaggggtggggtggggattctggcctggtctggggaccccgaaggagactgaggggccttcattaggagatcagaagtgggcgggtgcttctggcgggggacgggcacaggcgatggcctggccgtaggagaactgccggggtccccgtgtggagggagtgagggggttgggggccacacctccacataggtggcgttgttgcaggcctcggcaaagatgcctggtgatgcagggggtgccaagtccccatcctccaggccaggcaggcccccgtctgtctccagcagggtcaggaggtactgggctaggtggaaacagatgctctctgggccggggtggcatttggggacccccaggcaccatggggacccaagaactagccttcctccttttttatcatctcaacctccgcacctccatgctccaactgtcttccccagaaggtacagagaccacctagaccccaggttctggattgtcgaactcctatatatcctttaaagccccagctccaatgcccggggcgccctcccacccagccctgatccaagagtccagggggcgcctgtgtctggctctatttatatggtcccccggcctacagctgacacctctttgggtccccagccccacccaggcacagctcatgggaggggtaacagataacaccaatatgcatgccattctacaaggcccaggagcccccaggaggcgcctcccgacccctgctcactgttctccaggcgctggaggctcttccgccccttggccttgggcacgaggtctgagttccgcactgcctggttgatgaagtgctgtttccgcctggaagccgagagtctcttcacctgggagctggctagggcaggcaggcagctgggaaggggcctgtgggccggggcaggggtggtcctcagggtcaaggccggccaggatctccgagaagggccctaccacagccatggcccgcttggtttcccccagcaatggagagctcacccctayggtgtgtgaagtcctgggcccttaaaatcctattttgtttcatcctcacatcacaggaagcagatacaattgtgaagacgggctgggtgtggtggctcatgccggtgatcccagcattgtgggaggctgaggccggtggatcacttgagctcaggggttcaagaccagcctgagcaaca

SEQ ID NO: 15131 - DNA, 530 bp, Homo sapiens
aggaaattttgccgacaactgccaaggagacgtcgccttgaacatctctgggttttctaaacttgttggtaaaatcgagttagcacggctctgctgctgtcttctgataagaaagatacacgtgcaaagggagttagagtcctatttcttaatttcatatacttttcttatgtcaccagaagaatattgagtccttagcactagttttagttgtacccacatctgtgactaagaatctaccttccacactttcttcaactgaccctgataggaaggtgaacctatcagtcaacaggcagaatttacttgcaaacttttcttagtgggctggggtagtgttttattatttaatttgataaataggcaacatttaaaaatcaaaacaatggagaagcactcctggaagggcagacttccaaaaattctaccctccatcaactcaatgagagtactgccaacaatcgtcaaaatcaatttattttcagaactctggaaactaactaaaggyttgtgacaatctcaggagtgtt

SEQ ID NO: 15132 - DNA, 527 bp, Homo sapiens
ttatgaggccccccctgccatgtggaactgtgagtccattaaatctctttttctttatamattacccaatctggagtatttcttcatagcactatgaaaatggactaatacattatccattttaccatcagatatatttttttgttctaactgtttggagtatttcttttacccaagataagtaaaagctacaactcttagtataaatatgtgtccaagtgcctcataactgctaaccacagggatcctgagctctcatagcttaaacacacagtgtttattttactggtctacttctcctgaagacctaaaagggcctatagcctcagtagttgacaaaacaacatattaaaattcctcactgatcactaacataacctaaaatccctgcttttgacattagcatggcagacatccttagcaggcctaaatagaatggccttataagtggatccaaagggcttctgaatcatgagttagccagatggtcagcatctccagtcctttatgctaacatactttggaag

SEQ ID NO: 15133 - DNA, 542 bp, Homo sapiens
ccgagtagctgggactacaggcacacaccaccaccctggctaatttttgtatttttagtagagacggggttttgccatgttggccaggcaggtttcgaacttctgacctcaagtgatccgcctgcctccgccttccaaagtgctgggattacaggcatgagccaccacgcctggcccaagataaaggatttagagtcaagtatttaaaaccctgattgaggtcagtactaggatttgtttaagcagtgattgggaagtttttaccaacaggtactatgttttgcttccttagtttttgtctttatgtgtcatctgttcaaaatacagcatgtattaatcttcattttcttaacagtgtttaatgaggaataatacatattaatgtaggtttcagttaatagtgattgactgaacytcctgtttagatcaagaggctctcaacagggcatcagctggtgacagactgccctcactgtaggtaaacaaacaccatccagggctgaacttcctgacgtgattggagagatttttgtgatctgtgc

SEQ ID NO: 15134 - DNA, 558 bp, Homo sapiens
ataagagacattcaatgttttagttaaaactaactggtttatttaaagtagatgaactctaaggctttccaactctttggttttataaaacaattaaatatagctttacaaacctgtctaattaaaatgcactataaaataaaacaataagaagcatttggttctgttattgaaataggaagactcatcaaaggaatcaaagataaaatttagaaagaaatctaagtatgtatacacatctaataattgtactatttgcaagtattgcagtaagaatagtggaatatcaaatggaccatagcaatatgaatatctgtgtagcagcaaagtaagatgtagatataatcttgagagatgcrgaaaaagcctctgaagcctgacttctttatattttgcataaatttatggagtacaagtataattttgttacatgcatagattgcatagcattgaagtcacggcttttagagtatccattacccaaataatgtacattatatccattaagtaacttctcagcctccccctcttcccaccctgtcagccttctgagtttcc

SEQ ID NO: 15135 - DNA, 702 bp, Homo sapiens
gcataaccaaatgcaatcctacttatccttttatagttgagaaaatgaactcaatatctgaagagaatctgggtggacttaagaagtcaaaccatcagagtgcaggacaaggcaacacttttaaaagaagccatttcaattacacttttcagtcatggaaagcaatgacatcaataagaaaaaatatggtggaaatttggtgtaataatttttttctggtaaacaatcttctgaatcatctataaaacagagttcatatctaaaaaaattcgctagtatattatgtccaaaaattttaaaaatctgctttctcttacaattttgacatgtagtattcatgaacatcttttaaaaacatctttctagagccaagaatgtggcaactcaatgtcaggtcaagatctaccagatataaatgaagtatttaacgaacgtacttaactattataaatagttgattgccctttaataaataattttcctttaaaagtgttggaattgtgattacgccttcctccacacagatyattttaaggaaaaaatttccacccataagcattatactctaaccaactaagcaaatcagccccagatctaagatgaaaatgttatatgaataaactctaaagagctaggacatatgtattccccttgattcttcacagtagataaagtactgtgggaattactttgctttgaatt

SEQ ID NO: 15136 - DNA, 562 bp, Homo sapiens
ataaaggaataactaattaaaccaaagtaattcaaagggcttgcaacatggaaagaaacacasatactcatagaaaagtctattttagtggaaagagaatatctaaataaaaattttccttcaagtgatggatattttaccaaaagctttaaatcaaataaattattttttacattatggtatgaaagtcaaaagctcatgaaagtagaaaaggttgatagttttagattacattaccctaaataaagaaggaattgttgctgacatcaccttaaatatactgcatattgacatgtttttgaaggaattacagttgtgtggaacaagtcaaaatcaaatttagttcaatcagttgcagcacattttttaaaaataaaaacatattaggatacaaatacatgaaaaggccttaccaaccttactctttatgtaccaaatttttaaatccatgcttatttgcaagcaaaaaaatatgtactttggtaaaattgtgggattatatatattcagaaaaagagtaattgcacatacacacaaattccggaccactacttcctttaaa

SEQ ID NO: 15137 - DNA, 562 bp, Homo sapiens
ataaaggaataactaattaaaccaaagtaattcaaagggcttgcaacatggaaagaaacacacatactcatagaaaagtctattttagtggaaagagaatatctaaataaaaattttccttcaagtgatggatattttaccaaaagctttaaatcaaataaattattttktacattatggtatgaaagtcaaaagctcatgaaagtagaaaaggttgatagttttagattacattaccctaaataaagaaggaattgttgctgacatcaccttaaatatactgcatattgacatgtttttgaaggaattacagttgtgtggaacaagtcaaaatcaaatttagttcaatcagttgcagcacattttttaaaaataaaaacatattaggatacaaatacatgaaaaggccttaccaaccttactctttatgtaccaaatttttaaatccatgcttatttgcaagcaaaaaaatatgtactttggtaaaattgtgggattatatatattcagaaaaagagtaattgcacatacacacaaattccggaccactacttcctttaaa

SEQ ID NO: 15138 - DNA, 564 bp, Homo sapiens
attaagtctgcaagttgttcaagagccaataaataaagaactgcaacaggatgcccaagtagtccttgtacagtcagtaaatttaacgtggcttcaaaacaggagagcagaggaaacacctttaggaattctctggggtatgatttaacaatacaaaacaagagtggaaactaaagctgaaagaaaaactggataaagcaataacaaacgaagttgttcattttgggcagagactctgaggaccagaagtttaagacatgaagttgtaaagcaaagttcgctcttcaggcagcccaggtatatataatgtcacaagtgtccaaagatttattgacgtagcattggaattttctgcaacatcatgtaatcagaacacaataactcttaggagcgtcttgacatttctgaaaatatgtggatatgcatgtgaatgactgtatgaatagggaaaaatattctgttgtgtactaaaaaatagataaatctttttacatgagtcagtatcctacaayttgacatttattttggcaataaagtatcaattaggatataaggaagagccat

SEQ ID NO: 15139 - DNA, 418 bp, Homo sapiens
ttttagcacatagttctttttctgactactgctccctccaaggcttcatatcatgttgtttctccaaatgcaattaatacactagccatatcaaatgtatttcacctctatggttctgaacacrttaatcaccctttataaaacatctcttcctcactctctttcttctccaatgcttgtcttttaagactcagctcaatactcctccaaaaatcatttcttgacccagaaatataaattaggcacccagttctcccatgcatccttggcatgcattagtcatagaatttgtcatattctcttataatttttatctatatattttttcaatgtcattgagtaaccttcttgagaaaaagaatgttttttatatatatacttttttattaatgtagaattgatgaattaattcagctca

SEQ ID NO: 15140 - DNA, 528 bp, Homo sapiens
ccacagccacttgtcccaggatttctctatcctgcaatgcggccggataattctctgctgtggggactgtcctgggccctgtagggtatttagcagcatctctggcctctgccctccagatgccagtaccaagccccttcagttgtccccacaactgtctctctgttgggggcagaaagaaaagagagggaagagagaacatccaaaccaccctcaaagcaaggtagagctcccctgagtgcatggtgctygtcaactcaggaaagcacggataatgctgccggaagttggttctgcagctggcgaggtggccacccgggacaaggatggctctggcgccatgcccgtcttggactagaaggaaaagacagaaggacgagtctgcctgtgagtgataccaacacgggaaagcagagctagagaaggagggatggagaccccaagttccgatgacagactcctggaaccagctatgcctgaagctcttctacatcaattaaccctctccttttggctgtaaccagttta

SEQ ID NO: 15141 - DNA, 536 bp, Homo sapiens
gaggtctgaggaactctgctctaagaaaaaaggtctagtgattttttgaggatgatcatctttaaacaaaccacgttcccaaaagacctgcctttacggatggtgagtacaacttcttgcttgtgttgagagttttggctgtgggtctgagccaaagaaacaacaaataatgaggacctttcatgttgtgtgatcaacttccaaaatttcataacgcttttgcaaaccagatatttgatgccaaggactttacctgcctcttaccgaagaaaacaaaaatatagggatgttggtggtcttgtacaaagactcacacccagaaaatccttcatccaggaataagaaccattatgggagtggaaataacttgattggggtstatgttatatatcatataattcactggttttgagtgtgccagtgaatgatgtctttgtaaatttaccaagcggtgcgatcatcaacatatagctgcagggccattcatcaccccaagaaggttcctcctgctcctcactggtaattcccactgtacc

SEQ ID NO: 15142 - DNA, 438 bp, Homo sapiens
tggcgcacagcaggccctcaraaaaagtggataaaaaagaaacgatggctggctggctgcataatgagttgataaatgaatgaattccagggggaggtcttgcttgggcagagtcgcaggggtaagtgaggagggggcggtggaggggcaggggcaggcccttgctctgagcctgaggaggggtgcagagtctggaaagggaggtggggctaagcaatgatactgctgcactgctgagcgcctgctgtgccggggtctaccactggactttcccaatgacactgtcaactggggaccagcgactcccaccaggccgaaagtataaccctaggatgtggtagaactgggctttgacacgaaggcctcaaaggcctgcctgagacgtctggactctgtctgcaggctgtgctctcagagggcacataggggcccccctgc

SEQ ID NO: 15143 - DNA, 517 bp, Homo sapiens
cgtaaggtgatagaagtcagaatagtggcttattttatggggagggaaacatcagggatatgcaggcgggaaacctggggtgctggaaatctgcaatttcttcagtagggtggtcgttttaaaacacaggattgagtgcccctgcrtgatatcacacaaatcacctgacctctgaagttttcatttttcccaatgtaaaagggccagaatgcccacacccaacttcttccagctatccgaagactatgtgagaatgcacttgagggccgggaagatagagtgtcccaaagcctgaaaagtttgcgggaaaaccgccacctttctccatagctgcaatggctcccaacatacaaaccagtttaccttgacattgttcggggtaggcagctagtgcagctttgtctggcctcacatgggcagatatttgcctggaaaatgacctagtggcctggggtactaggtacagctgctcctgctctctgacttcagtggtatactgaaaattgtttaacgactg

SEQ ID NO: 15144 - DNA, 517 bp, Homo sapiens
cgtaaggtgatagaagtcagaatagtggcttattttatggggagggaaacatcagggatatgcaggcgggaaacctggggtgctggaaatctgcaatttcttcagtagggtggtcgttttaaaacacaggattgagtgcccctgcatgatatcacacaaatcacctgacctctgaagttttcatttttcccratgtaaaagggccagaatgcccacacccaacttcttccagctatccgaagactatgtgagaatgcacttgagggccgggaagatagagtgtcccaaagcctgaaaagtttgcgggaaaaccgccacctttctccatagctgcaatggctcccaacatacaaaccagtttaccttgacattgttcggggtaggcagctagtgcagctttgtctggcctcacatgggcagatatttgcctggaaaatgacctagtggcctggggtactaggtacagctgctcctgctctctgacttcagtggtatactgaaaattgtttaacgactg

SEQ ID NO: 15145 - DNA, 1032 bp, Homo sapiens
ttgggggaattcctaggaccctgggactccctggggagccaccaccrcattccagccactatcaataaagaaaatgtcactgactgagggtagtgggtccactcagctcacctgtctactcctgaatgcaggtccactttcctagggaaacttattcttggtttaggggaaagggaacatgaagccaagagcaggccttcctacctccttctctccctgacttcatcaccttgaacttcaagccttccctgctcagtggggacaagggaggcaggacattattgaagagcttgggccaggctttctgtgcttcctatccagtgcaccaaactcaaatcaaatcagcccccaggtgcacagctcttgtgtgaaaaacaaaaatgatgtccctcatttgggtaatgtcttaaccttgccagtgtgaaaataataataacagcagtagttaccacttgccaagtcttgactgtgagccaggcacttcacataatttactgctaatcctcacagcctatagcatagatattacaaagccatttggccatggaggaaactgaggcatagagagatgaggtaacttggccaaaggccccagagcagggaaagtccttccagctcaggagtacttgcttgtattccccacctgtctctgccatgtaacgagcaacctcaccccttctccagttactcaagggacctgtgagagagacagagttggcatcagcatgccctgcgacagatggggaaaccgaggcacctggccttaagtcccccagcaggctgagagcagagccaagagagcaacgtgagcttccatggcctctgagggacctctctgcccacacacatgtgaatgggtggagttatgttgttcccatggaaacttgacagtcatcacaaaagccaagggtctaaaaagaaactggtacagtttcagggctggcctcacagacatctgctttaggagtccctcgatgagacccacaactcatggggtgcacatcactctagagtttacaaagccctttctcg

SEQ ID NO: 15146 - DNA, 1032 bp, Homo sapiens
ttgggggaattcctaggaccctgggactccctggggagccaccaccgcattccagccactatcaataaagaaaatgtcactgactgagggtagtgggtccactcagctcacctgtctactcctgaatgcaggtccactttcctagggaaacttattcttggtttagggraaagggaacatgaagccaagagcaggccttcctacctccttctctccctgacttcatcaccttgaacttcaagccttccctgctcagtggggacaagggaggcaggacattattgaagagcttgggccaggctttctgtgcttcctatccagtgcaccaaactcaaatcaaatcagcccccaggtgcacagctcttgtgtgaaaaacaaaaatgatgtccctcatttgggtaatgtcttaaccttgccagtgtgaaaataataataacagcagtagttaccacttgccaagtcttgactgtgagccaggcacttcacataatttactgctaatcctcacagcctatagcatagatattacaaagccatttggccatggaggaaactgaggcatagagagatgaggtaacttggccaaaggccccagagcagggaaagtccttccagctcaggagtacttgcttgtattccccacctgtctctgccatgtaacgagcaacctcaccccttctccagttactcaagggacctgtgagagagacagagttggcatcagcatgccctgcgacagatggggaaaccgaggcacctggccttaagtcccccagcaggctgagagcagagccaagagagcaacgtgagcttccatggcctctgagggacctctctgcccacacacatgtgaatgggtggagttatgttgttcccatggaaacttgacagtcatcacaaaagccaagggtctaaaaagaaactggtacagtttcagggctggcctcacagacatctgctttaggagtccctcgatgagacccacaactcatggggtgcacatcactctagagtttacaaagccctttctcg

SEQ ID NO: 15147 - DNA, 646 bp, Homo sapiens
tgtctttgttcttgttcttagactgaatgctaaatattttcatgagttraatgtatggaaagtgatgtgaaaataatccatccatcagcacacacttgattcaatacctgcatgcagagcacagtggtcaagtctgtgcagtggatttatagacacaacaatcttcagggtttcagggttgcatgtatgtcactacccttgcttgttggtatattaagagaagtaataccattataccatgtataactttttatgggtagcaaatcagtgagtgaatcactccagagaagaatgaaaagagcaatttgctgacaagggaatgaccatggagttgccagacatggcatagtgatgaagaagttgttgctctacttttagggatagcagacatgttcatataacagttttgaaaagaatttaacacatcttatatttatattttggattttctgtttgctttacaattgggtgaacttaaactatgtttcagttgctttaggatgatggcttgattcctgatgccatactgataaatccagatcagtctctgtattcttttcatcattctcatcccttgatttaattagttctttgaagccatcttcaatcaactttacattactgactatctctcctgcctcttttg

SEQ ID NO: 15148 - DNA, 528 bp, Homo sapiens
ctaaacacacaatttattgtaaagtaatggctaagcatagagatggtacaatattgggctctgagtttttgttccttaagagagtcttttaatgtccactaacaggtgaagttaaaatttttagaatatctgagggaatggcttacataccacagagagarctgtcatcggttgcttcattcaatcactactatcaatttcaaaacaaaatcaccaaagtttggacagtgaaaggtacaagaattgatcagttaagtcagtcatataacttgagtgggaagaaaatgatacatctcttaattttaggattctctcttaaaataccccaggaacgttttctgctaagagcagaacagaccctgagtgaaatgctttcctcttgtgacaagggatttctatttatcctattgagttttcccagaaagtctccgatccaccaaggaaaaaaatgtatttctttttatattgaaagtaaaaattaactacaaaagcagacaatcatatcttaaaaaccatttaactggttaa

SEQ ID NO: 15149 - DNA, 563 bp, Homo sapiens
ggcatcgggaggagggacaaagagtgtttaggggaaaatgattggtgattcttgtcataagtcctttctgatgtttttactattactacaagaaaatatttttcaaaattaaaaacaagttttatttcactgctttagactaggcagggttctgataggaaacagattatattctcaacccaagtaactgagcagaattttaacaggaccatttgcaattgtgtgggcaggstagggtagggaaacctacaaggctggcacagtagccaccagcattaggttgcattgaccacccctcgtcctcaaaggccaggaaaaggaagtctctgctgaatttggcaagagagtggctgtatggcaagggatgtctgacaagagctgaggcctttgcagaggacatgatgacccatggtaaccacacagggagaggtcccagggaaataaataatcttcttcaccctgcttttcctccccaggattctcttgttgcttcttactggccagacccaaccagaagccagaactgtgctgcccagtaagagagccactagccacacttagct

SEQ ID NO: 15150 - DNA, 563 bp, Homo sapiens
ggcatcgggaggagggacaaagagtgtttaggggaaaatgattggtgattcttgtcataagtcctttctgatgtttttactattactacaagaaaatatttttcaaaattaaaaacaagttttatttcactgctttagactaggcagggttctgataggaaacagattatattctcaacccaagtaactgagcagaattttaacaggaccatttgcaattgtgtgggcaggctagggtagggaaacctacaaggctggcacagtagccaccagcattaggttgcattgaccacccctcgtcctcaaaggccaggaaaaggaagtctctgctgaatttggcaagagagtggctgtatggcaagggwtgtctgacaagagctgaggcctttgcagaggacatgatgacccatggtaaccacacagggagaggtcccagggaaataaataatcttcttcaccctgcttttcctccccaggattctcttgttgcttcttactggccagacccaaccagaagccagaactgtgctgcccagtaagagagccactagccacacttagct

SEQ ID NO: 15151 - DNA, 551 bp, Homo sapiens
gtgaaaaaataaataagaaaagacttttcagccagtaaaacacaactaaatatcaagggcgatcgtgccccgcacactggaaagcctcttttcagtcatttcctagacactcttcaagactcatttcaaatgtcaccccatctacctgcccttcccagattcgagcaatcaaaggtgatttttatcctccttggaattgakagggtctccggattttgagtctctagatggtgctttgatattctgcagccctgcttcatgtccctgataggttgggcgtggtctgaaagcagatcattttcataggagtaggttaacttgcccggcacatgccaggttgcaaaaaagaacaaagggaagaaaaaaataaatcagtcatcaatctatcaaagctttctcagctttgtcacctacaatctctgcaaccctgagcacactcatcaaactttttgtgcctcagtctcctcgtttgctaaataaagtcacctgtacccactggcaaggtggtcaagaggactataaattaagattagaaagcccagtgctggtct

SEQ ID NO: 15152 - DNA, 551 bp, Homo sapiens
gtgaaaaaataaataagaaaagacttttcagccagtaaaacacaactaaatatcaagggcgatcgtgccccgcacactggaaagcctcttttcagtcatttcctagacactcttcaagactcatttcaaatgtcaccccatctacctgcccttcccagattcgagcaatcaaaggtgatttttatcctccttggaattgatagggtctcyggattttgagtctctagatggtgctttgatattctgcagccctgcttcatgtccctgataggttgggcgtggtctgaaagcagatcattttcataggagtaggttaacttgcccggcacatgccaggttgcaaaaaagaacaaagggaagaaaaaaataaatcagtcatcaatctatcaaagctttctcagctttgtcacctacaatctctgcaaccctgagcacactcatcaaactttttgtgcctcagtctcctcgtttgctaaataaagtcacctgtacccactggcaaggtggtcaagaggactataaattaagattagaaagcccagtgctggtct

SEQ ID NO: 15153 - DNA, 592 bp, Homo sapiens
tatacggaaacattgcatgacaggctaggggacacccagtattcacgctggatctgaattcattatggttacagtggtgaataatttatcaatgacttaattcatttattcattccacaacaacttattgagctcctactacaagtcaggcaaagtaatatgtgctgaggatattacagaaattaaaagagaaaagaatccctgtactcctggaacatacatcccagggagaagacagacaataaatgagattaaaataaaataaaagtatatacagaacaggagatggggtaagtggggaggaagcaagggagccctgagggggaagcagatacttcagggaccacctgtcctatcaggctccggctcctattctgagcaggactctcttttcccaaacagaggagttacctggtcagagtcactttgtcacaggatcacagaggccaggaactggaagcttccagttcaattaacagagccaaaatgtgctgtcacctgggaagttatgaaaaytcttctggtaaattgctgcttaaactatacccctgaggtataattcctaaacacagctcacacctagagtgaccca

SEQ ID NO: 15154 - DNA, 592 bp, Homo sapiens
tatacggaaacattgcatgacaggctaggggacacccagtattcacgctggatctgaattcattatggttacagtggtgaataatttatcaatgacttaattcatttattcattccacaacaacttattgagctcctactacaagtcaggcaaagtaatatgtgctgaggatattacagaaattaaaagagaaaagaatccctgtactcctggaacatacatcccagggagaagacagacaataaatgagattaaaataaaataaaagtatatacagaacaggagatggggtaagtggggaggaagcaagggagccctgagggggaagcagatacttcagggaccacctgtcctatcaggctccggctcctattctgagcaggactctcttttcccaaacagaggagttacctggtcagagtcactttgtcacaggatcacagaggccaggaactggaagcttccagttcaattaacagagccaaaatgtgctgtcacctgggaagttatgaaaactcttctggtaaattgctgcttaaactatacccctgaggtataattcctaaacasagctcacacctagagtgaccca

SEQ ID NO: 15155 - DNA, 549 bp, Homo sapiens
cacagggggaatagtttatctgagctagaggcaggcacatttgcatgtgtaaacttggagggaggctcrggctctgtcctcatggcctgcattgtctcgaggaatctgaggcttagagtggttgggcccccacccaaggtcaggaccaggatgtcaagccaggcttgggcaattccagaggtcaaactcttaacttctgggacccatctgagaggttagagccaggagggccagggtcaaaggtcagcagccagaagctggcagatgggcaaaagaggaggacagacatcacacaaagcatctcacaaacaattcattccctctgtgataagttgtcgtaagagcgtgtgcaggagggtcggctttttttctttttttttttttttgagacaggacctcatatcacccaggctggagtgcagtggagcaatcacagctcactgtagccttgaccttcctgggctcagttgatcctcccatctcaacctcctgagtagctgagactacaggcgtgtgccaccatgccaagctaatttttgtatttcttct

SEQ ID NO: 15156 - DNA, 576 bp, Homo sapiens
gagcacttcccagccactgtcccctgctgcccctgccatctgaagagccaccctctggtgccccgccacttcacccgattcactgccttcagagaacttgactctgcaattctcttccttggtttgtgtttttttttttttttctgatttgagacagggtctcactccattgtgcaggctggagttcagtsgtgagatcatgaagatcatggctcactgcaacgtgaacctcccagactcaagcgatcctcctgcgttggccttttgagtagctgggaccacaggtgcgtgccatcacgcccagctaatttatttatttatttatttatttttagagacaggggtctcactatgttgctcagattggtcttgaactggcctcaagcagtcctcctgcctcagcttccccattgtgttttgtttttgttttttgagacagagtctcactttcattgttgtccaggctggagtgtagtggtggtggtgtgaacacagtttcttgcagcctcgacatcctgagctcaagtgatactcccacctcagcccctcaagtacctgggactacaggtatatgac

SEQ ID NO: 15157 - DNA, 576 bp, Homo sapiens
gagcacttcccagccactgtcccctgctgcccctgccatctgaagagccaccctctggtgccccgccacttcacccgattcactgccttcagagaacttgactctgcaattctcttccttggtttgtgtttttttttttttttctgatttgagacagggtctcactccattgtgcaggctggagttcagtcgtgagatcatgaagatcatggctcactgcaacgtgaacctcccagactcaagcgatcctcctgcgttggccttttgagtagctgggaccacaggtgcgtgccatcacgcccagctaatttatttatttatttatttatttttagagacaggggtctcactatgttgctcagattggtcttgaactggcctcaagcagtcctcctgcctcagcttccccattgtgttttgtttttgttttttgagacagagtctcactttcattgttgtccaggctggagtgtagtggtggtggtgtgaacacagtttcytgcagcctcgacatcctgagctcaagtgatactcccacctcagcccctcaagtacctgggactacaggtatatgac

SEQ ID NO: 15158 - DNA, 553 bp, Homo sapiens
ccctttctcaaaaaaaaaaaaaaaaaaaaaaaaagcggagcagcaaactaagtcccttttccatcgagggaggtctctgaagcaragctgagccagcctctcagctctgccctggtggggcaccccatagcgcccagaagcagtgagggctaaggcggcagagtgcagcatggccatgcatgattggagcgccgctactgtgttggtgtcagtttggcagccagcaacttctaagaacatagaatattttcatttagaacttaaaaacagtaaacccaaaaagtttagtttttaaaaattcattttgtttctccctaaagatttttattcttttgaaaatgaccacagtctagtttgaatgccattgtttttcagctgtttcttatttgcaattgctaaaagcaacaaggagcaagttaaatgtccatcacctgaatgggtagacagaagtgacagccacacaatggaatattcctgggcagtaaaaaaagaatgaagtgctggtacatgctacaacatgaataacccttttaaacattatgctaagtcatgg

SEQ ID NO: 15159 - DNA, 630 bp, Homo sapiens
cattttatttacagtgttatttagacagatatgtaaagtagaagaacacttccaaaatgctaatagtggttatgagtggccagattatggccaatttttctttcttcctttgatttttcttctttctccaatttctatgcagggtgcacagttatattcaaaaaaaggttttctaaatcaatgccctggcaaaacacattctatctccatcatgtccttcacagttaattccaaatcctaatctctgagtgggtcaagaaactagtcttatttgtagtcccagcacctggcacagtgtctggcatacagatgatgctcattaaatgtctgctgaaggagtggctggatgaatcatcaccttacagaccctttggaatgggacgcrctttcacctccacattcagagcatatgggttctcaccctgtgagcccggggcttccacccaggggagcattccagcaaagaggcaccagggacaccagggaaagtgccctgctgtcgtctgagaagcacacatccttccctgggtggggcaatggtctcattacacacagccaacacatactctcccaccatctgcgtacacagactcccgctggcactgggactcaccctctgaagccgtcact

SEQ ID NO: 15160 - DNA, 571 bp, Homo sapiens
attatcttatctacttcttgctctaccttagagattctctctaaggcaactttcttcttctctagtcaagcttttaacatctattatgagagtctttgcagatgtccctacgtaggattggagagaggccctaatccatccctgtagtgactctttctccttctrggaagcagatgggattaacagaccattactaattattgttcttaaacaaggcactgcaagatttataaacctcttcccaaaagccaggctgcacatctgacacaaagaggaaaacgtcgcctttttttttttgtttaacaacttcaccatgaggagtccctctttgctgagaaattgtgctttgtattttttcctgtttctaagaggacaggcatacacttgtccttcggtgaaccaaatgaagtagaggataagatgtgatatctctgtaagcccacaggatctgctttgaacaaagtaatatatttgaagtgaaaagcaatccttcttgaaatagtcacgagctcgtgcctgcacacacttaattgcatgggggtggcaacctgtctttcattcatgtcctgat

SEQ ID NO: 15161 - DNA, 571 bp, Homo sapiens
attatcttatctacttcttgctctaccttagagattctctctaaggcaactttcttcttctctagtcaagcttttaacatctattatgagagtctttgcagatgtccctacgtaggattggagagaggccctaatccatccctgtagtgactctttctccttctgggaagcagatgggattaacagaccattactaattattgttcttaaacaaggcactgcaagatttataaacctcttcccaaaagccaggctgcacatctracacaaagaggaaaacgtcgcctttttttttttgtttaacaacttcaccatgaggagtccctctttgctgagaaattgtgctttgtattttttcctgtttctaagaggacaggcatacacttgtccttcggtgaaccaaatgaagtagaggataagatgtgatatctctgtaagcccacaggatctgctttgaacaaagtaatatatttgaagtgaaaagcaatccttcttgaaatagtcacgagctcgtgcctgcacacacttaattgcatgggggtggcaacctgtctttcattcatgtcctgat

SEQ ID NO: 15162 - DNA, 592 bp, Homo sapiens
actttcaaatggtattaatattaattgggtgtatttcatagcattctaatgagaattaaaggatacagagttggacgggtgcagagttgcttctggaagaaatatgacacctgcccaaggagaaccccaaatttagtwcaaacttgcattggtgatggtagtactggaaaactaccctcatgaaatatcatttgactgctgaatttgagatatagccaccgtgggtgtggagctccatcccctttcgttccacactgatatggtctggctttgtgtccccatacaaatagcatattgaattgtaattcccgatgttgtgggagggatctggtgggaggttattggatcatgggggcagatttcccccatgctgttctcgtgacagtgagttctcacaagatctgatggtttaaaatgcgtggcacttccccccttcactctctctcctgccaccatgtgaagaaggtccttgcctccccctttgccttctgccatgattgtaagtttcctgaggtctcccagtcatgcttcctattaagcctgtggaactatgactcaattaaacttcttttcttaagttactcagtctcaa

SEQ ID NO: 15163 - DNA, 592 bp, Homo sapiens
actttcaaatggtattaatattaattgggtgtatttcatagcattctaatgagaattaaaggatacagagttggacgggtgcagagttgcttctggaagaaatatgacacctgcccaaggagaaccccaaatttagtacaaacttgcattggtgatggtagtactggaaaactaccctcatgaaatatcatttgactgctgaatttgagatatagccaccgtgggtgtggagctccatcccctttcgttccacactgatatggtctggctttgtgtccccakacaaatagcatattgaattgtaattcccgatgttgtgggagggatctggtgggaggttattggatcatgggggcagatttcccccatgctgttctcgtgacagtgagttctcacaagatctgatggtttaaaatgcgtggcacttccccccttcactctctctcctgccaccatgtgaagaaggtccttgcctccccctttgccttctgccatgattgtaagtttcctgaggtctcccagtcatgcttcctattaagcctgtggaactatgactcaattaaacttcttttcttaagttactcagtctcaa

SEQ ID NO: 15164 - DNA, 592 bp, Homo sapiens
actttcaaatggtattaatattaattgggtgtatttcatagcattctaatgagaattaaaggatacagagttggacgggtgcagagttgcttctggaagaaatatgacacctgcccaaggagaaccccaaatttagtacaaacttgcattggtgatggtagtactggaaaactaccctcatgaaatatcatttgactgctgaatttgagatatagccaccgtgggtgtggagctccatcccctttcgttccacactgatatggtctggctttgtgtccccatacaaatagcatattgaattgtaattcccgatgttgygggagggatctggtgggaggttattggatcatgggggcagatttcccccatgctgttctcgtgacagtgagttctcacaagatctgatggtttaaaatgcgtggcacttccccccttcactctctctcctgccaccatgtgaagaaggtccttgcctccccctttgccttctgccatgattgtaagtttcctgaggtctcccagtcatgcttcctattaagcctgtggaactatgactcaattaaacttcttttcttaagttactcagtctcaa

SEQ ID NO: 15165 - DNA, 592 bp, Homo sapiens
actttcaaatggtattaatattaattgggtgtatttcatagcattctaatgagaattaaaggatacagagttggacgggtgcagagttgcttctggaagaaatatgacacctgcccaaggagaaccccaaatttagtacaaacttgcattggtgatggtagtactggaaaactaccctcatgaaatatcatttgactgctgaatttgagatatagccaccgtgggtgtggagctccatcccctttcgttccacactgatatggtctggctttgtgtccccatacaaatagcatattgaattgtaattcccgatgttgtgggagggatctggtgggaggttattggatcatgggggcagatttcccccatgctgttctcgtgacagtgagttctcacaagatctgatggtttaaaatgcgtggcacttccccccttcactctctctcctgccaccatgtgaagaaggtccttgcctccccctttgccttctgccatgattgtaagtttcctgaggyctcccagtcatgcttcctattaagcctgtggaactatgactcaattaaacttcttttcttaagttactcagtctcaa

SEQ ID NO: 15166 - DNA, 1513 bp, Homo sapiens
gagagaggttatctgccaagagtagaggggggattgcaatagatgagaggatacccagaggattaaactttaatggtaacattattaaacttgttaggtgggtctgcctggatgatgaaggtattgatctttacagtgttttagattttgtatatatttcctaatagtttctttttaagaagtagattactcacttcttaactttgctaataactctttcctaagagtaattgttaagcaagccacctcttagaactgggaatcatgagggaagagagggatggagaagaccatctgagtccattaatgatagatttctagagttgagaaagcttagaattggaagggacttcagaggtcactacttgaaacctttctttttacagcagtcaatcggtcaaagctatgcagccagtgagtaaagttggcaggaacagagaagggaagagtctcaactcctgactccagtctgatgctcagcattataatacaactgccttgaatttccttttcatttagtcactagtaacaccgaattttacttttgtgactaagggaacacctgggaactagaaatagacctcaagtagcctggataatatagtgagacactgtctctacaaaaaaccttaaaaaaattatccaggcatggtggcacactcctttagtcccagccacttgggaggctgaggagggaggatcacttgagcctgggaggttaaggctgcagtgagccatgatacaacattgcactccaacctgaacaatagaacgataccctactaaaaaaaaaagttttaaaaaaaagaagtggacttcaaaatatttattggtaaattggagaaactttttttttttttttgagacggagtctcactctgtcgcccaggctggagtacagtggtgcaatcttggctcactgcaacctctgcctcccaggtccaagcgattctcctgcctcagcctcctgggtagctgggactacaggcacatgccaccaaacccagctaatttttatatttttagtagaaacggggtttcaccacgttggccaggatggtctcgatctcctgacttcgtgatccagctgcctaggcctcccaaagtgagtggcaggagccaccatgcctggcctggagaaagtatcttaaacaagctaatgagaggtcatagagacaaccatcatggctgaaaagaaaaggacactgaagaaatcactggaggagtaaagcaaaagagcagaatgagcgtcatacccagaagtatcacagcagtaccaattaaaaggactgtgacctctctrctgactaggatgttaccaaggcccattgtccaggtccacagactgaagggtgagaaaagcccagagtctgagacgctgcagataggtacaaagtttgataagaaaaaacgtgacacagagcggaaaccttgcaatttcacctagagaagcaaaattattgacaacaaaataatattttattgtatggaaatcagattttcttcaagcctg

SEQ ID NO: 15167 - DNA, 498 bp, Homo sapiens
cctgtcttattacttaaatgacaatggtggattgtgttctccttatcaggagacctccagtttttaaacatctatccttagttttcactgggtctgatgaaaagggcttaaaaatgctcttgaggttttatgaaagaaatgatacaaacataatgttctctaactttcacaatggacaagtctcgccacaataaatttggagatgcaaagtataaaatgtgttgatggcaaataaataattctcatttctcataggaatagaaattyagttactatgtaccactagacagtttaaattacctgcaactttttcctagactactatatgaagaatgaggtcaaaggagttagccaaggcgaaagcacacccttagaatgttgctcggggtacacagtgcgcaggcgacagtcaagagcacctcaggcctgaaaagaacagcttctcccaagatttcagatcaccaattaaaagccccctaaaagatatttttatcattc

SEQ ID NO: 15168 - DNA, 532 bp, Homo sapiens
taagagtragtaagtatacatagagggagggaaaagagaaaacatgtcttcatggactaggatgtcattatactcttgtcattatactcttgtcattgtcattacaaaacaacagtgcaggctcacaccttcaatgtttggtagggcggctgtaagtcacacttacttagttttgttcactggaatcagagatggtgtcaaagcaacgtggcaagtcaggtcgagcctgcgggatggtattttgagcccatgtggaagacttaatgaaatgtgcagaattttaatcttttgcaaattccagcgagaacactaaactaaaacacgactaatgacaagttcattacctcacattcgaggtacataaggcagataatttcatacggctttgctaaatgcctttaaattcctggcaaaacaaaagcacaacctgcatgtcatgcagtcactctacgcaacgccaataaaactatagtcagtgctgcctaccaggtagcaatctgtcattcttgctctaaaccctattgaaaggctg

SEQ ID NO: 15169 - DNA, 532 bp, Homo sapiens
taagagtaagtaagtatacatagagggagggaaaagagaaaacatgtcttcatggactaggatgtcattatactcttgtcattatactcttgtcattgtcattacaaaacaacagtgcaggctcacaccttcaatgtttggtagggcggctgtaagtcacacttacttagttttgttcactggaatcagagatggtgtcaaagcaacgtggcaagtcaggtcgagcctgcgggatggtattttgagcccatgtggaagacttaatgaaatgtgcagaattttaatcttttgcaaattccagcgagaacactaaactaaaacacgactaatgacaagttcattacctcacattcgaggtacataaggcagataatttcatacggctttgctaaatgcctttaaattcctggcaaaacaaaagcacaacctgcrtgtcatgcagtcactctacgcaacgccaataaaactatagtcagtgctgcctaccaggtagcaatctgtcattcttgctctaaaccctattgaaaggctg

SEQ ID NO: 15170 - DNA, 532 bp, Homo sapiens
taagagtaagtaagtatacatagagggagggaaaagagaaaacatgtcttcatggactaggatgtcattatactcttgtcattatactcttgtcattgtcattacaaaacaacagtgcaggctcacaccttcaatgtttggtagggcggctgtaagtcacacttacttagttttgttcactggaatcagagatggtgtcaaagcaacgtggcaagtcaggtcgagcctgcgggatggtattttgagcccatgtggaagacttaatgaaatgtgcagaattttaatcttttgcaaattccagcgagaacactaaactaaaacacgactaatgacaagttcattacctcacattcgaggtacataaggcagataatttcatacggctttgctaaatgcctttaaattcctggcaaaacaaaagcacaacctgcatgtcatgcagtcactctacgcaacgccaataaaamtatagtcagtgctgcctaccaggtagcaatctgtcattcttgctctaaaccctattgaaaggctg

SEQ ID NO: 15171 - DNA, 533 bp, Homo sapiens
tgcaggccactattcaacccactacagccactaagccaaaagagttctgtaaaggagcccccatggaaaagaactcagsctagaataaattttaattggccagcagttccagtgcatgccattctgagaccttgggttgcataagaagctacaggacaaacacggaagttccaaataaccctcacagtgacctcccagaaggaaagacatctgagaaagaagacatagtaataataactaccattatttatattacaataataatcatgatgataataacagcaacagtaataatagatataggcattatttcatttaaacttctcaaaaacacaatgagaaaatgagtatcattgcccttattacctgaatgaggaaactggaggctcagagaggttagagcacttgaccaaggtatcactgcaagtcagtggtagaaccaggatctaacccaggtcattctgactccaaataatgctttttatcagcacctgacctaaacatggacctaagtcgtagggagtagagaggtg

SEQ ID NO: 15172 - DNA, 528 bp, Homo sapiens
ttctctcaatatctttagatttgtttactttggataagtcttatgcaaattttcttttcttcctttgcaattttattttccagttccagaacttccaactctacgtttacaatttcactttcaatcaaattttaagagttttaaaagaaaaaagcaggctggatgcagtggctttcagctgtagtcccagcattttgggaggctgaggcaggaggattgcttgagcccagagtctgcagtaggccatgattgtaccactgcactccagcctgggagacacagtgagatcttgtctctaaataaataaatggaaaagaaaaacaaaasagtcccctcaatcttgtcatccttctaccaatgtgggtgcctttgagatgtgcttccacattagcccacacttttgctatcacaacctcaccattattataatttccacaaaggcaaatgtcatgttatcttgttcattgtacctttcacacttaaaaactgatgagtgactgagttcatttttttttgtcttatacattc

SEQ ID NO: 15173 - DNA, 577 bp, Homo sapiens
gactgaatttgttttgtataatgactttgtagtgcagttaagtctttattatttttaactaaactgagaattaggttttggtttatggagttctgccttaattataatctcgtgactcagttttacaataataattactttttataaatacttaacctttttcattaataacatgatggtggaatgtactatgcattgtaatcccaaacttgtcccctataatgtcagtgtttccctgcaggcatcgtttactttaaaaaaaaatattaaacagaktactgaatgacaccatcttttctaatttccttaactgatgtggatttatatacagggagccattgctgtatctttcctactgtaaattgaagggtaggtggcaccaaaagagctttgattttttgtttatttacttgtgttgcaaagtcatataatggagttctgtaatccccaactcttgaaaatccctagtttgaatactgtggatttgccttgctcagcgattggaaaagacttaacaacctacaactaaatttcagctgagcaatgaaaaacaacgaagtgtgtgccaaagtactct

SEQ ID NO: 15174 - DNA, 552 bp, Homo sapiens
tgtgggctgcacatgttggttcaccccataacctcagccctttggtaggctgagatggaaggatcacctgaggtcaggagtttgagaccagcttggccaacatagtgaaaccccgtctctactaaaaatacaaaatttatccaagcatggtggcgtgcctatagtcccagctacttgggaggctgaggcagaagaattgcttgaacccaggtggcagagttttcagtgagccaagatcgtgccactgtattccagcctaggagacwgagtgagactctgtctcaaaaagaaaaaaaaaatgagatttgtggtttaattagagtgtattaaactacaaatctattgtttaataagagttttcacaacagttatatcattcctttaatactagcagtattggaaggctgagtcaggaggatcaattgagccctaggagtttgagaaatgacatttgtgaggtgtcacaagttatttatgatacttaaggagaaattacatatatatatatacacacacacacatatcctatcatatgtatatacacatacatat

SEQ ID NO: 15175 - DNA, 536 bp, Homo sapiens
ctttctgtcttgcctttaaagacttaacacattaagggttttccataagtccacaatactcaaacatggtaaaatctcttttaggattcattatatcatctcagtcttcatttattggcaagttttacttaaaagtatgtgtgcccttgatatttcctaatcaagaaataaattttggtgattttaatctagcaatctaatytcctattgttaccagcagtaacacctcttatcacataaatattgagtgaattcaggggaaaattagtgaaacattctaaaatccttggaagttgctcaaaacagagatgtatgtattatcacttgtagaactaaaactatctagataccattttgacactagtgaccagaagtttctaggagaagctctttgaggtatatacattccttcctccctcctttacttaaacaattatcaggtatcttttaagaaactacgtaattcaggattgggctagattacttagattggctggaaaggcaggtgagaccagctgtgaacttcaataaattta

SEQ ID NO: 15176 - DNA, 519 bp, Homo sapiens
tcagcaactgccctgatttagccctaatggcctatggtcttcactacagccaggactcctgggccccctttttctgcttagtcagtgccttcaaggcttttccatacccacggtgagaagaagcaaagaaaggcaatgcaaactgggatgcggagggtgtgtgyggagagtatgtttggagggtgggaggtatttaaatccgacattggctgtgcctgcttttgtattctgaaagtgactagggatggatggggctgtagagaaagatgtgagggtaagctgacataatccatgcaatgtggatgcaactgtgcagctcccgcccactgtggaaacaagtagaggaggaagaaggagtgagacccagagaataagccccaccgtctagcagagtgctaacaaatcattggttatgcaaagggaggtccagagctggttttggaaggagaagcaaaggaaagaaaagtgtgaacaagtacaggttcatgaacgactgaagtctgaattggtggaaagaac

SEQ ID NO: 15177 - DNA, 595 bp, Homo sapiens
atattttgtagctatttgtttcctaggggatgaatatgcaagtttactaagcagataatggtaaatataattatttgaactaatatgttaagccaagatcttttttttttttttaatttttttatttttattttttcgagacagagtcttgcactttcgcccaggctggagcacagtggcgcaatcacggctcgctgcaagctccgcttcctgggttcacgctattctcctacctcagcctccctagtagckgggactataggtgcccgccaccacgccctcacgcccagctaattttttatatttttaatagagatggggtttcactgtgttagccaggatggtcttgatctcctgacctcatgatccgcccgccttggccttccaaagcgctgggattacaggtgtgagccaccatgcccggcccaagatctttttttttttaagtttttgagttgtttgtatgtttagatttttaatctatggatgatttggagggattagttttgtattgtaggatacatgttcagtttcattcacaacaaacatgaagtagggtttggttgcattggtaaaggaacacagaactaagctg

SEQ ID NO: 15178 - DNA, 558 bp, Homo sapiens
tttcagtatggctcctaatataacacccttctaatttatcatgaaagtagctatttggagaaagagaattatctttttttttttttttgtctgttttacctgcatggtcgaaatggaagaaattagattattattattattgttattattactattttttttagagatgagatcttgctctgttgcccaggctgcagtgcattggcgtggtcatagctcaccacagcctcaacgtcctggcctcaaggactcctcccacctcagcctcccaaagtgctgagattacagktgtgacccactgtgcccagccttaaattatattatttcagtcattaacatgatagtgtctgtcacctcttcacatcccaccttcccattaacaacctcctaataaaagttatgagctcatatagaaagaaagtggttaggagtttcaataaagcataactcatagggctttccagaggctacatcacctatccacaattgtatgtaaaggctgttaaaaatggtctttcctcccttttccaactacgtaactgtgaggctaaaattttt

SEQ ID NO: 15179 - DNA, 524 bp, Homo sapiens
ttcatccataggggagagttagccattgggagttgatttgacatgattgtactccccgcgaagacattggtaatcagaacactgagcttcaaattagggaagagttaggtgtagctctgcagaatcaggaagtaccactggtgtcggctattctccactgttatacacagaaatagcaagaaccaagacatcccctcttattgttgtaaaaaatrtgaacgtcctctgagtgacagtgccgggaaactggcaaagtctccagaccggtgccggtaaaacccctgagaatgagacttaacactgagtttgagctgtgttccagacgtttctggcactttaataagggtagtgaaggctgagtaaaaatctgagtaggatttatgagaaatgaatgccaagtgatactggacagtaatcaagttaccacaacttctaaccactggagtggcttttgatatatgtttttgtacaaagttatagctatttatattgactacaaacaaatttcaaaattccggagaaaa

SEQ ID NO: 15180 - DNA, 524 bp, Homo sapiens
ttcatccataggggagagttagccattgggagttgatttgacatgattgtactccccgcgaagacattggtaatcagaacactgagcttcaaattagggaagagttaggtgtagctctgcagaatcaggaagtaccactggtgtcggctattctccactgttatacacagaaatagcaagaaccaagacatcccctcttattgttgtaaaaaatatgaacgtcctctgagtgacagtgccrggaaactggcaaagtctccagaccggtgccggtaaaacccctgagaatgagacttaacactgagtttgagctgtgttccagacgtttctggcactttaataagggtagtgaaggctgagtaaaaatctgagtaggatttatgagaaatgaatgccaagtgatactggacagtaatcaagttaccacaacttctaaccactggagtggcttttgatatatgtttttgtacaaagttatagctatttatattgactacaaacaaatttcaaaattccggagaaaa

SEQ ID NO: 15181 - DNA, 554 bp, Homo sapiens
caaggctttaccaaccacacaattcttttatatccactgtctcattttgtcttcactactgttctcaactggggtcagtatctccatcttaaacacaagaaaatggagcctcactgamaggaaataacttgtctaaagtcaccagcccttcaaaccatagagctgtggttcaagtctatgacttggcgctcttacaaataagcttccctccgctttaatcaaaggaataccagtggcgatgatacaggaaactggggtaatacggtccaggcagctcctatggaaataatcctgagctatgccatgtgaccatgcctttctggacactcctgattaggccagggagcgagcacacgacttgagggcagtgcaaaagctctacccagagatgacagccactttctattccaatcagattttctctttcagaaatgtgtacatttttagacctgacattggcttgggaaagagactcactcctgctccataatctttatcactccccacctcaattccttaacgtaggcaattttattaataatgaaaacatcatt

SEQ ID NO: 15182 - DNA, 566 bp, Homo sapiens
tgctatttgctaagcagtttacatatattattgcatttaattcttataaacagccctttaaggtggattttatcttagaatttaatcatgattgtgttcctaaggcctagtgcaatgcctggtacatagtgggcacttaacaaatattgaattaagttaaattccataaaatcaagaatgcatagctgatctcaagaggaaacatctgcaaatgcttacctccacagaatcaaatatcactgctggtacagctrtgttgttcatttttgcagctttttggatgatatcttcagcctctctaaatcttctctgggatatcagccatcggggagattcaggaatgaacctataatttatttttaatatttaataatttttcacaacagcagggctggatactattaaatctgagtttcccccaaatagttttaattttgtaaaattctagtttgtctttttaaagggagtccacataagatttctattggagcataggaataaataaaaccaccttcaagtttcaaacttctgatcaaattataagaccgatcatcagttgtgcttga

SEQ ID NO: 15183 - DNA, 548 bp, Homo sapiens
tgagttactgcacttagaataatagtctctagttccacacaggttgctgaaatgtcattattccattcctcttttaatggctaaatagtatttcattatacatttacatatattctatatttttgcaattgcaaattgtgctgctacaaatatgcatgtgcaggtatctttttcatataaggacttctttaactctggctactcagtagtgggattgctagatcaaatgttagttctacttctagtttttaaaaaacmtccacactgttttctgtagtggttgtactagtttacattccgtgagcagcgtaagagggttcccttttctccgcatccctgcgaacatctaatattttttaattttttgttcatgtccattcttgcaagagtaaggtggtattgaattgtggttttcttttttgttttttcttttttttttttttaagataaaatcacctgtatttccatctacacagttaccatttggtatatttcctttaaatcttttttttattattatactttaagttttagggtacatgtgcaca

SEQ ID NO: 15184 - DNA, 532 bp, Homo sapiens
agacaccctaaatatgtactacatttgctaaagatgcagcgctttaagatgactatgtctyaagtgggggatttcacctctagcttcatccatcacattctttcatgtgccaaatgcctattctctcctgggtggctcctgtgtaacctcaggatatttttaacctagtacattcaaccacgatcagggcaacgcaaatcctaatttaagctcgtcactgtgattttaaattacctctaatttttgtcatctgcagattttcatgttctttctagttcaacaatacactgaaagtgtacttgtacttattcagtattttcttttttctgagttatctggtaaaccataatgctaataccaaaattctttggtttatctgttggtgtaaacacatttttagctagaatttgtggttaatcacttttgtttaggaccatcataattttagttttgataaaagtagtagttatttttgttaaaaatactggaactatttactcattatgtagtgagttagtttgttgttgttgct

SEQ ID NO: 15185 - DNA, 850 bp, Homo sapiens
aaaaagtgggctcatggccaggcatggtggcttatgcctgtaatcccagaactttgggaggctgaagcgggagtttgagcacaggagtttgagaccagcctgggcaacatagtaagaccgcatctttacagaaaaaattataaaaattagcaggtgtggtggtgggtacctgtggtcctagctactctagaggttgaggtgggaggatcgcttgagcctgggaggttgaggctgcagtgagctatgaccasaccaatgtactccaagcctgggtgacagagcaagaccctgtctcaaaaaataataataaaataccaaatgggctcagagagaggtgatcaagtgtgatgctcaacaaagtatatttgggatgtagattccccccagtcgaggtcaggcatcaccaatgaccggctttgtgatcttgggcagaattcttaacctctctgtgccttagttacctgcatggagaaaggaggtgataagtccatatcagtcaatttagttttatttgtgctgcagaaacataggaccccccccccccacccccgccccacaccatctcggtgactcatcagagatttgtttcagggccacatttcgtgtctattgtgatatcacatcttgttcattctgtgaactgtgttaacagaacagctcttgcctggggtgttgctggtcttatgggagaagaaaaagaagggaagtgagggatcttttcatggcacttaaaactcctgggagcagcaaaaaagtcacttctgttcccattccagtggactgagcaagtcatatggctgtgtcaatgtgggcggggcagtcatgtacgattctcctgtagggactgttg

SEQ ID NO: 15186 - DNA, 1590 bp, Homo sapiens
tgcatgtctcggctcatacttctattcctaagagaacacatcagagcagcctcacccctcccatgccactttcttccactctgatcatcttatatagttcatagcgtttaaagcgccctaaaattgttctgtttgcttttagcttattgtgtgtcttccctagtagaatgtgagttccagaggagtaaggagatagttgaatctgttccctgctatataccctatgactagagtcatgcctacaaagagtcagcaatcaataaacattttttggatgaatggttgcatggctagatgatggtggattggtggatgggtagatggatggatgaatggatgaaggctcattagataaatggatggtagatggctggatggttggatggtggatggataaatggatggatgaaagttcactagatgaatagatgaatggtgggtggttggatggatggatggatgcacggatggatgaagtttgattagatggacagatagatgtggatgatggtggacggatggatggatggacagatagataataaatggtttacagagcatgagtgatgaaagcacaatctgataaatttaagttagccacctagtgagaaccaggagactgaatgctgcctgaggattgattttatataatccaattgctctgctatatggacgtgacactagcgtctttcactgggccaaagacaagccttcatcatctctgtactggtcatttcaggggagacaaaaataaattagatgcaatttcttccctcaagagacacatagaaaataaaacctcttgtcatctctttctatagcaaccttgctggctttctttctaggcctagccctgtgtgaatgaagcacggtttaaaagaaacagcccttcctcctcagattaagcttacttaatggaagccttccccttaaccaggtttctgccagtcatattccatacagttgataactccagtctactggtaagtagacattttcctggctggttcatgtttccaagaaaagggaggggtctcttcttcctctatagcccctccaatacttgatacatgtttgggcttgggagttgaggcacagacagtattgcccagtgcatttcccagctgccttgcagttcaggtgggggcacgcagccaattcttgggaacrgccatgaacagtaatgagagctgtcacttccaatgacaacaggtaagagccagtgtgagctctccatgtgcacgttgacacgtggcatcacatgagggaatctggagagcacctcgtccacatcagactcttttcagcaagaaacagacccttgttctgcaataccactggtatgttgggttgtttattactgtagcagcccgccccctgacctgatgaatacaagacttattaatttatcagatgctgctcggcttagtgagtagctgcattccaacaagcacatcttcatgtggaagcgggaacttggtgggaaaggcgagggttggattcaggccaaacttggttacttttcccttttaaggttctgcctgacctgggcgcccaagaaatcttggcctgaaggagcagaacagatgc

SEQ ID NO: 15187 - DNA, 1590 bp, Homo sapiens
tgcatgtctcggctcatacttctattcctaagagaacacatcagagcagcctcacccctcccatgccactttcttccactctgatcatcttatatagttcatagcgtttaaagcgccctaaaattgttctgtttgcttttagcttattgtgtgtcttccctagtagaatgtgagttccagaggagtaaggagatagttgaatctgttccctgctatataccctatgactagagtcatgcctacaaagagtcagcaatcaataaacattttttggatgaatggttgcatggctagatgatggtggattggtggatgggtagatggatggatgaatggatgaaggctcattagataaatggatggtagatggctggatggttggatggtggatggataaatggatggatgaaagttcactagatgaatagatgaatggtgggtggttggatggatggatggatgcacggatggatgaagtttgattagatggacagatagatgtggatgatggtggacggatggatggatggacagatagataataaatggtttacagagcatgagtgatgaaagcacaatctgataaatttaagttagccacctagtgagaaccaggagactgaatgctgcctgaggattgattttatataatccaattgctctgctatatggacgtgacactagcgtctttcactgggccaaagacaagccttcatcatctctgtactggtcatttcaggggagacaaaaataaattagatgcaatttcttccctcaagagacacatagaaaataaaacctcttgtcatctctttctatagcaaccttgctggctttctttctaggcctagccctgtgtgaatgaagcacggtttaaaagaaacagcccttcctcctcagattaagcttacttaatggaagccttccccttaaccaggtttctgccagtcatattccatacagttgataactccagtctactggtaagtagacattttcctggctggttcatgtttccaagaaaagggaggggtctcttcttcctctatagcccctccaatacttgatacatgtttgggcttgggagttgaggcacagacagtattgcccagtgcatttcccagctgccttgcagttcaggtgggggcacgcagccaattcttgggaacggccatgaacagtaatgagagctgtcacttccaatgacaacaggtaagagccagtgtgagctctccatgtgcacgttgacacgtggcatcacatgagggaatctggagagcacctcgtccacatcagactcttttcagcaagaaacagacccttgttctgcaataccactggtatgttgggttgtttattactgtagcagcccgccccctgacctgatgaatacaagacttattaatttatcagatgctgctcggcttagtgagtagctgcattccaacaagcacatcttcatgtggaagcgggaacttggtgggaaaggcgagggttggattcaggccaaacttggttacttttcccttttaaggttctgcctgacctgggcgcccaagaartcttggcctgaaggagcagaacagatgc

SEQ ID NO: 15188 - DNA, 519 bp, Homo sapiens
ctgcatgcatcactagacctggtcttttcttctctcacctccgttctcccccgtgctctctgtgctcaactctcattgaccattttcctgtttcttcaacaggcggagttcattcctracttagggcctcatctagtgtcagtgcctggacttcccttcacacataacttcccagggcttcctccttcctgtgactccacaatagccctctgcccagcaattggtcaccctctgtacatcactttgagtccattttgtcaaacaatttctatgtgaaacacgctgatttatttgtacatgtctatttgtttagccacaaaaatttatgctgcagtaaaggcaagatctttgtctattttattcacaattgtgctcccagtgcctacattcaccttaattggctactttgctagtttcacatattgattccaatggtaaatgtgttgttggtttgtttttgatttgtgtgcactgtagtatgttatctgcaaatactaacacttttattattattttttt

SEQ ID NO: 15189 - DNA, 519 bp, Homo sapiens
ctgcatgcatcactagacctggtcttttcttctctcacctccgttctcccccgtgctctctgtgctcaactctcattgaccattttcctgtttcttcaacaggcggagttcattcctgacttagggcctcatctagtgycagtgcctggacttcccttcacacataacttcccagggcttcctccttcctgtgactccacaatagccctctgcccagcaattggtcaccctctgtacatcactttgagtccattttgtcaaacaatttctatgtgaaacacgctgatttatttgtacatgtctatttgtttagccacaaaaatttatgctgcagtaaaggcaagatctttgtctattttattcacaattgtgctcccagtgcctacattcaccttaattggctactttgctagtttcacatattgattccaatggtaaatgtgttgttggtttgtttttgatttgtgtgcactgtagtatgttatctgcaaatactaacacttttattattattttttt

SEQ ID NO: 15190 - DNA, 519 bp, Homo sapiens
ctgcatgcatcactagacctggtcttttcttctctcacctccgttctcccccgtgctctctgtgctcaactctcattgaccattttcctgtttcttcaacaggcggagttcattcctgacttagggcctcatctagtgtcagtgcctggacttcccttcacacataacttcccagggcttcctccttcctgtgactccacaatagcccyctgcccagcaattggtcaccctctgtacatcactttgagtccattttgtcaaacaatttctatgtgaaacacgctgatttatttgtacatgtctatttgtttagccacaaaaatttatgctgcagtaaaggcaagatctttgtctattttattcacaattgtgctcccagtgcctacattcaccttaattggctactttgctagtttcacatattgattccaatggtaaatgtgttgttggtttgtttttgatttgtgtgcactgtagtatgttatctgcaaatactaacacttttattattattttttt

SEQ ID NO: 15191 - DNA, 519 bp, Homo sapiens
ctgcatgcatcactagacctggtcttttcttctctcacctccgttctcccccgtgctctctgtgctcaactctcattgaccattttcctgtttcttcaacaggcggagttcattcctgacttagggcctcatctagtgtcagtgcctggacttcccttcacacataacttcccagggcttcctccttcctgtgactccacaatagccctctgcccagcaattggtcaccctctgtacatcactttgagtccattttgtcaaacaayttctatgtgaaacacgctgatttatttgtacatgtctatttgtttagccacaaaaatttatgctgcagtaaaggcaagatctttgtctattttattcacaattgtgctcccagtgcctacattcaccttaattggctactttgctagtttcacatattgattccaatggtaaatgtgttgttggtttgtttttgatttgtgtgcactgtagtatgttatctgcaaatactaacacttttattattattttttt

SEQ ID NO: 15192 - DNA, 519 bp, Homo sapiens
ctgcatgcatcactagacctggtcttttcttctctcacctccgttctcccccgtgctctctgtgctcaactctcattgaccattttcctgtttcttcaacaggcggagttcattcctgacttagggcctcatctagtgtcagtgcctggacttcccttcacacataacttcccagggcttcctccttcctgtgactccacaatagccctctgcccagcaattggtcaccctctgtacatcactttgagtccattttgtcaaacaatttctatgtgaaacacgctgatttatttgtacatgtctatttgtttagccacaaaaatttatgctgcagtaaaggcaagatctttgtctattttattcacaattgtgctcccagtgcctacattcaccttaattggctactttgctagtttcacatattgattccaatggtaaatgtgttgttggtttgtttttgatttgtgtgcactgtagtatgttatctgcaaatactaacrcttttattattattttttt

SEQ ID NO: 15193 - DNA, 533 bp, Homo sapiens
taaatcagtaacaaaacctttttattaatcccatatatttgggaattaataaatatatttaaataacttatggatcacagaagaaataaaaaagaaaatttaaaagtattttgaactaaaggattaaaaaaaaaatgcaatgccctatactgcactgccccctactgtctccatcctctggtcatctctgcatgaaagctaaaacaagcagtcatttggttcracctcagctgggatgtttgccctgggtgacaaatttttcaccactctgtgcgttctatgaatgaccacaaaagcataacaagtattgatttggggatacaaataaattttggtgaattcgaaaatatggaaaccacaaataatgaggatcagctatattagaaaagaagatcttaaaaatgtatgagtaaagtatccgtctcaaaaagctgaagaagaaacagcaaattaaacccaaagaaaacacaaggaagctaacagtgaaagagcagatattaatgaaacagataaaccatacagtagacataaat

SEQ ID NO: 15194 - DNA, 521 bp, Homo sapiens
gaataaaacaaaaaactattctacaaaatgtgacctctcaagttccattttcttgagctttaattgtagttatttgtagttattgataatagcacagtactaggtaagtgcatctgtgatttgaaattcttgcctcctgaaaccactttttttaaagcatttccatgtagctcactggagtcctctgcaatttgccagagcattgcagtggaatcaccctcaggcatgggtactttckctggtcacttttgggacaatcacagctcctcaggcagctaggacagttttgtgttctgctcacatgcttgtgttttgacctttgaagtctttactccacaatctaaccagcaattgcttaaaggaaagcagagtcattgagatgctctctccacaaattcttagtgccttcagctatgcccagttccctagactgcctatttaagtggctactaggttcgtctgtgagctgcagttagaccagtcagaaaaagcatcactcatctcactttgtttgggatgac

SEQ ID NO: 15195 - DNA, 518 bp, Homo sapiens
ccttgccactgccacctcagcccctcccatcatcccttcccaagtagggcagggaaagaagaaaagagtatcacttcctccagggcaaagactcaccatccaatcatttcctctctctttgagggactcctcaccaaaagaaagagagagagagcgagtctccaagaaaaccaagccaaacactggatgtgcggagacaagaggctgggttcccattccccgggatgaggtcagcctggggcagcctcatgcagcccacgtgctgattcacccaccaggcagagaatggagtgtgtggcaacccaaagcccatgcatcaaggatgtacgcttgtctccttgggctccacggacactgtgcctgtcacaggcccttttcccagccaggagggcaggctgcaggagaggagacctggcagygagaggccagggggcaccagcccagagacatggctctggaggcagaatgggaaggagtctggttctaggagtagggaattaagccagaagcagtttgaa

SEQ ID NO: 15196 - DNA, 508 bp, Homo sapiens
tttcaaccatagcactacccatttactctgctttctcaacttatgctgaatgagttatccatgctcttatctcaagttagtctttccacctgtgctttgaatttatactccactcgtatgcaagaatatctaataaccattccttctctcatgtatcataaatttcactctctctttcataaatatatgctgttgtgtcactcatctttgaaatatcagcactctagcctacattgcacacagctactgcctttttttgtgttcctttttacagtaaaatgctttgaaatacagtatatttttattctgcaaattcatatttgcattgaatgtgaatttgaaaaaaakacattttttctgtttaagatcagtaactccctactgccaagtcaaaatgatagttcctagttttcatgttaaattattagcagtatttgaaacagttgactatgctcacattttttaaacgcttgctttacttgtctttcataactccatatttctaggg

SEQ ID NO: 15197 - DNA, 1447 bp, Homo sapiens
gtgaggtatggatccacagaaatatgaatggggcttcacacttccacagatctgtggaattaatattgggatcaagtttaatcagtttcccaaaaggctaatcccaagtgaattctaatatctggatacttatatatgcaaatgtatgtatttacatgtacagcatgtgattaggcatagaaaatatatgcataaatgtatatcatacacattatatgtctaatcatatacaatatatgttcccatcaataataatacattagaaaatagaagtgacacaaaattaaactttcatgcagattctaccttgctatagttaacagcatgtagggcaagaagcattcctttcatattgtcaccaattcactattgccttgttttactggaggactcactctttgagtgaacatgaattggactccatagcatttgggaaagacacttcccttgcaaaacaaacaaaaatgaaaacaaaaacagattggaaattctgagtaattattgctagataatgaatacatcttgtttttgaaaagaaataggtaagtgatttacctttttgtgacagaatcaataagcaacttccaaaggatggaagaaaagagtatttacaaaaatcttctaatagaaccaacaccattaaataaacagactgatgacaatatacccttataatttatcgggtattgtcaccattttttttcaaaaaaacattttttaatgattcttaattgtgaaataagtgttggtagtatttttcaacattaatggtaataaaaaataaaaagatctaagcttattagctatatataaagaaaacaaagtagaataaaaacaagataaattttattttcatttaagggattcaactcttaaaatgtttgcctctgacattactgaaaaaaggaagttctgtatctgtttacataacagttatgctatattctgttaattcacaagaaattgaacatgaagggatgcatcaatagtccaaactccgtgtctaggggtgtatttaatgaagccacrcaagaaaggcctagaagctgcacaaatggcactagtttcaattgaaattcttagtaattcaggaggtctactttctacccaaataggtgtcacctttcatttcccaacaacaacagcaacagcaacaaaggtagaccttgttgctacaaataccttgaggtaggtatttgtttggttactcagtaagaacttactatgtatcatgcactactgtttcaaacttggaataaacagaacaaataagtactccttcccctcctcaacagagaaatgcattgcagtgtgataacttttgagttataagaagggtagtgcactgctggagcaaacagtagggtcagttctctagctctgacaaggagttttcagttgctacaagaacaaatcagagtcctccacagaagttgaaggttgcaga

SEQ ID NO: 15198 - DNA, 1447 bp, Homo sapiens
gtgaggtatggatccacagaaatatgaatggggcttcacacttccacagatctgtggaattaatattgggatcaagtttaatcagtttcccaaaaggctaatcccaagtgaattctaatatctggatacttatatatgcaaatgtatgtatttacatgtacagcatgtgattaggcatagaaaatatatgcataaatgtatatcatacacattatatgtctaatcatatacaatatatgttcccatcaataataatacattagaaaatagaagtgacacaaaattaaactttcatgcagattctaccttgctatagttaacagcatgtagggcaagaagcattcctttcatattgtcaccaattcactattgccttgttttactggaggactcactctttgagtgaacatgaattggactccatagcatttgggaaagacacttcccttgcaaaacaaacaaaaatgaaaacaaaaacagattggaaattctgagtaattattgctagataatgaatacatcttgtttttgaaaagaaataggtaagtgatttacctttttgtgacagaatcaataagcaacttccaaaggatggaagaaaagagtatttacaaaaatcttctaatagaaccaacaccattaaataaacagactgatgacaatatacccttataatttatcgggtattgtcaccattttttttcaaaaaaacattttttaatgattcttaattgtgaaataagtgttggtagtatttttcaacattaatggtaataaaaaataaaaagatctaagcttattagctatatataaagaaaacaaagtagaataaaaacaagataaattttattttcatttaagggattcaactcttaaaatgtttgcctctgacattactgaaaaaaggaagttctgtatctgtttacataacagttatgctatattctgttaattcacaagaaattgaacatgaagggatgcatcaatagtccaaactccgtgtctaggggtgtatttaatgaagccacgcaagaaaggcctagaagctgcacaaatggcactagtttcaattgaaattcttagtaattcaggaggtctactttctacccaaataggtgtcayctttcatttcccaacaacaacagcaacagcaacaaaggtagaccttgttgctacaaataccttgaggtaggtatttgtttggttactcagtaagaacttactatgtatcatgcactactgtttcaaacttggaataaacagaacaaataagtactccttcccctcctcaacagagaaatgcattgcagtgtgataacttttgagttataagaagggtagtgcactgctggagcaaacagtagggtcagttctctagctctgacaaggagttttcagttgctacaagaacaaatcagagtcctccacagaagttgaaggttgcaga

SEQ ID NO: 15199 - DNA, 1447 bp, Homo sapiens
gtgaggtatggatccacagaaatatgaatggggcttcacacttccacagatctgtggaattaatattgggatcaagtttaatcagtttcccaaaaggctaatcccaagtgaattctaatatctggatacttatatatgcaaatgtatgtatttacatgtacagcatgtgattaggcatagaaaatatatgcataaatgtatatcatacacattatatgtctaatcatatacaatatatgttcccatcaataataatacattagaaaatagaagtgacacaaaattaaactttcatgcagattctaccttgctatagttaacagcatgtagggcaagaagcattcctttcatattgtcaccaattcactattgccttgttttactggaggactcactctttgagtgaacatgaattggactccatagcatttgggaaagacacttcccttgcaaaacaaacaaaaatgaaaacaaaaacagattggaaattctgagtaattattgctagataatgaatacatcttgtttttgaaaagaaataggtaagtgatttacctttttgtgacagaatcaataagcaacttccaaaggatggaagaaaagagtatttacaaaaatcttctaatagaaccaacaccattaaataaacagactgatgacaatatacccttataatttatcgggtattgtcaccattttttttcaaaaaaacattttttaatgattcttaattgtgaaataagtgttggtagtatttttcaacattaatggtaataaaaaataaaaagatctaagcttattagctatatataaagaaaacaaagtagaataaaaacaagataaattttattttcatttaagggattcaactcttaaaatgtttgcctctgacattactgaaaaaaggaagttctgtatctgtttacataacagttatgctatattctgttaattcacaagaaattgaacatgaagggatgcatcaatagtccaaactccgtgtctaggggtgtatttaatgaagccacgcaagaaaggcctagaagctgcacaaatggcactagtttcaattgaaattcttagtaattcaggaggtctactttctacccaaataggtgtcacctttcatttcccaacaacaacarcaacagcaacaaaggtagaccttgttgctacaaataccttgaggtaggtatttgtttggttactcagtaagaacttactatgtatcatgcactactgtttcaaacttggaataaacagaacaaataagtactccttcccctcctcaacagagaaatgcattgcagtgtgataacttttgagttataagaagggtagtgcactgctggagcaaacagtagggtcagttctctagctctgacaaggagttttcagttgctacaagaacaaatcagagtcctccacagaagttgaaggttgcaga

SEQ ID NO: 15200 - DNA, 542 bp, Homo sapiens
acagggctcagaacccctactctggctcctggctctacccagggtagcttaacatacctgttctgtagatttgcgtttctagtaaattgtcccttgatacacacctattagaatagtgggaaaaggtaacagtatcaattgccggtgaagayatagaacagccagaactctcattcattgctgatgggaatgcaacatggtgcaatcacttcggaaaacaatttggtggtttcttagaaagttgaacatatacttataacatgacccagaatgcacttgtattttccaaaaagatataatatatatgttgtgtgtgtttatacaaaagcctgtactcaaatgttcatagaatcttcgtaatagccgaaaagtagaaataaactcaatatccctcctgtggggaatggctaaacaaactgtggtttatccatacaatgaattccatgcagcaaccaagggcaatgagctaccgacacacagagcaaccgaatgggtctccagggcattgtgttaaatgaaatggccgcattatgtgtgattcc

SEQ ID NO: 15201 - DNA, 542 bp, Homo sapiens
acagggctcagaacccctactctggctcctggctctacccagggtagcttaacatacctgttctgtagatttgcgtttctagtaaattgtcccttgatacacacctattagaatagtgggaaaaggtaacagtatcaattgccggtgaagatatagaacagccagaactctcattcattgctgatgggaatgcaayatggtgcaatcacttcggaaaacaatttggtggtttcttagaaagttgaacatatacttataacatgacccagaatgcacttgtattttccaaaaagatataatatatatgttgtgtgtgtttatacaaaagcctgtactcaaatgttcatagaatcttcgtaatagccgaaaagtagaaataaactcaatatccctcctgtggggaatggctaaacaaactgtggtttatccatacaatgaattccatgcagcaaccaagggcaatgagctaccgacacacagagcaaccgaatgggtctccagggcattgtgttaaatgaaatggccgcattatgtgtgattcc

SEQ ID NO: 15202 - DNA, 542 bp, Homo sapiens
acagggctcagaacccctactctggctcctggctctacccagggtagcttaacatacctgttctgtagatttgcgtttctagtaaattgtcccttgatacacacctattagaatagtgggaaaaggtaacagtatcaattgccggtgaagatatagaacagccagaactctcattcattgctgatgggaatgcaacatggtgcaatcacttcggaaaacaatttggtggtttcttagaaagttgaacatatacttataacatgacccagaaygcacttgtattttccaaaaagatataatatatatgttgtgtgtgtttatacaaaagcctgtactcaaatgttcatagaatcttcgtaatagccgaaaagtagaaataaactcaatatccctcctgtggggaatggctaaacaaactgtggtttatccatacaatgaattccatgcagcaaccaagggcaatgagctaccgacacacagagcaaccgaatgggtctccagggcattgtgttaaatgaaatggccgcattatgtgtgattcc

SEQ ID NO: 15203 - DNA, 542 bp, Homo sapiens
acagggctcagaacccctactctggctcctggctctacccagggtagcttaacatacctgttctgtagatttgcgtttctagtaaattgtcccttgatacacacctattagaatagtgggaaaaggtaacagtatcaattgccggtgaagatatagaacagccagaactctcattcattgctgatgggaatgcaacatggtgcaatcacttcggaaaacaatttggtggtttcttagaaagttgaacatatacttataacatgacccagaatgcacttgtattttccaaaaagatataatatatatgttgtgtgtgtttatacaaaagcctgtactcaaatgttcatagaatcttcrtaatagccgaaaagtagaaataaactcaatatccctcctgtggggaatggctaaacaaactgtggtttatccatacaatgaattccatgcagcaaccaagggcaatgagctaccgacacacagagcaaccgaatgggtctccagggcattgtgttaaatgaaatggccgcattatgtgtgattcc

SEQ ID NO: 15204 - DNA, 565 bp, Homo sapiens
ggctgttgttgttgttgttgttgttgagatggagttttgttcttgttgtccaggctggagtgcaatggcacaatcttggctcactgcagcttccgcctcccgggttcaagcaatgctcctgcctcagccttccgagtagctaggataacaggcgcccaccaccacgcacggataattttttttgtatttttagtagagacgggtttacaccatgtttgccaggctgatcttgaactcctggcctcaggtgatccacccacttcggcctcccaaagtgctgggattacagatgtgagccacagcrcccagcctgtcattgtttgttcaatatactcttgccctaacaccacacaaatctcaatcagttgagttgccttgtaaacttgaaatgatgaaacttgtaatggtattctaaaaatcagataaataactttaaatacgcatagagattcaagatgggtagacctgatgctgctgaactaccaaccaaaaatgcacatatgtatttatggtattgccataaataatatatcagttattatacatatttaaaatgttcatttct

SEQ ID NO: 15205 - DNA, 461 bp, Homo sapiens
gtaaagtgaggaaaaatactagatgcrttgggaaaggaaaatgcccaagacttcatagctaatgggagttggtccttcaggcagaaagcctgtttccattcactggccccaaagtcctatgtccagcaggctacagaatgttctcagctgagtggtgcaattcctgttgccaaacaaacttgctttgcatttgaatggtttgggtaaaccaatttgtgaccttttgaagctcacagattatagtcacagcttttgcttccctttgaaaggaatgacttaatatggccaatacagtagccactgaccatattaagcacttgaaatgtagctggttccaattggcatgcactggaagagtatagcatatgctgtatttcaaagacttaacacacacacacaatgtcagataactccaagattttttagaattgatttcatgttgaaatgataatgctttgaat

SEQ ID NO: 15206 - DNA, 506 bp, Homo sapiens
ccccagttgctgaagtcaaaaatggagaagggaggacttctggtttcaagattgctgagtaaagcaaagccctttctgcctttcttctttcaaaaactaccccctaaattactagaatagaacaaaacaaaggaatgcgaacctccattttaaataaaaccagaagtccttggtgattttgaaccatcaagtataaagatagaaagmagatgaagaggtgggaagaggcttagcagagtggatgcaagtgaaacctaagcacctgtagagagacagaccaaggaagagcaagctgggtgaccacatgagaccctgaagaagctccagaatgggaggcatacattatcactaaaggcagaagtagagcacagggttgcaaacattgcaattgaagatctgtataagcagtagttggacctccccctactatctcaactagactatccctctggtaaactcacagtagacaaaagttagagtccctggagagattgaactagaagcgt

SEQ ID NO: 15207 - DNA, 506 bp, Homo sapiens
ccccagttgctgaagtcaaaaatggagaagggaggacttctggtttcaagattgctgagtaaagcaaagccctttctgcctttcttctttcaaaaactaccccctaaattactagaatagaacaaaacaaaggaatgcgaacctccattttaaataaaaccagaagtccttggtgattttgaaccatcaagtataaagatagaaagaagatgaagaggtgggaagaggcttagcagagtggatgcaagtgaaacctaagcacctgtagagagacagaccaaggaagagcaagctgggtgaccacatgagamcctgaagaagctccagaatgggaggcatacattatcactaaaggcagaagtagagcacagggttgcaaacattgcaattgaagatctgtataagcagtagttggacctccccctactatctcaactagactatccctctggtaaactcacagtagacaaaagttagagtccctggagagattgaactagaagcgt

SEQ ID NO: 15208 - DNA, 520 bp, Homo sapiens
gatcatgccactgcattccagcctgggtgacagactgagaccctgtctcaaaaataaataaataaaataaataagttacggtcatggatatgttgattaaatggagttaaacattccacattgtgtacatatatcaaaatacatcacattcgaccccataaatgtatacagtatgatttrtcaattaaacatcagattaatttcaaaagaaaatttttaaatggattgtaatttttgactgaaatatgcatcctcctttcaagagtgtaaactctttgttttctatcttcccattcctagctcattcctagtttattgcttggcacgtagctttgctcagtaaatgcttgctaaatgaaaacaagaatgaatgaatgccaatggtaaagtattacaacccaaacagatttttccagtgactgacaatgtagagcaactcttcaaagatttaaaattttatttctgaattcatttcacacctcctgtattttctggctgtgtgaccctggacaagtgactt

SEQ ID NO: 15209 - DNA, 520 bp, Homo sapiens
gatcatgccactgcattccagcctgggtgacagactgagaccctgtctcaaaaataaataaataaaataaataagttacggtcatggatatgttgattaaatggagttaaacattccacattgtgtacatatatcaaaatacatcacattcgaccccataaatgtatacagtatgatttgtcaattaaacatcagattaatttcaaaagaaaatttttaaatggattgtaatttttgactgaaatatgcatcctcctttcaagagtgtaaactctttgttttctatcttcccattcctagctcattcctagtttattgcttggcacgtagctttgctcagtaaatgcttgctaaatgaaaacaagaatgaatgaatgccaatggtaaagtattacaacccaaacagatttttccagtgactgacaatgtagagcaactcttcaaagatttaaaattttatttctgaattcatttcacacctcctgtattttctggctgtgtgaccstggacaagtgactt

SEQ ID NO: 15210 - DNA, 553 bp, Homo sapiens
tcctacttcagctccaaggtagacttaaaaatcagcagaccatcccagcactttgggaggccgaggcgggcggatcacgaggtcaggagatcgagaccatcccggctaaaacggtgaaaccccgtctctactaaaaatacaaaaaattagccgggcgtagtggcgggcgcctgtagtcccagctacttgggaggctgaggcaggagaatggcgtgaacccgggaggcggagcttgcagtgagccgagatcccgccactgcactccagcctgggtgacagagcgagactccgtctcaaaaaaaaaaaaaaaaaaaaaaaatcaacagaccataattaggttaaaaaaaaagactcaacatatttctggagctgctgaaaggagaaaaataaggttagagcttctttaaagtcacatttccagagaactgtgattaattattcatgttggcagttctgtataagrtgccacattcaaagctgtctttattggagctaatccagtgatcactcagtgtgtaaaaacttttctcagaggagcatttgctataagcaa

SEQ ID NO: 15211 - DNA, 565 bp, Homo sapiens
acataatatttagcttgatagatttcatattatgttttgtgagataatattttagacatacctttagccttaagttttacaaatgaataaaatacaatgtgtgtgtgtttgtgtgttatacacacakgagttcacttgcactgaagtattttttcattttagtggcaaactgaggtgtctttaaaattccagagtgaaaatcatgtgaatgtccttagtataatctgtagaaaataataaagggaattctaatgatgggatacatttgccctatgattgtttgtgaatgcctttcatcaaatgaaaaattcttttgttccaggaatgagaactaaagtggataacacttaaattgcacttgaactgataagcacagcaaaataaaatatttctgaaaactattaattttatgtttatacattgtcacttgtatacattcagtttggaaattcttttggcttaataatgttatttcatttacacataacctatgactatcagaagttataagagaaagcaaagcaaataaccttaacattaaaaatgaagtctacatcactattgc

SEQ ID NO: 15212 - DNA, 565 bp, Homo sapiens
acataatatttagcttgatagatttcatattatgttttgtgagataatattttagacatacctttagccttaagttttacaaatgaataaaatacaatgtgtgtgtgtttgtgtgttatacacacatgagttcacttgcactgaagtattttttcattttartggcaaactgaggtgtctttaaaattccagagtgaaaatcatgtgaatgtccttagtataatctgtagaaaataataaagggaattctaatgatgggatacatttgccctatgattgtttgtgaatgcctttcatcaaatgaaaaattcttttgttccaggaatgagaactaaagtggataacacttaaattgcacttgaactgataagcacagcaaaataaaatatttctgaaaactattaattttatgtttatacattgtcacttgtatacattcagtttggaaattcttttggcttaataatgttatttcatttacacataacctatgactatcagaagttataagagaaagcaaagcaaataaccttaacattaaaaatgaagtctacatcactattgc

SEQ ID NO: 15213 - DNA, 422 bp, Homo sapiens
tttctctactttttgtatatatgttattctttaataaaaagtttacaaaaataagtgtttctgataaatctgcatatatgtttcctggaatatttgaagtttaaaaatggaaacggtctaaacatttatcaataagaaactggttcaacgaattactattttttttttttttttttgagatagggtctcactctgtcattcaggctacagtgcagtagcatgatcayggctcactgcagtctctacctcccagtgatcctcccacctctacttccccctagctgggcctacagcaggcaccaccacacccagctaatatttttagtttttgtagagacagggtctctctctttgcccatgctggtcttgaactcttgggctcaagtgatcctcccacctcggcttcccagagtgctgggatt

SEQ ID NO: 15214 - DNA, 422 bp, Homo sapiens
tttctctactttttgtatatatgttattctttaataaaaagtttacaaaaataagtgtttctgataaatctgcatatatgtttcctggaatatttgaagtttaaaaatggaaacggtctaaacatttatcaataagaaactggttcaacgaattactattttttttttttttttttgagatagggtctcactctgtcattcaggctacagtgcagtagcatgatcacggctcactgcagtctctacctcccagtgatcctcccacctctacttccccctagctgggcctacagcaggcaccaccacacccagctaatwtttttagtttttgtagagacagggtctctctctttgcccatgctggtcttgaactcttgggctcaagtgatcctcccacctcggcttcccagagtgctgggatt

SEQ ID NO: 15215 - DNA, 601 bp, Homo sapiens
gccttggaatggacaggcactaaatgagatagaaaaaagaatttaggtttagtccaaagaaaaacactgcattaaaaataagccattccatcaccactgaatgaatgacttgccacaaaatatataataattacttcactgctgttaccacgtgtatttatgggagagaccacgagtttctttctcctctctgctgcaaagtcaagggcaaggaaggcactaagaaggcaggttaaaatracaaaaataatgatcgatttctggatgtgctggtcaggctgggagactggtgggactcactagaagattcctcattactttctctgtttcacagcttaaaaatataaaatatccttcagacattgttctggtaaaaactcattaaataaacccataaatcacattttatactcatcttttttgatcttattcacaaatactgctttatacccacttagcatttcactattaaggggtatcaccattttgtgtagaataatgattaacattcccaagaacccaagtccatttcactttttaaagtgccagccacctaccacattattttcctggaatgccattatgattacacaatctaata

SEQ ID NO: 15216 - DNA, 601 bp, Homo sapiens
gccttggaatggacaggcactaaatgagatagaaaaaagaatttaggtttagtccaaagaaaaacactgcattaaaaataagccattccatcaccactgaatgaatgacttgccacaaaatatataataattacttcactgctgttaccacgtgtatttatgggagagaccacgagtttctttctcctctctgctgcaaagtcaagggcaaggaaggcactaagaaggcaggttaaaataacaaaaataatgatcgatttctggatgtgctggtcaggctgggagactggtggsactcactagaagattcctcattactttctctgtttcacagcttaaaaatataaaatatccttcagacattgttctggtaaaaactcattaaataaacccataaatcacattttatactcatcttttttgatcttattcacaaatactgctttatacccacttagcatttcactattaaggggtatcaccattttgtgtagaataatgattaacattcccaagaacccaagtccatttcactttttaaagtgccagccacctaccacattattttcctggaatgccattatgattacacaatctaata

SEQ ID NO: 15217 - DNA, 521 bp, Homo sapiens
agaaagagaagcttaggttaaatctgcatctcaaccaggaaactgatcatgcttaaaagtcttctgcattgtttattctttgtttccagctgaagggctactaggcaaaaatccatagagagacagtagggatgtttaggcactttctatcattgaccacccagggttctgttactaaagtaagtccccttgtcatggtggaatagagctggagaaaacatgttgtctttctaaaacaggtggtcccctcacactgctccccttgagggtatttggctttgaagatacccagacagaacatgctgtccccaatcctgaggcctgcacagccaaggactgaaaggggagggctggcagatctatcctgatacagatcccagagggagcaaagggtcttaggcaggcytgttacatggaaacctctcatgaactagtgaacagatagcaaaaatgatgtgtggacatttccaaagaaggatcatgcagttcctcaggaaaattggaatagttaaaagtacctg

SEQ ID NO: 15218 - DNA, 533 bp, Homo sapiens
ctttttttaaatagacagggtcttgctctgtcrcccaggctggattgcagtggtgcaatcatagttcactgtagcctcaaacccttaggctcaaacaatccttccgccttagcttccgaagtagttgggactacttaggcttgcaccaccatgtctggctaataaaaaaaattttttagagatagagtcttgcttcgttccctggattgatcttgaacctctggtctcagataatccttgcatctcagcctgcagagtacctggagtatctgggtttaacaccatgagccgtgtaccaagcccaatacgtcatgttttatttatccattcataatacagttgatatacctttgggttacttcaactttttggctattatgaataatgctgctatgagcattaatgtgcaagtttttgtatagatatatgtttttatttctgttgggtatatacctaggagtggaattgctgggtcatgtgggaactttaatctttcaaggaattgccaaactgttttccaaagtgatggaaac

SEQ ID NO: 15219 - DNA, 533 bp, Homo sapiens
ctttttttaaatagacagggtcttgctctgtcacccaggctggattgcagtggtgcaatcatagttcactgtagcctcaaacccttaggctcaaacaatccttccgccttagcttccgaagtagttgggactacttaggcttgcaccaccatgtctggctaataaaaaaaattttttagagatagagtcttgcttcgttccctggattgatcttgaacctctggtctcagataatccttgcatctcagcctgcagagtacctggagtatctgggtttaacaccatgagccgtgtaccaagcccaatacgtcatgttttatttatccattcataatacagttgatatacmtttgggttacttcaactttttggctattatgaataatgctgctatgagcattaatgtgcaagtttttgtatagatatatgtttttatttctgttgggtatatacctaggagtggaattgctgggtcatgtgggaactttaatctttcaaggaattgccaaactgttttccaaagtgatggaaac

SEQ ID NO: 15220 - DNA, 756 bp, Homo sapiens
tctaataggtgaaagattaatctccaaataagtttttaaagaccccagatgctctgtgataattatatacatacatacatacacacagatatacgtacatacacacatatacatacatatacattgtgctactatatgtacggacgcaatatatatacataaaactcggtgttctcagtaaagtatgagccattattcatttaaatacwagatatttttcctttttttttaaacaaggagtattttttgaacctaaacctgaacctctaaatagttcggataacaaagttttggaatcatgaactcaacattgttaacaaaccatccagtccaaataaacaaaggaaacccacatctcatttgccaagattctaagaaccataatcctgtcaccaaatgacaatggagacttgatcctttctcagtcctaaatacaaacagcaaagccctctttggtcctcatacctactcgaaattgcaaagcaaggcctgggaaaaacggtgaagaggcaccacttactacaagcagtccgagtagctgtgactgcgaccaccccaatcctggttccaaacagcatccttcccggttctcttcttaaggagcagagtctttcgtcccttcgccccaaatcgctcaagtcattcctaggaaatcccgagaaacacttcacctcacctgtcaaattgcacaaaatccactttcgaatttctcccgcgaaacaacgtgacgtcattaacgcgggacctcaccagatg

SEQ ID NO: 15221 - DNA, 1317 bp, Homo sapiens
ataaagcacacacccagccacatctctaagaacttagctattatgaagaataagagayagaaactcaagtctgaatgacagataacatttttcttgcatgtagagtaacagtccctctaactggccttccatcttcatcttgtttttttgaggcttgaagaaccaggctaggatgaaccaggtctccttgacttgacaacatttctgggtagttttctgcattctaacagcctcaagttttatgtataagatggaaaaataaaacatgtaatacttcaattaactttgacacacctcagtgaagcaattaagtaacttggagtattagtttgaattttagcaaaaaacccaaagggaagcaaatattaacctgggaatgcgcccaacatggttttaatgctgagaactgtatagctgattcagctcatctgggatttagtaagcttctactggatgtgacataatctctgtcttccaactgcctaaaccaaatccaaggagtcagaaatctcactagatattccagtgtgataaatccagtaatggaaagatatacaagggacattaaggaggccactaactttgttcagggtgatagatgtgcttcacagggaaagtaacatctgagcacaaagatatatacggttttcacatttgaggtgggaacaggtttcccaagaaaggacagcttgcacaaagatacagaacccagtaattgcacagcgttatcaggagatctccttaagtctaccatggtcctaagacaaagccttgggcatgagaattcatttccctagagtcagagttgtctggttctaaatttcacacaagtggatataatgtagggaataatatgtagacaaaaaaaatctaggtagactatttgatcttgggcaaaccacccagaacattagtttcctcatctgtaagtaaccacttaacactggctattgagaatttactgatattaagatacctgttagcatgatacggtggcatgtgactgcagtaccagctattcaagaggctgaagtaagaggctggcttgagcccaggagttcaaggctctagtgcactatcatcatgcctgtgaacagctactgcacaccagcacaggcaacatagtgagatgcccatctctttaaaaagataattaaataaatagtatttaaactgtaaaacatacagatgtcaattattattacagatatttcttttgatattataatttgtaaatcatcaacattagattaaccttaaatagcaatattcataaagcaacagatacacagtaacatgaataatatgagtatgtaa

SEQ ID NO: 15222 - DNA, 533 bp, Homo sapiens
ggttttaataccaagagataattgtgcttctctaatgtgtctggtttgcctttttcttttgcacatcaagacattaaatattcacatttcctcctttctttgggcttccaaaaatatgtggccactcacctgcagatttataggacttggcactgcaggtaagtacctctagctgagacagagattttccaagcaattttttccatttgtgaggatgctccaagggattccctaagagtattgcttaatgtttaagaactcaggatctggactcatactgaccttaactactattaattctgtgaccttgggaaaatcacttaacctctctaagcctcagcgttcttgtctgtagaatgtggataacaacagaaactatatcataaagtgttgtgggcataaaataagaacatgtgtgaaaagtgcttagttcagtggatgggaagyggcaagcattcaataaaatgctaattattaacacacgttttgaatggcaaactcattaactctcctaagtagtgatttctttcaat

SEQ ID NO: 15223 - DNA, 572 bp, Homo sapiens
caagtgattttcctgccttggcttcccaaattgttgagattactgacgtgagccacagcacctagctttggatttaactttagttgacttaaatttaaatttaaatccccgtgtgtggctagtgatggtatcagacagtgcaaatcaagagctcacttgggtctctggcttctccagccagagtggtgtggggcaggctccccacaggctcacagcagcagccacacggcgggaggtggtggccggacaagtgcccctgraggaactggacagaagctagcgcctggagcctggggcacccgtagttggcacacagccaccacgaccaccacgagcactgcaggctttgaaggaccggaggactggaactgggcctgggccccaccctgaggagcccttgccccggccctgcagacacagtggctggagcagaaggcagctctgtccacccgtaggctggatgtctccacaggtaaaaggtacctgagcagggccgggctacactggatgactgacactccatttgacacgaatgacaaaattcatgaggccagccgggtcccccaaaggca

SEQ ID NO: 15224 - DNA, 525 bp, Homo sapiens
ctggcatggcactcgagacagatccggataatcaacagagtcagttcacacctcatgcacgtatcacagggtcccttacaccagccaatctttttggcaccaggattcatggaagataatttttctatggacggggttgtggggatggttttgggatgaaactgttccacctcaggtcatcaggcattagattctcaaaaggagcgcacaagctagatccctcgcacgtgcagttcacaatagggtttgtgctcctatgagaatctaatgccaccgctgatctgacaggaggtggggctcaggcggtaatgctcgctggccygctgctcacctcctactgtaaggcccagttcctaacaggccacagaccagtactggtcccctgctgcgagttggggacccctgccttagacgggaaaaaagagtgcatagacttcctgctctcctgagatggcagcactctcagcattgtttatggaagtcagtttggttggttggttggtttttaaaacaaggtagaaggaa

SEQ ID NO: 15225 - DNA, 602 bp, Homo sapiens
ccgcttgcctcggcttcccaaagtgctgggattacaggtgtgagctaccatgcccagcctggaaaattctttaatagcagggaagctcaatagcttataaattgttcagtaccatccagatgaaaacctatcatttcaggcttctaatttttagtgatttgtgcagacatgtttcatatgctcattcacattcatgtgtcagactatttctagtttaaaaattagaataaatgaaaattctttcaaaagatttaaataatgctttccaaaaatcatgaagcattctaagccatatatgatattcctcacarttgtttgtgattcagactgagtaagtgcttttagacatggattaaaaaaattcttacctggacttcttggtgcatgcccggagtcccagcttcgtcagaggctgaggtaggaggatgacttgagccctggagtttgagttcagcctgtacaacagagcaacactctgtctcttaaaaaaaagttcttgtgcttaaccattcaaattcttattcactatttcagtgctgtttatgagttcaaacaaatatcccgtatgtgcctcctcacaaagctactgtgtattctaggta

SEQ ID NO: 15226 - DNA, 770 bp, Homo sapiens
gatggtggcagtcttgttgagccacatggcctagatttgaatcccatctctgatgcaaactatgtgatcttggccaagtcacctaatttttctcagcttcaatttcttcatctgccaaatggggataaagcagyatatacacctactaggtaagcactcagtaaattttagctattattatccagtcttgtttgatacaaacattactcacagaaagtgcaatacacttaagagcaaatctagcaaccacaactagcacttgttgatatttaaacttttaaaatatttaccacaaggcctatatcaacttaaacttcctttcagcatgagtgttatagctgtgagtggaacacattacctgaggttctatgacagactcattaaagatagattgggtgatagggtcttgatttaccacaatgggaccctgagaggaatcaggagccactgttacatttggaaaccctgcaaaaggaaaagaagttgtgatgatttgtttcatttaattaacttgacttcacaagctctatactgccattggtttgcatcatcatatgaaaatcttaaacagcagctcacattaatgtagtgcttactatatgccaggcactgttctaaacgtacttacatatattaactcattttactctcataaaaccctataagtacaattactattttacagatcagtaaactgaaactcacagacattaagtaactagcccagagtaacactaatagattgccaagccggaatcaaaccttacatg

SEQ ID NO: 15227 - DNA, 770 bp, Homo sapiens
gatggtggcagtcttgttgagccacatggcctagatttgaatcccatctctgatgcaaactatgtgatcttggccaagtcacctaatttttctcagcttcaatttcttcatctgccaaatggggataaagcagcatatacacctactaggtaagcactcagtaaattttagctattattatccagtcttgtttgatacaaacattactcacagaaagtgcaatacacttaagagcaaatctagcaaccacaactagcacttgttgatatttaaacttttaaaatatttaccacaaggcctatatcaacttaaacttcctttcagcatgagtgttatagctgtgagtrgaacacattacctgaggttctatgacagactcattaaagatagattgggtgatagggtcttgatttaccacaatgggaccctgagaggaatcaggagccactgttacatttggaaaccctgcaaaaggaaaagaagttgtgatgatttgtttcatttaattaacttgacttcacaagctctatactgccattggtttgcatcatcatatgaaaatcttaaacagcagctcacattaatgtagtgcttactatatgccaggcactgttctaaacgtacttacatatattaactcattttactctcataaaaccctataagtacaattactattttacagatcagtaaactgaaactcacagacattaagtaactagcccagagtaacactaatagattgccaagccggaatcaaaccttacatg

SEQ ID NO: 15228 - DNA, 361 bp, Homo sapiens
gtttttaatagagatggggtttcaccatgttagccaggatggtctcgatctcctgaccttgtgatctgcccgcctcggcctgccaaartgctgggattacaggcgtgagccaccgcgcctggcctctacagtctctttaattaggatcctaaatgtttctcccgtggtctcatctattttaacctaaaacgcccttggggaaaaccttttgtcactgcaacacttcagaacacacttacaacaggaggttttttcccgagggcctgcagcaatcaaggagggccgttctgctgggtttcctgttttgagcgggatttgtgttccgggaggctgggtgcttcctcagaactctgtctgcttt

SEQ ID NO: 15229 - DNA, 361 bp, Homo sapiens
gtttttaatagagatggggtttcaccatgttagccaggatggtctcgatctcctgaccttgtgatctgcccgcctcggcctgccaaagtgctgggattacaggcgtgagccaccgcgcctggcctctacagtctctttaattaggatcctaaatgtttctcccgtggtctcatctattttaacctaaaacgcccttggggaaaaccttttgtcactgcaacacttcagaacacacttacaacaggaggttttttcccgagggcctgcagcaatcaaggagggccgttctgctgggtttcctgttttgagcgggatttgtgttcygggaggctgggtgcttcctcagaactctgtctgcttt

SEQ ID NO: 15230 - DNA, 583 bp, Homo sapiens
tatgggcaaatgtaagaaactggttttaattacatgcaacagttctaaagtaaagaacatcaaataggggaaagagttgcaaatagttgtaaccctttccaatgattctgaagctctttctcccatcactaatttaaagtcatgaaatttaatagaactatcaatgcattttgaaagggctattagctacatatatgtcaaattatcacaaacttgatcaaagttgaccaaataatgactctattagatgcttattatcagacatttatgcttcgagaaacttgcctcagtagctctgaaagaagggaaaaggtagttaaactgacctttcccatgaaagaggattacttttattattttgggtaaaatctagtggttttgaatgattgtcaaaccttccccaaacttgagcagaagtcgtctgcccaataagaamgatgaaactttaggaatgtgttttcaaatctgcatttctatcatcagtggacctctgttggcatagtccagaatacactgcctctgtctgcctaattactatcaatttatacagagatttacttttctgatttgtacatggccttca

SEQ ID NO: 15231 - DNA, 496 bp, Homo sapiens
cataggattcttatagaagttagatatgagtacatttttatatgaaagtacctatactaggatctagcacaaagtttagtgttaactgaacctcatgtaacatttcatgtaaaagttgagatagaaaatttttgaagcatgttataaaaattaggaatccttatgtacacatgaaataatttcatctaagacttttaaaattacctaattttatctattgttacaaaaaaataacagatggaaaggctttaaagtaaaattaagcagatgaataaatatctaagtatctgtcccaaaatgctaggttttttttctgtttttttttgttttttgggttttttttttttttttttttttttttkgcatcttgtcatgctactatctgcaagggaagtgagtataaaagactcaggggatacatggagtgtagacctttcaagtgagaaatattatataaatgtagttttatatgctcaccaccaaaagagtgtaattt

SEQ ID NO: 15232 - DNA, 532 bp, Homo sapiens
cactcttcttctttaaatacggaagcctttaaaatcatatttggagaaaggcacagacctccttccgcagcatgtccttaaccttagaaaaataaacttctaaattgattgagacctgtctcagttacgttgtggtttgcagtaacagccccattctttgtacaagttttttgtctgagttaattttgtgttgctataagagaataccaaacatggataatttatttwaaaaaaatatttctcacagttctagaggctgaaaatttcaacatcaagcagcgacatccagtgagggccttctttgcttcataacaaggaggaaggcatcacatggaaagacatcatatacccacctccaaatactatcaacatatatctttagagattaagtttcctaaacatgaactgtggggaacacattcaaaccatggcacggagcatgctggtgtcaatcgtctttaggagcagtagccaacaatcgcttttggttttcctaattaaatgtaataagataatttttgattgtatgtga

SEQ ID NO: 15233 - DNA, 532 bp, Homo sapiens
cactcttcttctttaaatacggaagcctttaaaatcatatttggagaaaggcacagacctccttccgcagcatgtccttaaccttagaaaaataaacttctaaattgattgagacctgtctcagttacgttgtggtttgcagtaacagccccattctttgtacaagttttttgtctgagttaattttgtgttgctataagagaataccaaacatggataatttatttaaaaaaaatatttctcacagttctagaggctgaaaatttcaacatcaagcagcgacatccagtgagggccttctttgcttcataacaaggaggaaggcatcacatggaaagacatcatatacccacctccaaatactatcaacatatatctttagagattaagtttcctaaacatgaactgtggggaacacattcaaaccatggcacggagcatrctggtgtcaatcgtctttaggagcagtagccaacaatcgcttttggttttcctaattaaatgtaataagataatttttgattgtatgtga

SEQ ID NO: 15234 - DNA, 572 bp, Homo sapiens
tcttttcctaaaaaatcacttccccctccctccatctgccctcactaaatatcagaactcagtggcttatggctagatccccacatgcacgtgttccaaatgttgctcaagtccttttgtctagatatttacaatgtctaatagagctaaaccacaacagcatatttatctatgtattaccacaatctagatgtgtgttcctcaagacaagaatcatggtgtttcgcacctgcacatgttgttggggggaaaagactatagtctcagaatctgaaatatgactatcccagataaaaaacagatggcagagaataagaakggaagttcatatccaccagaggctggagaccacctcagcccaatttctaaatccactagatttacaaacttttctctacagtgagctcagtctaaaaccaccccactcccgctgtcttgatgttaaccagcaaggggctctgtgaaacttacataggggaaagaaccctatgctactgggcagaagagaaaaggtagttcccagttaggaaatatcaagaagaggttgccataattgtccaagaaaatggtga

SEQ ID NO: 15235 - DNA, 572 bp, Homo sapiens
tcttttcctaaaaaatcacttccccctccctccatctgccctcactaaatatcagaactcagtggcttatggctagatccccacatgcacgtgttccaaatgttgctcaagtccttttgtctagatatttacaatgtctaatagagctaaaccacaacagcatatttatctatgtattaccacaatctagatgtgtgttcctcaagacaagaatcatggtgtttcgcacctgcacatgttgttggggggaaaagactatagtctcagaatctgaaatatgactatcccagataaaaaacagatggcagagaataagaagggaagttcatatccaccagaggctggagaccacctcagcccaatttctaaatccactagatttacaaacttttctctacagtgagctcagtctaaaaccaccccactcccgctgtcttgatgttaaccrgcaaggggctctgtgaaacttacataggggaaagaaccctatgctactgggcagaagagaaaaggtagttcccagttaggaaatatcaagaagaggttgccataattgtccaagaaaatggtga

SEQ ID NO: 15236 - DNA, 636 bp, Homo sapiens
cctgtcctcatgaacaacatgaggacctgtcctcatgaacaacatgaaggaacagagaccagtaaagcatgtcattcaaactctcttaaccacaccttacagcaagaaatacattttacaatccaactcacatgcacgatgcacaattgcttcataaaaccatatttattattactgcttgcaatacacttttcttctattctattctattctattctattctattctattctattctactccattccattccattccatcccattccattctactctatactactctattctattctattatttaactgtagtccagacctactgaattgatttttggttacaacacacaggttaaaaaaggaaaagagcctttaaaaaatccaggatctctctaatagatagttagagaatatgaactaaagtatacttcaaaatctttgggtatctatgaccagcccaataaggttaatcattaaagctttcagaatccgcattcccaaacagccagcagcttttctcaagtcaattgcaggtgctgattttccttctktggtatttctacacaagatggtagattgcatttttttaacttttaatttttgtgggtacatagataaatatatttatggagtac

SEQ ID NO: 15237 - DNA, 636 bp, Homo sapiens
cctgtcctcatgaacaacatgaggacctgtcctcatgaacaacatgaaggaacagagaccagtaaagcatgtcattcaaactctcttaaccacaccttacagcaagaaatacattttacaatccaactcacatgcacgatgcacaattgcttcataaaaccatatttattattactgcttgcaatacacttttcttctattctattctattctattctattctattctattctattctactccattccattccattccatcccattccattctactctatactactctattctattctattatttaactgtagtccagacctactgaattgatttttggttacaacacacaggttaaaaaaggaaaagagcctttaaaaaatccaggatctctctaatagatagttagagaatatgaactaaagtatacttcaaaatctttgggtatctatgaccagcccaataaggttaatcattaaagctttcagaatccgcattcccaaacagccagcagcttttctcaagtcaattgcaggtgctgattttccttctgtggtatttctacacaagatggtagattgcrtttttttaacttttaatttttgtgggtacatagataaatatatttatggagtac

SEQ ID NO: 15238 - DNA, 464 bp, Homo sapiens
gcactgcacccactgtcctgcacctactttttgacactccccagtgagatgagcccggtaccttagttggaaatgcagaaatcacccatcttctgcgttgctcacgatgggagctgtagactggagctgttcctattcggccatcttggctccaccccaggcacattactgttaatgtacccatcacagttgctatgttactcagttgtcaccattgtttaacctgcattcatttgcatgtacatgggtgtgtgcatgtgtgcctaattctatgcaattttatcccctatataaatttgtataaccaccattacaatcaagawacagctgttcaatcattgcaaaagaaatctttcatgctatctgcctgtatttgtaccccctacctaacctgtctccttgtcacttggcaactgctaatctgttctcaatctctaattgcttttacttcaaacacgttattt

SEQ ID NO: 15239 - DNA, 1129 bp, Homo sapiens
gggtagagctctcatggctcaattgcttcccgaaggccccaccttccaacaccaacacaatggcaaccacatttcaacatgaattttggaagggacaaacatcaawgtatagcattatggagaagaatttctcaaaatatttagctgaccactggtgtctgtcccagataagcaactgcttgatctgcatctgtccttagatatacttgtctttccatggatttggagttacttggttggcctgtgatcttacttcattgatggattcaagaatagttgtgaatttgatgattgcccagctttgctgttgttgctgctggtggtggtggtattgttgaacatctgagaatgttctatttttctatattgtatatgaaaacgggagtcttgtgttggtaattggtgtgcttgtaggtgtgtcattaattttttaaattgtaatcaccagtcacattcccaagtcaaatgcagtgcattccataactgcatttacagttaattatggccattagtgagtgtcatttatacagtggcataaggataacgtccagctccctatcattagataacacgtggctatttgttgttgttttgtttttagtaaatagaaacatatttatctataggttttcacaaacttattggaaacatttaaatgcatagttttatatttactatagggtttcaatttcttcaataaaatattcctactacagagattttagttacttaatttttataaatgaagtggtgttactgtatgatttttaaacattaatattattttaaatggagatattaatgcaacatgtgcaaaaattgggctgtaatatttaatcttagcaatacattttgaagaagccatactggtattccttcatggttatggtaaccagagaattgcttccctgctatttggtacaactgtgagatagcattgcaatgcttgtctgcatgcgtttgcagattcagacctactttttaatggctagtatacatacactcatgtagaaactaaccaaaaaaaaaacacgttctctcttaaaattttaattaactctgccttaacttttaaatttttacagcctgcttttacaatatgacttctttatgtaattaatctaaaata

SEQ ID NO: 15240 - DNA, 575 bp, Homo sapiens
ccagggccaagaacagtatctggcacatgaatgctgttcataaaaaaggagcaatttggacacagacacacacatggagaatgtcatgtgaagggtggagttatgctgctacaagccgttaccttgatttggacaaggtaatgaattaaaaagtcatagaattccagggtgcaagagcccttaggaatttcttagcttaagagcctacatgrtataaaaatccttcagaatgtccctggagcctgccaaacatggctcagtgctgatgacggagatgtcaaaataacctgagccaatgattgggaagagtttcctcatgctcagccaaaaatctgcatccttatactttggaaggagttttaacgtcccccttaaatctgttctctttttaagctaaacaattcctactctattaactcaaggacatggtctagagtgtctttaccaatctggtaatagtaataatagccaacatttagtaagcgatgactgtgtaccagattttgttctctaaacgctttatgtgcattgatttatttaatccttataacaactccacaaagttagtactacta

SEQ ID NO: 15241 - DNA, 631 bp, Homo sapiens
tggcctccacataacaaaacgtgtgctggtattgtaggtgcaaaagaatgttcacttccaagcatattatcaaaggactcctaaaattcaggcaccttgctaggaaacgattccacggtaacattaaatagttcctactgtgaatgagcttgggcgtgactgacaggtgcaatgtattatgctctagcagaagttaggactataatgcgaacacatacaaatgagatttgcctcaccttatattgatgaggcagtgataaggaagtaaatgccttgggaagaaacgagatagagagaacttatagatgaaaaaaggattgaatttgagacacatataacaaataggagttagctacttaagattctggcatgtcggacacagtatactagttccaaattagtggctagaggaatagcgactagtttagggaactgagattgattcagtgggcctggartatagagtgttatgggaggtcaagagatggagaggagaggtgagtaggagaggggccagatcataaaggtgctcatcaaacgaaaacatggattctattttcagggcaattgagagatattgtaggatttagctgtttccacaggcctgggagagcagttacaatgtcaaaag

SEQ ID NO: 15242 - DNA, 546 bp, Homo sapiens
gcgtctctggggcttctctagtattgctggctgcgtatagggagaatctgattcagagagatcattgtgttagtttaagggagagaatttccctttattcatcaacataataaatcctgaaagtcatcagacctggttaaatccaaggcaaacacagtctcttatgaatcaggaataagatctgtatatttctctggctggagttcataacagagcagagatcaggatatgtgagttgcaggacaatagacrtcagctgccacctgcacagtggtgggtggctggggacatgcccatctttagagggactcatctattcccagaaagcaggatgggtcttggcaaaccacagagggcaattgttgcctgggcagagtctacccagagtgatgagtatcatggaaaggaggaagggaggcagagtgtcctagggaaggtaagagggaatctgagtggtctgtggtgatgtgtccatacataggactcttcctgaccaaaggcaaagggtagatctcatctaatgggcagagctgcaaatactgtcaa

SEQ ID NO: 15243 - DNA, 546 bp, Homo sapiens
gcgtctctggggcttctctagtattgctggctgcgtatagggagaatctgattcagagagatcattgtgttagtttaagggagagaatttccctttattcatcaacataataaatcctgaaagtcatcagacctggttaaatccaaggcaaacacagtctcttatgaatcaggaataagatctgtatatttctctggctggagttcataacagagcagagatcaggatatgtgagttgcaggacaatagacgtcagctgccacctgcacagtggtgggtggctggggacatgcccatctttagagggactcatctattcccagaaagcaggatgggkcttggcaaaccacagagggcaattgttgcctgggcagagtctacccagagtgatgagtatcatggaaaggaggaagggaggcagagtgtcctagggaaggtaagagggaatctgagtggtctgtggtgatgtgtccatacataggactcttcctgaccaaaggcaaagggtagatctcatctaatgggcagagctgcaaatactgtcaa

SEQ ID NO: 15244 - DNA, 506 bp, Homo sapiens
tttggtggctcagttggaggctgccatgtggggttccccaatatggccccttggtgcctcaaagtcaataaggaagtaaaagactctagcaagacatgcactccaatcttacataagataaccatggaatcacatatatctggccaactctgctgtattctctaggttaaaggtccgctgacattcaaagagggggaagcatacaagggagtgaacttcaggagtcagggatcacggggaccattttaagtctgcccattatagtaaacgctgatcttaaactgtcacccaaaattccatgggaaaatgcacgatggttttctatgaaattggtgcataaatayaggtataacataaggaagagatgaacatcagctccattttaggagagaagaaaacaaattcctgaaactgagattatctgaattaccaataaataaaaaacaaacagaactcaaaacagaaaacatcacaacacatgtacctgatgtaattctgtccaacag

SEQ ID NO: 15245 - DNA, 592 bp, Homo sapiens
tgagagtcacgcaaaaggggaaaccctttataaaaccatcagatctcgtgagacttattcattaccatgagaacagtatgggggaaactgccctcatgattcagttatctccmacaaggtccctcccacaacacgtgggaattatgagagctacaattcaagacgagatttggatggggacacagccaaaccatatcaagagagataaacaatagagatggtgggggtgggagggttggagaaagatgccatagcatggagaaataaaccaactctccctccccagcagcagccaaggagccatgaaccccagggacctaggatgtcctcaggaatgttggcctgagaaggaaagctgggatgaagaagaattaccactaccttactcccaaggtctgtgggtacaaaaatggtattttccagatatggactttgtgtaacagaaagttggcccagggaagtaatggacctcagcagaaagctggaatgaacttcagatttcctaaggggttgccaagccagtggtggcctcatgatcaagtgcaatcagccaggtcaggggactgtaggagagcttccccagccatcctgg

SEQ ID NO: 15246 - DNA, 836 bp, Homo sapiens
ttactcctacatcaatcaaatctgtaaagcccagtggctgaggttaaagcccatgcttttcttcctactccgcactgcctcgaaacccttggaagtactcttctcctatttccctaatctttcaaattattcaaattcccatttgttctccaattaaaggtcccctcctccctcttcatccaagagtcctttggtgagagcttcggtagtggcttgatcacattctgaatttgagatttgcttgtaattagcagtcttgaaaacaccagttctttgctaggctctgctcccaggaacccaggagtcaggacatctgaggaagggctacatgcatcactgatctctcccttaaccacccctttcataggtatctggaataagctcaaatttcattgattttcctatggtgataaattgacagcccgccttttttttccacagaaattaatgccagtaaaatgactactacagcccactccctgctttgaatacaccattaaaataaaccatgtctgtgtgcaaacatgtgtgcacccaatgagatgtgcttttcaaagacactgtcatgcaatgtacacaacactgtgcagacatttcaattttcctcctggctgtctygccatctaaagacgaaatgctcgatgtggcctggcatccaatggcagctggaggaaaagaacttgcgacttcgtgtttctcctctggagctctgggcttgctctcatttgcactggtgaattgtaatgtcagcaacctatggatagaccgcaggacactgggctgcagcatgaagagctatccaaggagattttattttattttattttattttattt

SEQ ID NO: 15247 - DNA, 836 bp, Homo sapiens
ttactcctacatcaatcaaatctgtaaagcccagtggctgaggttaaagcccatgcttttcttcctactccgcactgcctcgaaacccttggaagtactcttctcctatttccctaatctttcaaattattcaaattcccatttgttctccaattaaaggtcccctcctccctcttcatccaagagtcctttggtgagagcttcggtagtggcttgatcacattctgaatttgagatttgcttgtaattagcagtcttgaaaacaccagttctttgctaggctctgctcccaggaacccaggagtcaggacatctgaggaagggctacatgcatcactgatctctcccttaaccacccctttcataggtatctggaataagctcaaatttcattgattttcctatggtgataaattgacagcccgccttttttttccacagaaattaatgccagtaaaatgactactacagcccactccctgctttgaatacaccattaaaataaaccatgtctgtgtgcaaacatgtgtgcacccaatgagatgtgcttttcaaagacactgtcatgcaatgtacacaacactgtgcagacatttcaattttcctcctggctgtctcgccatctaaagacgaaatgctcgatgtggcctggcatccaatggcagctggaggaaaagaacttgcgacttygtgtttctcctctggagctctgggcttgctctcatttgcactggtgaattgtaatgtcagcaacctatggatagaccgcaggacactgggctgcagcatgaagagctatccaaggagattttattttattttattttattttattt

SEQ ID NO: 15248 - DNA, 836 bp, Homo sapiens
ttactcctacatcaatcaaatctgtaaagcccagtggctgaggttaaagcccatgcttttcttcctactccgcactgcctcgaaacccttggaagtactcttctcctatttccctaatctttcaaattattcaaattcccatttgttctccaattaaaggtcccctcctccctcttcatccaagagtcctttggtgagagcttcggtagtggcttgatcacattctgaatttgagatttgcttgtaattagcagtcttgaaaacaccagttctttgctaggctctgctcccaggaacccaggagtcaggacatctgaggaagggctacatgcatcactgatctctcccttaaccacccctttcataggtatctggaataagctcaaatttcattgattttcctatggtgataaattgacagcccgccttttttttccacagaaattaatgccagtaaaatgactactacagcccactccctgctttgaatacaccattaaaataaaccatgtctgtgtgcaaacatgtgtgcacccaatgagatgtgcttttcaaagacactgtcatgcaatgtacacaacactgtgcagacatttcaattttcctcctggctgtctcgccatctaaagacgaaatgctcgatgtggcctggcatccaatggcagctggaggaaaagaacttgcgacttcgtgtttctcctctggagctctgggcttgctctcatttgcactggtgaattgtaatgtcagcaacctatggatagaccrcaggacactgggctgcagcatgaagagctatccaaggagattttattttattttattttattttattt

SEQ ID NO: 15249 - DNA, 684 bp, Homo sapiens
gaccagagactggatgatggagggctgtttctgtaatatttatccctgcaaagtaaatatttctgtctccaccatgttccagaatttccctgctgacagcttcacagatacttctttttctcctctcttgaacatccagctattgccggggacaggatgaccgggtgcaactggttcttttcacttttgactgtggacttcttgcagccaaagaaagaaaggctggccagtgatccacactgggtgaggattggaggccagggctgtggaagggaagtgtagtttgcatcctaagtggtgatcccaggggacaaccgacccactagagagcaaaactgaggctttccatgcaatgttttggaccaatgtatatggttccctgaagtcatcttgcagatttatttctgtaatgttctcacatttattcccttctctcttttcccatcagcactgtccagagaggttgagtgatttgccccaggtcacacaactagtaagtggctgaacagggcattaattctaggctttctgcctccctggtttstgagcttaaccattgcactgtagctctaagactcttggtgagccaggcccccctttgtccccagccttggccctcagacatctcactatggccctttaacctccagccctggagcttaattcagtccctctgatagacca

SEQ ID NO: 15250 - DNA, 527 bp, Homo sapiens
ggagcagggagaggggagggagtgtgccgtctcttctgcaagggcagtgccccagcctcagccacacttctgatctgcagtccaacagacctttctagcatgccaaagagaacctgggggtgccagggggtcctcagagctcacactgcacttgtggcacccacagcgagtagccatccgtgagccgaggaaactgtacacaggtaagacggtcactgtgctttgtttgaagtaaggtagtttcctagcttcaggkaattctttttcagtctgacctgcttttatgctgctttgtctttttaacttttatcctattgtacctgggaagctattgtagtgctgatgagttattgtctgctgaagttatgtagtgatcagagctaacatgtgctgggcatgccagaccctcttctaggtgatgtatatgtatttattcatttaacctcagacaatgctctgaggttaatataattattactatcagccctcatttgcagatgaggaaatggaagcacacagaaagatta

SEQ ID NO: 15251 - DNA, 527 bp, Homo sapiens
ggagcagggagaggggagggagtgtgccgtctcttctgcaagggcagtgccccagcctcagccacacttctgatctgcagtccaacagacctttctagcatgccaaagagaacctgggggtgccagggggtcctcagagctcacactgcacttgtggcacccacagcgagtagccatccgtgagccgaggaaactgtacacaggtaagacggtcactgtgctttgtttgaagtaaggtagtttcctagcttcagggaattctttttcagtctgacctgcttttatgctgctttgtctttttaacttttatcctattgtacctgggaagctattgtagtgctgatgagttattgtctgctgaagttatgtagtgatcagagctaacatgtgctgggcatgccagaccctcttctaggtgatgtatatgtatttattcatttaacctcagacaatgctctgaggttaatataattattaytatcagccctcatttgcagatgaggaaatggaagcacacagaaagatta

SEQ ID NO: 15252 - DNA, 526 bp, Homo sapiens
ccaaactgaattgcatccgtgtcttagtttggatcctccaacacagactgtgaagtaagtatttcagtacaagtagtttatttgggaagtgattccaggaagcactgtgagggagtggggagtgagacagcgaggagaaagccaataaaaggtgtgctaatgggtgggttactataatgggcagctgggctcaatcccacaggggccctctgaaggactatgttggacctacctcagaattgtcccatggaggaacaaagaagctggggtgtttatgcaccaactcatctgcctcattgggtgtggttttctcctgggatatgagaaccccagcacttctggcctgccctgtttgatgcacaagaatctctcagagacaggatgtccctaggtgagggacatgcctactgtctgtgaatgacctccaggctaagccaagggaacatgacaggktgtcaacagcatctgctaaagcaaccaactgctctaacattgtgtgcactggataaaattataacagttgcca

SEQ ID NO: 15253 - DNA, 537 bp, Homo sapiens
atccatgttctgattggccagggggtggggttaaccagccaagtccgaagggaccccgagtggagggcggttccctggggaaatcaggctcaaagggccctgggagccccaccctctagaagctgagcccaggaaccccaaagtgctccaggcatccattccacagagtcatgactcggacaggggtgagcctgagcccctggaagattctagaaccttccagaacytcatccatcttatctcccaggtcagcagaaaaactatgaatgtgcacaaggtctagggtgaggggaagtctgttaacactgctgagtgttaacagaaaaaaaaaatcctgtaaaatatttaaagaggtttattctgagcatatttgagtgaccataacccagggaacagccttaagcggtcctgagaaagtgtgcccaaggaggtctggttacagcttggttttatacattttagggaaacaggaattgcaggtaaaatcataaatcaatgcatggaaggtttacactggttcagcaggaagaggctgga

SEQ ID NO: 15254 - DNA, 537 bp, Homo sapiens
atccatgttctgattggccagggggtggggttaaccagccaagtccgaagggaccccgagtggagggcggttccctggggaaatcaggctcaaagggccctgggagccccaccctctagaagctgagcccaggaaccccaaagtgctccaggcatccattccacagagtcatgactcggacaggggtgagcctgagcccctggaagattctagaaccttccagaacctcatccatcttatctcccaggtcagcagaaaaaytatgaatgtgcacaaggtctagggtgaggggaagtctgttaacactgctgagtgttaacagaaaaaaaaaatcctgtaaaatatttaaagaggtttattctgagcatatttgagtgaccataacccagggaacagccttaagcggtcctgagaaagtgtgcccaaggaggtctggttacagcttggttttatacattttagggaaacaggaattgcaggtaaaatcataaatcaatgcatggaaggtttacactggttcagcaggaagaggctgga

SEQ ID NO: 15255 - DNA, 527 bp, Homo sapiens
ggagaaggttcaagggtgaaggatgaaaggagataaaagctgatcaggaaacagaaaatggattggtggatgaggaaaaggagagcagtgaaactgggtaaggcaaacccaggatggcccaccctgagggtgactcaccttccaggtggggcaaaggtctcaatctcagcttctgctctctcaggacgcccctcctgaggcgtgggttgatggagtgtgtccaggacacaaggttgggaaatagtgttcagtagagttatggccacagtggttaggaagaagagagaaggcatggaaactccagggactgcttattcagctgttggaaaggcagttttcaaccccagcttggccacataagaaagggccttggcagcgggcrtggtggcgggcacctgtagtcctagctactccggaggctgaggcaggagaatggcgtgaacccaggaggtggagtttgcagtgagccgagatcacgccactgcactccagactgggcgacagagcgagactccgtctcaaaaaaa

SEQ ID NO: 15256 - DNA, 562 bp, Homo sapiens
aattagtgatgtttatttaggagtagttttctggtaagaggttgaatggggaaatgttaaactcctacttcctagatacagctacagggagaggaggaagagtcatgttattttgatatgattgtaaattaacataacccccctggaactccttttcctacacacgcacttccttccttcaggatcacaccaacctaaaggtaaagccagagcaatagtaatgtttatagaccatctttctcataaatgccactgctcactattgtacatatgtctttttcaagtatttttggaagacctccctcctctgctaccatatttccctaatgtctgtgaaactaagtacccgtcaagcgtggtggctcacrcctgtaatcccagcactttgggaggccaaggcaggtggatcacctgaagtcaggagtttgagaccagcctgaccaacatggtgaaaccctgtctctactaaatacaaaaagttagctgggtgtggtggtgcatgcctgtaatcccagctacttgggaggctgaggcaagagaattgcttcaacctgggaggtgg

SEQ ID NO: 15257 - DNA, 1056 bp, Homo sapiens
agctatggggtgttccaatgcctccagcttcatattgtgtcccttttctctttactctttgccttctgatattcaggaattgcttcaaaaatgagcctatatctctctggcatttcaggcactttcacacatgctgttccatctgtctggaaggcattctattctctatgtggctacttccaactgactgttgctcagaatctagcttaaatatcagttcattcatgtatacattcactcattcatttattcctccatttacgtatgccatctgtatttattgaacccgtgataaattcacgcactgtgctaaaccttgagtatgtgaacaaaagaaatgcagctctcacttccttggagcttaaaacaacagaaaatacaaacaatgaataattacataaattcacatgtaacacatgtatgataatgggtttgaagggacacaatggaatgctatgagagaaaaaaataaagatctaatttagatgagcctgagatgaggtgggagaggaggctaaggaggtctctaaaaagtagctgttagagtgagatctgaaaattagactagagaaatgatagtgggaagagtgttctaggtataggaaacagcacaaagactccatcgtccttctaaattcactctcatattttatgttcttatagcattttattctcctttgtaatattagtcacagtaaycattaaatagttatttggaaaacacttgcctctcccactagactgttactctcataaggccagtagtaatagtatatgcctttctctgccctttcctaagcaccaagcacagtgagagtctaacccatggtggatgcttacaaaggtctgctgatgaaatacagacagtattaatggactgggaggtcagcaagggaagcactgcattacaacttttaatcaatactaaagctctgcttaaatatgtgcaatgaaattaggtgcactttgcccatttaaaaaatttaaacttaagtatgcatgttagaggacatggtgggcataatactgaaaggaaaagatcaaaaggtagaaata

SEQ ID NO: 15258 - DNA, 1263 bp, Homo sapiens
aaagaaggatggaagagaaggtggggggaaggaggaagtgctggtttcttagtatgcctttaacatgttagtttgcttttcggctaccatgctggatatattagtctgttcttgcactgttataaagaaataccttagacagggtaatttataaagaaatgagggttaattagcttaagattctgcaggctgttcgggaagcattatyttggccatttgctcagcctctggagagacttcaggaaacttacaaccatggcagaaggcaaatgggaagcagatttgtctttcatggccagaacagaaggaagagaaagatgggggaggtgccacacacttataaacaaccagctcgcctgagaatactatcacaggaacagcaccaaagggatggcgctaacccattcacgaaggagccacccccacgatccaatcacctcctatcaggccacacctccaacactggggattataattcaacatgagatttgggtggggacacagatccaaatcatatcattgaattgctaataataagctctgaagaattgttctctaagtatacttgaaaatatataaacattttataggcacagttttctatcttctgcaaagataatctcaccaaataattcctttattagcttattttccccttctttaactatagagtcatagttagaataagggaataactagaaaatgtatcattttggccctctgaaattttgtccacctggttgcaactaagcttgtatgtatttgtgatgctccaggggtcatatggacgtatattaaacattggaaattgtagagatgtatgtttgttttcatttaccccctgatgcttatgtttatgtcctatttctgcccctaattaagagtgtgtttcctttattaagaaaataatgggaaagcttaggctcatatagaattactaatggatgatattgaatctccagcttaactagataaatctatgttttaaaccctactcttatcttggactttataatcatttaactgcactcacttttctcagcctttttctaatctaccttgggttatcatttactcattatcattatgttagttaacacaattgaagaaatgtcatgaaagctgtaatattttccaataaataaagtgtaagtagaccttttgatatgagttattttggtcctcataaattatgcctcttgaaagataatatttcaaccaaaaatggatatttttctgtcagtgaaataaaaaaagagaaga

SEQ ID NO: 15259 - DNA, 1544 bp, Homo sapiens
ggccaggagagaatagaaatgaggatagcaggctgggtataagtaataaggaggagtggtgactgtggcaaagtgcgaagcttgccctaacagcagcagccactacagagctccaacaggtgttgacatgcgtgaacgcagacctagggctgccagatattcagaatcttccaaaagaggccagaaatactgatgttcatataaaatctcttgaatttttaactgtcaataactaacttaaatagttttattttttattttctggcaatagtcaaataacagctgcctttaagcttactttggtttatgggctccttgtttgccacttctgccctatactcacatgcagggattccttaaaaggatgatttttatttgcaagaataattttctctatttgccatatgtcacattttcaagttaggcctcttcatagaacaagtaaaaagaatgaaaggaaggaaggaagaaagaaaaatgcaaaatagtgaagctaagtgtgaacatgttggtaagcattaaccagtggggggcctgcaatctacaagaacattatactaagacctaaatgttcttgaggagcaaaatcttagaaggttttacttttattctcaatataatgattgaggagacgttctgagtcaccacaaaaggaaatcagcccaaaagccttgttatacatatggctctccctttacggaaattacattaaaaacgataagagagaactggccaaatctgaccaagatggaatcgccatgagctaccaaactgcaaataggatccaagtgtgtgtgcgttgtgcttgttgctaatttccctttacctatcccattccttccaactctcatttgccatctttggctgttaaatggaagtctgtcattctaaggaatatgagtgaaggaggaaatgggaagctaagtgtaaggaagtttttacttgacttataggaatttacacatcatcaaaggtatactctgcagctgggtgagcctgagtgaccggaaggaaggggagagtctattcaactaatcatttgcatcacatgcacccaaggaaaaaatgtttacctggtggagccacggttaaccttttttccttgctgagccggtgcccttggatgaattcactcatggaaggggggcccttcagaagaaatgattctgtggaggtgggatcagggggaactcttaataaattctgtaggtaggaagcccctgaagtcctgggacggctctgatcacaaagggaaggtgaaaattgtcttgcaggagatccaagaaaaatacatataggaaacaaaaaagttttactttaattaccttttaacgcctcaccagtgacaacattatttataytggcatttaattttttaaatatgtaaatcaatctttttgctttttttttttttagtttccacatcaggatacaaccctatttggaaactgttctggatactggaaaaaagatttattacagttagtcagcttgaaccgcaaatagaaaatatattatttgagtctttaatgaaagctcctaaa

SEQ ID NO: 15260 - DNA, 538 bp, Homo sapiens
gacttttgttttctacagatcagtggtctttatcttttcaaagataagtttaaartcatttgtatttattatacaaactgatacgctacttattcctgccatctgtttcttctgcttttacacttccatgctgttttgtttctttacttcccttctcttttttcttccattttttcacttcttaattgtcttctgcattctttatcttatttatggctcatttgtatttttcctgttttgttattttattgtcataggaactgatcttttatatatatatacatatataaaataaagtctccaaaagaacccaacaggtcactgctcaaagagtagaaggagatgaagatatgagcatgtattctggtccacttgtaaagtctaaatggctcattaccagggaattctaagggtgacattgtgattatgtcatagggcagtcttccttagccaaccaagctatcgcttcacactagccttgctgcatttaggataaaaacttttctttggtgacagcaactttgttctgattaagaag

SEQ ID NO: 15261 - DNA, 538 bp, Homo sapiens
gacttttgttttctacagatcagtggtctttatcttttcaaagataagtttaaagtcatttgtatttattatacaaactgataygctacttattcctgccatctgtttcttctgcttttacacttccatgctgttttgtttctttacttcccttctcttttttcttccattttttcacttcttaattgtcttctgcattctttatcttatttatggctcatttgtatttttcctgttttgttattttattgtcataggaactgatcttttatatatatatacatatataaaataaagtctccaaaagaacccaacaggtcactgctcaaagagtagaaggagatgaagatatgagcatgtattctggtccacttgtaaagtctaaatggctcattaccagggaattctaagggtgacattgtgattatgtcatagggcagtcttccttagccaaccaagctatcgcttcacactagccttgctgcatttaggataaaaacttttctttggtgacagcaactttgttctgattaagaag

SEQ ID NO: 15262 - DNA, 559 bp, Homo sapiens
gctggcctttgctaaaggctcagacagtccatccttagttgcaggagaaatgcagtgagtatggtgcacagattcagatagatgagtacgtgtaaccaagttttcttctaattgcttctgctatctcagagcatataaggaatacagagaataagaaacagacaaagatgtcctcaacctaattgattccaacaggtgatgaagtaagaagcctctagtctcttgacattatacrtaagttcatcctgagattagaaatgaaacgagtctcaaggccctacaaagcctcatgagcactaacttgatcagcccaacacattttcccattggttatagctgactgtgattggcctgtggcaccactaaaaatgcccctttcttacaggcattgccatcttcttcaacctggttcaagcaaagaaaaggaaatgccactcagaatgacctctgcatatctcttcactcaagctcctccatgggaaagaagataagaacttgtctggtttttgacgtactgaccatgctaaaaatagaatggcctcaatgaagcttgttcaac

SEQ ID NO: 15263 - DNA, 699 bp, Homo sapiens
ggattagtgaagagtcaagggtttccctgaaggaccagaggatcatgtatcatttcacggcacatggcaccttccattctgcatgcttttcatgcatgggagttactttttcygctaggtgccatcctctctaatacctcttagcttgtgcccaagctcctttgacctgtgtgcccttctgccttcactgctaacaggccctcattctcagggctgttttaggcctttagaatttttttcttttttctttctatctttttttttttttgagatgagtctcgctctgtagccaggctggagtgcagtggcgcgatctcggctcactgcagtctccgccttctgggttcaagtgattctcctgcctcagcctctcgagtagctgggactacaggtgtgcgccaccatgctcagctaatttttgtatttttagtagagacggggtttcaccatgttggccaggatggtcttgatctcttgacctcatgatccgcccgcctctgcctcccatgtgctgggattacaggcgtgagccaccgcacccggccagcctttagaatttctaaacactgaaaagattaaagcttccacagcaacttgtaattcaaataaaaactacactaacccacaatacagaatgcctaaatatataccaagtagtatatattgatatagctttgttgtggcttttttatttcaaaa

SEQ ID NO: 15264 - DNA, 517 bp, Homo sapiens
accatgacatttggggcagattgtttagcttctcttgtttttctcacccataaacaggaggtgataatagcacctaactcacagatttgtaactggcaactaactgagacattgctggtacagggcttagtgtggtgccttctatgtagcaagtgctttttaagttatagctaatacttttgtggcatgtttttgtttttaataatcagctcattggttatgtaactaaatgatcactccccaaacatgctagaaattataaatataataattattgcaatctaatccttgcttctaaataaattttatttttctactttttataataatattaaacatatattaaactatatgatagttaattgtaggagaagtcacaacatacttcttgcaggatgatgattacttattagtacaactgaagcagctgtactttctgggrtcgcctatcttcacctatattcatacaattgtgaacattgtagggaagggataatttactcctttgactcaaaaa

SEQ ID NO: 15265 - DNA, 517 bp, Homo sapiens
accatgacatttggggcagattgtttagcttctcttgtttttctcacccataaacaggaggtgataatagcacctaactcacagatttgtaactggcaactaactgagacattgctggtacagggcttagtgtggtgccttctatgtagcaagtgctttttaagttatagctaatacttttgtggcatgtttttgtttttaataatcagctcattggttatgtaactaaatgatcactccccaaacatgctagaaattataaatataataattattgcaatctaatccttgcttctaaataaattttatttttctactttttataataatattaaacatatattaaactatatgatagttaattgtaggagaagtcacaacatacttcttgcaggatgatgattacttattagtacaactgaagcagctgtactttctggggtcrcctatcttcacctatattcatacaattgtgaacattgtagggaagggataatttactcctttgactcaaaaa

SEQ ID NO: 15266 - DNA, 576 bp, Homo sapiens
tttgcagctgcaacatttaccccaagataamtttgccatgaaatatctcacttttattgttatattcacattggtctagtatagcccactttggaaatgaaagacatcatactatttacagcattctgcttttagtagtggtatttccatttacaaaatacagtcattcctgattcctgaaaatgtgaaatcctataaactgtagcattcctatgtgtgatgttaacattgttttcaaacaattgttggccaaagattcatttgatgaatcctatttttttccgaaatagatgattctgatgattcagacgattctgatgttagttctgtttagaaataactccaagaatagcttttacattttattttcacattgaaagtcagtcagatttgcttcagcctcaaagatcatgtttatgtaaaattaaatgaactctggcagtgagctgcactttttttttctaagtgggaaaagcattaaagatgtcatcccattatcatgagttttaagaaatatatttttgttctttgaatataccaaattcttaatttcccatgaactttaccttctaattc

SEQ ID NO: 15267 - DNA, 541 bp, Homo sapiens
ccctgatttcacactgtggcaacatgaaactgttgcctccagaactgttagaaaattaatttctgttatttaaaccacctagtccacgggattctgttatggcagctctagctgactaagataattactattaacttttaagagagagctggtctagagagttttggttatatgaacatggatagcaatggttttattgagtgaataagaaaagtagcatctgaaagccagtccactaatagttttagctacagaaaattgttaatagtaaataatatgcctcctgattttgagtcagtattgaataaaaacgtaaaacttgtgactttaaaaattacagctacaaaatatacatccttttgagatgatgtcccaagaaagagcaagtagacacattctgtattttcacactaaaaacactgaccagtgatgacttccaatacttcaaaacaattctttttaaattgaaaatatttacartaaatatcttcgtaaaatatcagtatagctaattctataatttcaagtgaatttcctcaat

SEQ ID NO: 15268 - DNA, 554 bp, Homo sapiens
cctgtcagttgcagcccaaacactccagagctcggataccaaggagcagcttctgtggggcagaacggctgcacacagtcaggaaacctggctcagcctggcccaagccttctcccacagcggggtacacagcctggacggcagggaaatagaccgtcaggcactacgggaactgacacaggtrgtgtctggcactgcatcatactctggcccaaagccttctactcagcatggagctccaggccactttgcagcccctggtgagggaggtgacccgtgggcagccctgctgctgcccacctgagctgctcattcccagcacatggccagtgaggacatagcgagtgacgaggagcacacggtcatccatgaggaggagggggtgatgatgtcattgctgatgatggctttagcaccactgacaccgatctcaagttcaaggagtgggtgaccgactgagagtggggacaactctggggaggagccagagggcaacaagggctttggtgggaaggtatttgcacctgtcattccttcctcctttactcctgccg

SEQ ID NO: 15269 - DNA, 554 bp, Homo sapiens
cctgtcagttgcagcccaaacactccagagctcggataccaaggagcagcttctgtggggcagaacggctgcacacagtcaggaaacctggctcagcctggcccaagccttctcccacagcggggtacacagcctggacggcagggaaatagaccgtcaggcactacgggaactgacacaggtggtgtctggcactgcatcatactctggcccaaagccttctactcagyatggagctccaggccactttgcagcccctggtgagggaggtgacccgtgggcagccctgctgctgcccacctgagctgctcattcccagcacatggccagtgaggacatagcgagtgacgaggagcacacggtcatccatgaggaggagggggtgatgatgtcattgctgatgatggctttagcaccactgacaccgatctcaagttcaaggagtgggtgaccgactgagagtggggacaactctggggaggagccagagggcaacaagggctttggtgggaaggtatttgcacctgtcattccttcctcctttactcctgccg

SEQ ID NO: 15270 - DNA, 554 bp, Homo sapiens
cctgtcagttgcagcccaaacactccagagctcggataccaaggagcagcttctgtggggcagaacggctgcacacagtcaggaaacctggctcagcctggcccaagccttctcccacagcggggtacacagcctggacggcagggaaatagaccgtcaggcactacgggaactgacacaggtggtgtctggcactgcatcatactctggcccaaagccttctactcagcatggagctccaggccactttgcagcccctggtgagggaggtgaccmgtgggcagccctgctgctgcccacctgagctgctcattcccagcacatggccagtgaggacatagcgagtgacgaggagcacacggtcatccatgaggaggagggggtgatgatgtcattgctgatgatggctttagcaccactgacaccgatctcaagttcaaggagtgggtgaccgactgagagtggggacaactctggggaggagccagagggcaacaagggctttggtgggaaggtatttgcacctgtcattccttcctcctttactcctgccg

SEQ ID NO: 15271 - DNA, 525 bp, Homo sapiens
gaaacagagagcaaaacaagctctgcatctgagtaacagaaaaagaagaaagaagcagcacatgagtctaggtgcatgtgcacaaggaagagagggggactgagcccgggaatcaggagaagagagctgttgtgtgagaacgtgatgagcatatgtgctattgtgtgtgtgtgtgtgtgtgtgtgtgtgtcacacacgtgcacaggcactggaagcacactcatatctgtcggcaaacctgacccattggctcttacccaaacatagcatcacatttagctattctgaaccatcgagactgytgacgctgatacggagaatccaggatcaactctaccaaaaccacacgagaaaatgaggctctctctcattttctaactcatcaacgccaagtatcttctatttaagggctggagatttaggggaaccagggccaggccctggctacctgccccatgcccatgctggatggggactggcccagtcaagccccaggcaggcaggttcctctctctcttctaattt

SEQ ID NO: 15272 - DNA, 525 bp, Homo sapiens
gaaacagagagcaaaacaagctctgcatctgagtaacagaaaaagaagaaagaagcagcacatgagtctaggtgcatgtgcacaaggaagagagggggactgagcccgggaatcaggagaagagagctgttgtgtgagaacgtgatgagcatatgtgctattgtgtgtgtgtgtgtgtgtgtgtgtgtgtcacacacgtgcacaggcactggaagcacactcatatctgtcggcaaacctgacccattggctcttacccaaacatagcatcacatttagctattctgaaccatcgagactgttgacgctgatacggagaatccaggatcaactctaccaaaaccacacgagaaaatgaggctctctctcattttctaactcatcaamgccaagtatcttctatttaagggctggagatttaggggaaccagggccaggccctggctacctgccccatgcccatgctggatggggactggcccagtcaagccccaggcaggcaggttcctctctctcttctaattt

SEQ ID NO: 15273 - DNA, 539 bp, Homo sapiens
caggatgtgaattcaagcagcctgattccatggcccatacttttagttattataccacatggctaagatgtggctgcaggtagattttagccaacctggaaaaacctgctttcattctatggaaccacttagaaaatacacaaggcaacgtgaaattcagaggtcattgttgtcacttcttaaaagtgcaatttgaattgagagagcacagagctcaaagtatggccccccctgagttgatttgtaggaggagtgagtaaagaaggccggatctagaggaggggctgtctcaggtgcatcccaactgggaagaagcttccataaagaagtggggaaactggaagggccttgctgaggtctccaatcagctttaaagatttgaacctgccatgagaagaagactgaactaattcaatatagctcaggggtcagaattagaggcaaatttgggctccatacaagagaattttttctaatcgtctgaacaatctgcaatgggttttaccrctctagcagctgtgaatccattctgtgaatcg

SEQ ID NO: 15274 - DNA, 517 bp, Homo sapiens
atatttttttttgcagatcagataggtgtaattttgagataatttgaaaaagtgaataattataactttcctgattaaatacagtttgcagatctgtgatcaaagttttcatcccccctccatttaaaaatagttacagaaagaattgtatkgaatattaaagcagtgaagtatctgttgacatactaccttttatttagcacatagtgattcaattcatttttcatttatccatgaaagaatttattaaatggtcagggattggataaccaagaagttttataaaaggtatgctgtcaactaatggaaagtatgtctgcaatccttaagggatgtaatgagagactggaagtatttctgtggacataacagcacctacccattctattataatagcagaggggattatgaacacagttttttgccttagggtgcatttttggaagtaaggagagaaaaaaaattggaaggagagcagatgcaagtgctttcagaggacactaataaagggaaaatg

SEQ ID NO: 15275 - DNA, 545 bp, Homo sapiens
tgcctcggactggtcttgaactcctgagctcaagcaatccacctgccttggcctcccaaagtgctgggattacaggcatgggccatcacacccagctgctctttctttctttctttcaactctaagtgtatgtggttatctccaggagaagatagtgtgttagaaatttctatatacattatgagttgctaatttttttacaatgaatggacagatttttataatcagcaaatgtatcaaaaatacttccatttattttattttaaaaagagcattccttattgatttatttattaaacaagtagtcattgacgccatgccttctgtcagtctccttcctggataatgaagggcaagaagaatatrtgctcagaatccagaaaaaaataaacaattgtaatgttaaataacctggctcaatttgcacacatgctaataaatgatgctttgtgaatgaaacgtaaaatgtaatcaaaactccatggatttctgaggcccttcaccagctcaggtctttatggacataatcttctaaccttgcattg

SEQ ID NO: 15276 - DNA, 434 bp, Homo sapiens
tccacctgactcagcctcccaacgtgctgggattacaggcatgagccactggaccaggtcgaaatctacttctctggatgaaaactgaggcacatggaaggtaaataaattttcagtgtcattctggggcccatgctagatcctcttggcaatgctttaacatctttctattcttcttactctttcctgtttttggattttccctctgtcatgcagtcctcatttgccacagccattaaytggttaccctctctgaaggttgacatttcacgtttcccataacgacaggatgaaaccacctcattggatctcagaatgtgaagctctacgtaaaagtaaaattacacagacgtaatgtgtatactagataatttacttttcataagatatgagagatatgcatagtttgaacaaatcctcagtttcaatgagat

SEQ ID NO: 15277 - DNA, 534 bp, Homo sapiens
ggcttacagtggagttacacctaaccaaggttcttaataacagcaggtgaggcaaaaaccctggagtggaaatgacacttgaaaatcccataaattacatatgaattgtccactcacctgaatagtggacacctgaatagtgcggtacgtgtcagtatcagtgggcaggaaagtcctcatttagttgtccagtcctgtggggtaaacattgttgtccttttcctggtactgaaacttagttcaaaacatttttgtcacatgcccaagatcacacgagaaagtcatacaaaactattatctgcagcgaatacaccaagtgtattcccctctacgtcctcattcggaacatcatctttccaggcctaggcagatagattacaaaaactgaaactgtggaatccttgcattgtaactttttaaaaaattttactttagcttctgggatacaagtgygaaagatgtaggtttgtcccagaggtatacgtggcgcagtctattcccctgggaggagtcacaagcctcaaagaaagtagt

SEQ ID NO: 15278 - DNA, 622 bp, Homo sapiens
gtaagwaaactataagaaataatggtggctatatgattaatgatagccataggcccatgcaaacatctttcagtcagggatgacactacactttacttagtagtctgttgtaatctggcctggtgatttccaggagataagaccatcttatcacagatacaacaatcataaaccttaaaataaagctcatctttacaagaatagtttaaactcccttcatgaaagaaaaacataaccagacttaattacaggtgaaagaaagggaggagaattccccaaattctgagaatggtcactagacagagactctggccagcgagtaacctaacaccctggctgtctggtccacgctaccatcatctccccactatccattttgtaaaagcactgccagaatcaactatttggacatcagcctcagactcatctttgatgataattaaacccaaggagagaagttgccctaggggagttgctttactaaaatcccgagaccactcaacacaacaccttagatcatgtcactgcttactattgattaaaggatgccagacatggtgaagttacattctaacgtacagattttttttttttagtagacatagacataaaatctgtccag

SEQ ID NO: 15279 - DNA, 622 bp, Homo sapiens
gtaagtaaactataagaaataatggtggctatatgattaatgatagccataggcccatgcaaacatctttcagtcagggatgacactacactttacttagtagtctgttgtaatctggcctggtgatttccaggagataagaccatcttatcacagatacaacaatcataaaccttaaaataaagctcatctttacaagaatagtttaaactcccttcatgaaagaaaaacataaccagacttaattacaggtgaaagaaagggaggagaattccccaaattctgagaatggtcactagacagagactctggccagygagtaacctaacaccctggctgtctggtccacgctaccatcatctccccactatccattttgtaaaagcactgccagaatcaactatttggacatcagcctcagactcatctttgatgataattaaacccaaggagagaagttgccctaggggagttgctttactaaaatcccgagaccactcaacacaacaccttagatcatgtcactgcttactattgattaaaggatgccagacatggtgaagttacattctaacgtacagattttttttttttagtagacatagacataaaatctgtccag

SEQ ID NO: 15280 - DNA, 622 bp, Homo sapiens
gtaagtaaactataagaaataatggtggctatatgattaatgatagccataggcccatgcaaacatctttcagtcagggatgacactacactttacttagtagtctgttgtaatctggcctggtgatttccaggagataagaccatcttatcacagatacaacaatcataaaccttaaaataaagctcatctttacaagaatagtttaaactcccttcatgaaagaaaaacataaccagacttaattacaggtgaaagaaagggaggagaattccccaaattctgagaatggtcactagacagagactctggccagcgagtaacctaacaccctggctgtctggtccacgctaccatcatctccccactatccmttttgtaaaagcactgccagaatcaactatttggacatcagcctcagactcatctttgatgataattaaacccaaggagagaagttgccctaggggagttgctttactaaaatcccgagaccactcaacacaacaccttagatcatgtcactgcttactattgattaaaggatgccagacatggtgaagttacattctaacgtacagattttttttttttagtagacatagacataaaatctgtccag

SEQ ID NO: 15281 - DNA, 572 bp, Homo sapiens
gattgcagcgttgcatctaacagaggcgattgtgaacaagctagattgagctgcttrccaaagcacctcctcccttgtgccgcatttgccaaatgcactgggcttttcacttgagtttgtcaagctcctccctcttccaaaagagtctcatgggctcctgtacatcattcatatgtcaccttaaatgaggctactctgtgtttttctatttcataagtttatcatcactagttatatgtatgtgtggtcaatttatttatatcttatttgtatttatacgttgattctaaaatttccatgagggtagtggccatctttgcttgttcagcagatatcacataatgtatggcacttaataagcaataaatacttactgaataaaatagtggataattgttttccagacttttccttatataattatttgtctgaattttgtaaaatgtttagaacctttgctcccaaaaaatgccacatgttgtgttgccttaagtcacttgactttgtgtacttgctgttttctaggagccacattattaagttctgtttttctttaaatgattcaattactt

SEQ ID NO: 15282 - DNA, 480 bp, Homo sapiens
atcacctaagtagaaatatccagtatgctgctagaaaatggaaatgtaacataggaggacatataaaatggagatatatttgtataggtgaagtgtcccatattttaagagttgagtgggtaagagcttatggaagatgtggttgataaagatgtaatatgagacatttacaacaaatttaagatctcgaaacttgcataatattattggataacaagatcctgaatgtaattctacagatacggaaataargacataaaaatgaccagttaaatcaaagaagtcaagaattgcaaagggtcattgatataatattgaaattatcaacatgctgcttgcaaatatcaaagccaaaccctaaattcaacttggaaaatagagacggatcctgatagcaagtcaggtaaaggcagcaatgtgttaaaaaaaatgccaactaatatagttttctattgatgagatataaatgtattacagatc

SEQ ID NO: 15283 - DNA, 1710 bp, Homo sapiens
aacataatttggacaaaaatattgtgaggagtcttagggaggaaggtaagaactcatgagtctggagccaaagctttggggcaagggaggatgctgcctgtgagggggaagactttgcagcttgatgaagaatacttcatatttattgatacgttgctttgcactaaggaagatgtgtactttgtgctttaatgtattgcagcaatcaaggtgctggattacaaaaaaagaacagaaaggaaaaagagagagggagaaaaggaaaataaaagaacagaaaataacaaaaaagaaaggcaaaggaaccatctgtggctagctgaagcagtggaggaaatctattagaaggtatatgagttagatataatataaggcacatggctatgcaaagaagagagagcccagaaataacagtggcttaaattagacagagatttctttctttctcagtaagtagccaaaatgttatggtagttgtcttagttggttcaggataccataacaaaatagctcagattgggtgagctgtgaaatttattactcacagttgtagaggctgggaagtccaagatcaagatgctggcagattcagtgtctggtgagggcttcatagatggagccttgttgaagcattctcacatggcagaagggcaaaagggggtgaaggggtgaacagaaccccttgagccctttctaggagcatgaatcccatttgtaagggtagagccctcatggccaattgcctcctaaaggccccatctcttaatactattgcattggggattaagtttcaacatgaattttggaggggtataaccattgaaatcatagcagtggttctgcttcaagaagttttcaggccctggtttgtggatccccyaaccctaggtattgccctcaggatgtggtccaggaagccttactccatatccacattctagccaggagggaagggagaaagcaagggggaaggaatgctccttccttggaaggcaccacctggaaggtgcccacctctcttctgctcacacctgctgtccacagcacagtcaatggccacacttggaacaagggaacctggaaaagccattgtaatctaagcagtcattggcccagctaaataatctattactacataagcaggaagatggctcttgggaggatccacaagtctctgccaccgatgagattgggcagcctagataattgttggcaagagtgaggaatcaggcttagaaaactggtaggagtcaaactagccacagggcaggaccccagccccatcatactaatggacaggctggctggggtatgtcaccactgctgccactgggaaggatttcccgtctgttcctgcatctttgcacaagatccagaagggcagcgttctgcaggtggagtcaacgtcacaggcccaggtaccaactgccagggggtggagaggaaagacttcaggacccctcactgacttccgtggaaggaaagggtacgggacccacccacactagaggcaactgagaattgctccccaaatgtgatgggagttggatatctgatgatgtgtaccaccccttgaaagccaaaagcaaatgttcatgacacatgccatttcatcctcacagccatctagtgaggtgaatctcttcataagccccagcgttcaagagaaattgaggagcataactggagtcacatttgtcactcacttac

SEQ ID NO: 15284 - DNA, 1710 bp, Homo sapiens
aacataatttggacaaaaatattgtgaggagtcttagggaggaaggtaagaactcatgagtctggagccaaagctttggggcaagggaggatgctgcctgtgagggggaagactttgcagcttgatgaagaatacttcatatttattgatacgttgctttgcactaaggaagatgtgtactttgtgctttaatgtattgcagcaatcaaggtgctggattacaaaaaaagaacagaaaggaaaaagagagagggagaaaaggaaaataaaagaacagaaaataacaaaaaagaaaggcaaaggaaccatctgtggctagctgaagcagtggaggaaatctattagaaggtatatgagttagatataatataaggcacatggctatgcaaagaagagagagcccagaaataacagtggcttaaattagacagagatttctttctttctcagtaagtagccaaaatgttatggtagttgtcttagttggttcaggataccataacaaaatagctcagattgggtgagctgtgaaatttattactcacagttgtagaggctgggaagtccaagatcaagatgctggcagattcagtgtctggtgagggcttcatagatggagccttgttgaagcattctcacatggcagaagggcaaaagggggtgaaggggtgaacagaaccccttgagccctttctaggagcatgaatcccatttgtaagggtagagccctcatggccaattgcctcctaaaggccccatctcttaatactattgcattggggattaagtttcaacatgaattttggaggggtataaccattgaaatcatagcagtggttctgcttcaagaagttttcaggccctggtttgtggatcccctaaccctaggtattgccctcaggatgtggtccaggaagccttactccatatccacattctagccaggagggaagggagaaagcaagggggaaggaatgctccttccttggaaggcaccacctggaaggtgcccacctctcttctgctcacacctgctgtccacagcayagtcaatggccacacttggaacaagggaacctggaaaagccattgtaatctaagcagtcattggcccagctaaataatctattactacataagcaggaagatggctcttgggaggatccacaagtctctgccaccgatgagattgggcagcctagataattgttggcaagagtgaggaatcaggcttagaaaactggtaggagtcaaactagccacagggcaggaccccagccccatcatactaatggacaggctggctggggtatgtcaccactgctgccactgggaaggatttcccgtctgttcctgcatctttgcacaagatccagaagggcagcgttctgcaggtggagtcaacgtcacaggcccaggtaccaactgccagggggtggagaggaaagacttcaggacccctcactgacttccgtggaaggaaagggtacgggacccacccacactagaggcaactgagaattgctccccaaatgtgatgggagttggatatctgatgatgtgtaccaccccttgaaagccaaaagcaaatgttcatgacacatgccatttcatcctcacagccatctagtgaggtgaatctcttcataagccccagcgttcaagagaaattgaggagcataactggagtcacatttgtcactcacttac

SEQ ID NO: 15285 - DNA, 578 bp, Homo sapiens
ttgagccttactctagggtgatttccacggttcccacgtccctttcaagagaacagctatcacttatattcctcagtgtttcttctttgctccagactggttgtgaagccgtaaaaagggtaacgctggagcccagaaatcagctggtgaataccgcgccaggtgccaggtccatcgcggcgaggctgcaggagccctggaggggagcaaaaggagccccgcrcgcaccggacaggctgtgctctttgttaaagaaacaaatacagaaaacgccgcggcggggaatggtggtggtgaagaaatagactgaggcgtttgtatgcattaactgtgcctacaaagcccattaaagagacgctcctacacagggcaacccacggcaccgtgtcattggcttttgtgcacttgaaggcgcgtgagagtgccccgctcgaaggctcccctttgtgtgaaagtgtggaaaccagaagcgtgcagccactgctgggttttcgttttcgaattcgcaggcacttgggccaaaatactcccacaccagaacactctctcattctcgcaccaacaacactcagacttga

SEQ ID NO: 15286 - DNA, 568 bp, Homo sapiens
ggggaggaggtataaagagacatgtccagcttcccatctggtcatggccgggaactcagtttgcaaggtttgtctgggtcctcttggctaacagggggcccattcatttagttggcagcttaggattttatttttatttctcatttcttatgcataatatgtttttttttggtagctgtagactagacatggaaaacaaaaattgtcatatagaaagaactcaataaatatttatttgttgaaagatccaaagaatgarccattggccaggtgtggtgactcacgcctgtaatcctagcactttgggagggcaaggcgggcatatcgcctgaggtcaggagtttgagaccagcctggccaacatggtgaaaccccttctctactaaaaatacaaaaattagccaggtgtggtggcaggctcctgtaatcccagctactcgggaagctgaggcaggagaattgcttgaacccgggaggcagaggttgcagtgagccgagatcacgccattgcactccagcctgagggacaagagtgagtctttgtctcaaaaaaaacaaaaaagaaaaa

SEQ ID NO: 15287 - DNA, 568 bp, Homo sapiens
ggggaggaggtataaagagacatgtccagcttcccatctggtcatggccgggaactcagtttgcaaggtttgtctgggtcctcttggctaacagggggcccattcatttagttggcagcttaggattttatttttatttctcatttcttatgcataatatgtttttttttggtagctgtagactagacatggaaaacaaaaattgtcatatagaaagaactcaataaatatttatttgttgaaagatccaaagaatgagccattggccaggygtggtgactcacgcctgtaatcctagcactttgggagggcaaggcgggcatatcgcctgaggtcaggagtttgagaccagcctggccaacatggtgaaaccccttctctactaaaaatacaaaaattagccaggtgtggtggcaggctcctgtaatcccagctactcgggaagctgaggcaggagaattgcttgaacccgggaggcagaggttgcagtgagccgagatcacgccattgcactccagcctgagggacaagagtgagtctttgtctcaaaaaaaacaaaaaagaaaaa

SEQ ID NO: 15288 - DNA, 524 bp, Homo sapiens
ttttacttgcatcagcagctctcagaacagtggctgaccaataccaagcattcaataaatgtttattgaaggaatgaatcaatggccacccacaacctatacctcttacagcccatttaatgycctttagccccttccataggtatttgcctggaatgtttgtaagatttttgaaaatctcagaaacaacaccagccctccacccatgggaagatgtgtctcaggctaacacctgtgctcttgttgatgccattgccccaaagaagaccaacctctccttcttgcccatataagttggctctaatttcaatgctgctgaaaacctctcctcttccataaattattttttcagattgctccagcccattgtgatctttcatccttcaaactcctttaacatctagggcctacaccattaatctgacaatcaccatatactgcttaatattgttgtagtctgctatttaccttcagtctgcaatttaacttccttaagtttatttcttgttccccattgtagagaa

SEQ ID NO: 15289 - DNA, 524 bp, Homo sapiens
ttttacttgcatcagcagctctcagaacagtggctgaccaataccaagcattcaataaatgtttattgaaggaatgaatcaatggccacccacaacctatacctcttacagcccatttaatgtcctttagccccttccataggtatttgcctggaatgtttgtaagatttttgaaaatctcagaaacaacaccagccctccacccatgggaagatgtgtytcaggctaacacctgtgctcttgttgatgccattgccccaaagaagaccaacctctccttcttgcccatataagttggctctaatttcaatgctgctgaaaacctctcctcttccataaattattttttcagattgctccagcccattgtgatctttcatccttcaaactcctttaacatctagggcctacaccattaatctgacaatcaccatatactgcttaatattgttgtagtctgctatttaccttcagtctgcaatttaacttccttaagtttatttcttgttccccattgtagagaa

SEQ ID NO: 15290 - DNA, 524 bp, Homo sapiens
ttttacttgcatcagcagctctcagaacagtggctgaccaataccaagcattcaataaatgtttattgaaggaatgaatcaatggccacccacaacctatacctcttacagcccatttaatgtcctttagccccttccataggtatttgcctggaatgtttgtaagatttttgaaaatctcagaaacaacaccagccctccacccatgggaagatgtgtctcaggctaacacctgtgctmttgttgatgccattgccccaaagaagaccaacctctccttcttgcccatataagttggctctaatttcaatgctgctgaaaacctctcctcttccataaattattttttcagattgctccagcccattgtgatctttcatccttcaaactcctttaacatctagggcctacaccattaatctgacaatcaccatatactgcttaatattgttgtagtctgctatttaccttcagtctgcaatttaacttccttaagtttatttcttgttccccattgtagagaa

SEQ ID NO: 15291 - DNA, 524 bp, Homo sapiens
ttttacttgcatcagcagctctcagaacagtggctgaccaataccaagcattcaataaatgtttattgaaggaatgaatcaatggccacccacaacctatacctcttacagcccatttaatgtcctttagccccttccataggtatttgcctggaatgtttgtaagatttttgaaaatctcagaaacaacaccagccctccacccatgggaagatgtgtctcaggctaacacctgtgctcttgttgatgccattgccccaaagaagaccaacctctccttcttgcccatataagttggctctaatttcaatgctgctgaaaacctctcctcttccataaattattttttcagattgctccagcccattgtgatctttcatccttcaaactcctttaacatctagggcctacaccattaatctgacratcaccatatactgcttaatattgttgtagtctgctatttaccttcagtctgcaatttaacttccttaagtttatttcttgttccccattgtagagaa

SEQ ID NO: 15292 - DNA, 558 bp, Homo sapiens
cctttccttattcagtaatactgtcagtttggctttttttctaggtcaacttattgatctcagtattctgaaataatatgtttactatcttttgataagcatttaaaatattagatttattgttactcttctgccttcattgggctggaagaataattgtttctctcactccacaaaagccaagttgcagagaaaaacacatagacattcaactgcaaagcagagaaactygactatttcctgcaattttaaagtgtatattgaataaaaccatctttttattttcttttttgctcactggcaaatattaacaacatcaagtgtgttattataatgttatctagttaaaaatctcaaaaagttttcataattaccatttaaaaatatataaataggtgacctaatgttaatttgtattgtctgagaccatgtctgttatttcactctttaaattcagttagtcatgcagaacctagcacttagtggatactcaaaaattatttgctggataaaaaaaggttaaacatgtaatatatacaaaatgtactagaaaaaatg

SEQ ID NO: 15293 - DNA, 558 bp, Homo sapiens
cctttccttattcagtaatactgtcagtttggctttttttctaggtcaacttattgatctcagtattctgaaataatatgtttactatcttttgataagcatttaaaatattagatttattgttactcttctgccttcattgggctggaagaataattgtttctctcactccacaaaagccaagttgcagagaaaaacacatagacattcaactgcaaagcagagaaactcgactatttcctgcaattttaaagtgtatattgaataaaaccatctttttattttcttttttgctcactggcaaatattaacaacatcaagtgtgttattataatgttatctagttaaaaatctcaaaaagttttcataattaccatttaaaaatatataaataggtgacctaatgttaatttktattgtctgagaccatgtctgttatttcactctttaaattcagttagtcatgcagaacctagcacttagtggatactcaaaaattatttgctggataaaaaaaggttaaacatgtaatatatacaaaatgtactagaaaaaatg

SEQ ID NO: 15294 - DNA, 567 bp, Homo sapiens
cagcttataaaggaaatcagaaatgcattagcaagtcaatagacattatgattattttagagatttaaagatcagagtcttggccagttttaaggtcttaatatatcagctgtacattatgtgttttgcattatattctttccttactttgctctattttaaattgattttctattaaagaaaattatctcttatagataattaaaggaagtaatagcaaaacccataactcaccaaataaaagtgacacatgaaaatattagcatcatgaattgatttaagggaataaaaaattaacratgcagttgaagtcacttaattatctttcttcaagccactcccatccttcttatactaccagagaaaaccatcaccacacaattggtataaattttttatatcgacctttttatactttaatcatatatgcgtatgacccacatgaatttctgtaagattgaacagaaccaaatcaaaaatagccctttgtatttaacctctagaaattcactaaaaccagaagttaatatggactatttttttgtggattgtacatcttatataaat

SEQ ID NO: 15295 - DNA, 1186 bp, Homo sapiens
tatgaaatataattaatattagatatgtttattcaaagcaaatacttttctcttagttattattctttccttgtatctagcaaaattcctaaacagtggatgctcaaaatatttcttgagaaaataactggattaatcattattattttatcctcatgatataaaagagaccactgtacccattaaaaaggcactttgagtgtttccatcagtctatgttccaaaattaaagacaacatttattaatcatttattaatcttgattccttagcttaattcttggtcaatagttttgtagtcttagggcaaagggttatagttcaaaaagtgagttacaaaataaccaaatcattggctatttatacaagcaaattgccactcttataaaaccatgctattattcttcaagggaggttctgaaaacattggaaaaagcttagtgtggaaacctgacagtcacttaaataaatatgacatgaaggacctgtggatttgttttttctgttgagataatgtatgtaaagtttcttttctttttttttttttttttgagatggagtctcgcactgtcacccaggctggagtgcagtggctccatctcggctcactgcaacctccgcctccctggttcaagtgattcacctgtctcagcctcccgaatagctggaattacaggtgcctcccaccatgcccaaataatttttttgtatttttagtakaaatggggtttcactattttggccaggctggtcttgaactcctgaccttgtgatccacccgcctcggcctcccacaatgctgggattacaggcgtgagccaccatgcccaacctaatgtatctaaattttctatcaaagaacatacaataaaaagcaatattaacctgcaagacccttaacaaaatgtgaaaggaatcattattatggaattatttaaaaattatcagaaaaattgatgaagaaaaaatcaattaattaaaaacatagtcacaaattaaattaccttgttttttacttcctttttagttggatgtgaataaatcaaagatacgtctggaaactaatgagagtgactttgaaatttggtggtattccagggaggaatactttatttgaatttcatataacaaggcattattgaaaatagttgtgttcaaacaaaacatagtaatttataaatgtgacc

SEQ ID NO: 15296 - DNA, 1186 bp, Homo sapiens
tatgaaatataattaatattagatatgtttattcaaagcaaatacttttctcttagttattattctttccttgtatctagcaaaattcctaaacagtggatgctcaaaatatttcttgagaaaataactggattaatcattattattttatcctcatgatataaaagagaccactgtacccattaaaaaggcactttgagtgtttccatcagtctatgttccaaaattaaagacaacatttattaatcatttattaatcttgattccttagcttaattcttggtcaatagttttgtagtcttagggcaaagggttatagttcaaaaagtgagttacaaaataaccaaatcattggctatttatacaagcaaattgccactcttataaaaccatgctattattcttcaagggaggttctgaaaacattggaaaaagcttagtgtggaaacctgacagtcacttaaataaatatgacatgaaggacctgtggatttgttttttctgttgagataatgtatgtaaagtttcttttctttttttttttttttttgagatggagtctcgcactgtcacccaggctggagtgcagtggctccatctcggctcactgcaacctccgcctccctggttcaagtgattcacctgtctcagcctcccgaatagctggaattacaggtgcctcccaccatgcccaaataatttttttgtatttttagtataaatggggtttcactattttggccaggctggtcttgaactcctgaccttgtgatccacccgcctcggcctcccacaatgctgggattacaggcgtgagccaccatgcccaacctaatgtatctaaattttctatcaaagaacatacaataaaaagcaatattaacctgcaagacccttaacaaaatgtgaaaggaatcattattatggaattatttaaaaattatcagaaaaattgatgaagaaaaaatcaattaattaaaaacatagtcacaaattaaattaccttgttttttacttcctttttagttggatgtgaataaatcaaagataygtctggaaactaatgagagtgactttgaaatttggtggtattccagggaggaatactttatttgaatttcatataacaaggcattattgaaaatagttgtgttcaaacaaaacatagtaatttataaatgtgacc

SEQ ID NO: 15297 - DNA, 363 bp, Homo sapiens
ctcttaaattctttaagattctttaagaatttaagattcttacattattttttcttcagagacactaggttatcttgctttctttgaatgaaattattgaagacacttactggagcaaaaraaaaaacaaaacaaaaataaaaagcaaaggaaggatccatgaaattttaaggaaatgtggattaattgcaaaatatggataatacaaaacacagtacaattagatgacaaaaaaaacctaaaaactcagtaacagcataaaatcaaaacttctctaagttccagttttttcatctctaaaatgagataatattccctaggggattttcaaggatgaaatgaagtcatatatatatagccaca

SEQ ID NO: 15298 - DNA, 645 bp, Homo sapiens
cagttcacccctagctctcaggcttcttgggaagttccagagtaatgacaccttcaggctgtctacagggaagcagcagcacccaggccaaatcttccagtccttctgcgggcagctgctctaacaaacactcaggctgggagaagggaaaggggcagcaggaaggcttcattaccacgagacagcacagagtccactctttcttaccagaagtggctgcaggtggtctcggaactgtgactagcgtcagagaggcctgtatttgaattatagcttttttgctcctagtttgtaacctgagtcaggtttcttaattcctctgaatgtctgcgttctccataaagatactcactgaactgayctcataggattaatacgagcagaaaatgaacttatgggtgtgtagtgctgacagagtaagcccttggtgaatattcactattattatcatcatcatcatattgtttcccacaccctctggatcaagcgtcttaggcatttcagggcaagtagggtttgggataccctggaggtgcgggctggagctagggcagagcaatgacctggacaccccacgccacttcaaggccctaggctagaggcagcttgtgcagcacgagtgtgcctccaacacagtccagaaga

SEQ ID NO: 15299 - DNA, 534 bp, Homo sapiens
aaataaaagcatgttaaataacatttatattgtcaaatcttcctattgccttgaatattccattaaagttagacttttcatggctttagtcttcaakaaatttaaatgtatgttagatgtcctctttgaaaaagtagaagtaagttctctattttaaaggtattccatccaaaaataaaataatttgtttttaaattagaaagtaagagacattctagctgcatgtggtggtaggggggcatacctgtagtcccagatactcgagaagctgaggagggaggatggctttaatccaggagttagacaccagcctgtgctggacagcataacaataccttatctagaaagagagagagagattgacattgattaaattcagttatgtgaaaaaaatgagtgttattctatcaatcattttgtaaactgcaatcactggccagattgggtgggggatgtattagtcatgatgctctgctttttttctatattttccccttgtttattgtttgttgtggattgtaatgcagaagctac

SEQ ID NO: 15300 - DNA, 566 bp, Homo sapiens
ctaggttacgcattatgttcaatcttgcctgctgacctggtccaaaatattggtgatcttttcaacgatacactaacttccaaggggttgttcctgactatatcaacaaatataaggaaggatggcaggggaagaaaatgactggtagtgactaagtactgcccatttggggaaggaaggtcaagggcagacttgaaaacattagttatctcagataagccttagtggatgtgtgatagcaatagatcacacagaaaaaacttctcttaaaaggcaaacttgtctcccatttgtatgtgacctccatgttaattactacagcaccaggaagtttaaaaaacattaagggaaggaaaactaattctgtcatttttacaatccacagatggctttctgaccttgctaaaataaatcactttagcaaatatyttccagccttaccgaggagtgggaggtgttttgagaggatgctgagaaatgttcagccactctagtctgacagcttatttatccaagtatacctactgaatgagagcttagtatcaggtgtaaatttcattaacatt

SEQ ID NO: 15301 - DNA, 481 bp, Homo sapiens
caagctattttctttgaacatgtrtacattttagttgtagaagtcagttgtctcttaaacgaagtatcttcacaggaaaaatcattattttgtgaactctgaaatgaatgaaaattttaaatacaatatcagggtagcctgtaaatgatactagaaataaactgacccaaacacacttaaccagcctgttttccgtttagctgtttccatacttttttttcttttaaaacttggcaagttgcattttgaatcttcataaattatggtagcttaaaaaatatataaaatatggaatggtgtaaagctaatgttctggaagaatcattgcttttgaaatggcaaatccacaattctaaaattagggtaaatatctagggtagatatgtagatgtggaattgctgtgtcaaaggataggtgaatgtttaactatataagaaactgtcaaaaattttctaaagtggttgtgctattttatcctcc

SEQ ID NO: 15302 - DNA, 481 bp, Homo sapiens
caagctattttctttgaacatgtgtacattttagttgtagaagtcagttgtctcttaaacraagtatcttcacaggaaaaatcattattttgtgaactctgaaatgaatgaaaattttaaatacaatatcagggtagcctgtaaatgatactagaaataaactgacccaaacacacttaaccagcctgttttccgtttagctgtttccatacttttttttcttttaaaacttggcaagttgcattttgaatcttcataaattatggtagcttaaaaaatatataaaatatggaatggtgtaaagctaatgttctggaagaatcattgcttttgaaatggcaaatccacaattctaaaattagggtaaatatctagggtagatatgtagatgtggaattgctgtgtcaaaggataggtgaatgtttaactatataagaaactgtcaaaaattttctaaagtggttgtgctattttatcctcc

SEQ ID NO: 15303 - DNA, 481 bp, Homo sapiens
caagctattttctttgaacatgtgtacattttagttgtagaagtcagttgtctcttaaacgaagtatcttcacaggaaaaatcattattttgtgaactctgaaatgaatgaaaattttaaatacaatatcagggtagcctgtaaatgatactrgaaataaactgacccaaacacacttaaccagcctgttttccgtttagctgtttccatacttttttttcttttaaaacttggcaagttgcattttgaatcttcataaattatggtagcttaaaaaatatataaaatatggaatggtgtaaagctaatgttctggaagaatcattgcttttgaaatggcaaatccacaattctaaaattagggtaaatatctagggtagatatgtagatgtggaattgctgtgtcaaaggataggtgaatgtttaactatataagaaactgtcaaaaattttctaaagtggttgtgctattttatcctcc

SEQ ID NO: 15304 - DNA, 543 bp, Homo sapiens
caggatgtcctggctcactccgcaagccccccagcctcccaccctggtcccagtttcccgcaaagtgcctctgggggtccccccagcctcccaccctggtcccaggttccacaagtgcctctggagggccctgggctctggcagatggtcctggtgccccagacgggagccgaggcctgagcccccccatccctcctctgccagggtttcttagcggtttctctgtggatgttttggcatctttagacacctggaaagtctcttatgtttgccgtttattcccttcacagaaggcttggaatgtatttatttatatttattttttcaaaatccgaaatcatttgcgagccgcaatcgtcgtctgcctgtgtgggggggccagggcctgccttgcacgttgcagcctctctggccattgcagagctgctggcctcctgcccaggtggagggtcctggggacggcagaggataaagccccctcctcacatccctctawtgcggatccacagtggccttactcttaacttggatgagagcaaaaac

SEQ ID NO: 15305 - DNA, 531 bp, Homo sapiens
aaatcagttgccctgaatttttttttaaaaactctttgttaactccagaacaagtgaaatacagcayactatatctatagctgtttaagatgggtggtattaaactacagagaaaatgctcatatatgttattttttaaataacctgaaagtttaagaaaaatgaaggctgggaacaaggcctagatgtgttttttgtttgtttgttttttaagacggagttgcgctctgtcacccaggctggagtgtggtggttcaatctcggctcactgcaacctccgcctccagggttcaagcgattcccctgcctcaccctccctagtggctgggattacaggcgcccaccaccacgcccagctaatttttgtatttctttcagtagagatggggtttcactgcgatggccaggctggtctcaaactcctgacgtcatgatccgcccacctcggcctcccaaagtgctgggattacaagcgtgagccaccgcacccgaccgtgttttcttcttttagttaggatgttgaacctttac

SEQ ID NO: 15306 - DNA, 531 bp, Homo sapiens
aaatcagttgccctgaatttttttttaaaaactctttgttaactccagaacaagtgaaatacagcatactatatctatagctgtttaagatgggtggtattaaactacagagaaaatgctcatatatgttattttttaaataacctgaaagtttaagaaaaatgaaggctgggaacaaggcctagatgtgttttttgtttgtttgttttttaagacggagttgcgctctgtcacccaggctggagtgtggtggttcaatctcggctcactgcaacctccgcctccagggttcaagcgattcccctgcctcaccctcccyagtggctgggattacaggcgcccaccaccacgcccagctaatttttgtatttctttcagtagagatggggtttcactgcgatggccaggctggtctcaaactcctgacgtcatgatccgcccacctcggcctcccaaagtgctgggattacaagcgtgagccaccgcacccgaccgtgttttcttcttttagttaggatgttgaacctttac

SEQ ID NO: 15307 - DNA, 306 bp, Homo sapiens
ggaagaaacaggatggyagggtctggagcagagtgcttagagagaggcaagtgtagaaaagcaagcccagataatagtggcctagtacaccataccaatgaggagctggcccttttaaaataagcagtgagaaatcacaaaagtattaatattttaagggcagtgcaggagactggctgaaaaagattacatgcttatattcatgttattgagagatccctccacctaaactgtgtaaactgaccaggaaggggtcaatttttgctgcttctttccagcctggactatatattctttcttgactat

SEQ ID NO: 15308 - DNA, 578 bp, Homo sapiens
cacttaaatgcaccaggggtgtagcttttacaaagtccttggtaattcacrtaatcaccccctaatgttttataagaatctttgagcaaagcttgctgttatactgtcccatggggtaagagcacttcccccaaagataatgtgaacacatgttttaaagtctattacatggtttgaagtaaatggtatgtagagggaaaaaataataaagttcaaataagcaagcacacagttttcaataacattggacgatttctactgagaattgatatctaaaagattcatggcatgtcaatttaacagaaggaagcacaagccaatgggaaaagttgaaagaatgaaattgacataagcaagaaaaaaggaggaggggttctccaaacagggtgagttcaatattaaaaaaaaaatcaaataaaatcaagagggtaggattttataaagtattcttaagtccctcgtcttaataacttctcctttcctctcccaggaggcctgcatctgtgacagtaatattaaatgtcaagtgttgcgacaaacggtgatgccctttcattgctctcatcacctatttatgc

SEQ ID NO: 15309 - DNA, 578 bp, Homo sapiens
cacttaaatgcaccaggggtgtagcttttacaaagtccttggtaattcacataatcaccccctaatgttttataagaatctttgagcaaagcttgctgttatactgtcccatggggtaagagcacttcccccaaagataatgtgaacacatgttttaaagtctattacatggtttgaagtaaatggtatgtagagggaaaaaataataaagttcaaataagcaagcacacagttttcaataacattggacgatttctactgagaattgatatctaaaagattcrtggcatgtcaatttaacagaaggaagcacaagccaatgggaaaagttgaaagaatgaaattgacataagcaagaaaaaaggaggaggggttctccaaacagggtgagttcaatattaaaaaaaaaatcaaataaaatcaagagggtaggattttataaagtattcttaagtccctcgtcttaataacttctcctttcctctcccaggaggcctgcatctgtgacagtaatattaaatgtcaagtgttgcgacaaacggtgatgccctttcattgctctcatcacctatttatgc

SEQ ID NO: 15310 - DNA, 528 bp, Homo sapiens
acacctactaagaggttgagcaggaggattgcttgagcccaggagtttgagaccagcctgggtratataacaagaccctgtcttaaaaaaaataaagtttaataaatttatgttgagctaatgtatgaaataagaatatagccaagataacagtactaaagggatggctcggaggttcaaacccagggctgtctgactccagagcctgtactctttactattaaactgattctccagcttaacactggtggcttcagatggatttgtgctttatctacctctctggtgaaggtactttacctggaagatgtgcttacctccgtacctggccattacttctcaatatcttctgtagggctttctgacacccttctttcattggtgtttcccagggtcaggtcttagtttctgctctctcactcaccaggacacctctttgagatccccggcttcattactatccacatcctgatgtggtatcccctgtctatatctccagacttggcttctctctgggactccagattt

SEQ ID NO: 15311 - DNA, 528 bp, Homo sapiens
acacctactaagaggttgagcaggaggattgcttgagcccaggagtttgagaccagcctgggtgatataacaagaccctgtcttaaaaaaaataaagtttaataaatttatgttgagctaatgtatgaaataagaatatagccaagatracagtactaaagggatggctcggaggttcaaacccagggctgtctgactccagagcctgtactctttactattaaactgattctccagcttaacactggtggcttcagatggatttgtgctttatctacctctctggtgaaggtactttacctggaagatgtgcttacctccgtacctggccattacttctcaatatcttctgtagggctttctgacacccttctttcattggtgtttcccagggtcaggtcttagtttctgctctctcactcaccaggacacctctttgagatccccggcttcattactatccacatcctgatgtggtatcccctgtctatatctccagacttggcttctctctgggactccagattt

SEQ ID NO: 15312 - DNA, 555 bp, Homo sapiens
agggcttcacactgctgtggatgtgcttgtgttgtttgaggcccgacgaagtggcaaacgttttgccacactccgggcatgcatgggcccgggcaccgacatgctgagagcgaatgtgccgctgaaggttgctagggtccgtgaaaacctgctaggaaatgagtactgattaatcaagaaacttaactcaagggcacaataaagaagacccgggatgactcaagaagaaatttttcttatttgttttgtttttcttttccccaaagaccaaaagtgtactctcctctaatttccaaaatgtactctcctctagggtaggaactgtaaattattctgctctatatccttagcatggtgtatccactggtatcagttgaaccaaataatgaatggcactattaggccatattcaagrcctttttgataccatttagagtgacttgagttgaataataaaatgctggttaagccattattaaaactggtgtgctattttcaccctttaaataaagacacattgtgtacaaaaatttggaggattttgactaactacat

SEQ ID NO: 15313 - DNA, 543 bp, Homo sapiens
aatgagataaaagcaatgattacactagtcttgatcaactcgaaaactctgtacttttaaaaatgtgtgaccctttaagtaaaataagaaagctcagtagatgggaaatgtgctcaagtgaaaagatgtgggaggtagaatttgtctctcaatgacttcaaaacccaaggaggagaacaatgagaggcggcctgtccayagcagcactataggggcaggtgacagtcaccttgggcatgccagcactgggaactcatagctccagaggccctgaagcagtcttccgccagcacaaccagatgttacattttttctgcttaattttggtaaaactccatgacgtccttctcaaattaaaaaggcaatgtcatttttttttgtaagccacaggagctatctttagtgaagccttctaaggatttcattaattcatagccagccaaccaggacttttcccacagtctcccacaaaaaagcccgggaagtcactgattgcttggctggatctgaatatgagcagaggtaagatcagaaatatctagt

SEQ ID NO: 15314 - DNA, 543 bp, Homo sapiens
aatgagataaaagcaatgattacactagtcttgatcaactcgaaaactctgtacttttaaaaatgtgtgaccctttaagtaaaataagaaagctcagtagatgggaaatgtgctcaagtgaaaagatgtgggaggtagaatttgtctctcaatgacttcaaaacccaaggaggagaacaatgagaggcggcctgtccacagcagcactataggggcaggtgacagtcaccttgggcatgccagcactgggaactcatagctccagaggccctgaagcagtcttccgccagcacaaccagatgttacattttttctgcttaattttggtaaaactccatgacgtccttctcaaattaaaaaggcaatgycatttttttttgtaagccacaggagctatctttagtgaagccttctaaggatttcattaattcatagccagccaaccaggacttttcccacagtctcccacaaaaaagcccgggaagtcactgattgcttggctggatctgaatatgagcagaggtaagatcagaaatatctagt

SEQ ID NO: 15315 - DNA, 525 bp, Homo sapiens
acttcaaaagcaagtgacttgatcttgggtgctgtcattcacatcagatgacttgtatcttctgagtcattgtgagcaacatgaaaatttcagttgagatgaaatgggatatttacgatacaacccagataatttatcttacatctttgtcaaatgttttatttttaaatattcaagtcctactcttaactaggaggtttaatactgctgttggtaacctaccttggcaggtaaggattttctcctaaaatcattcttcaaatgtgtcttggcagtaataaaaaaaaaataatccagcyaaggttttctttttagataagcactttaaaagaaggttgttacagcaagtgagaaacaaagggtgtgtgtttcttgatttataacaatcaatggcatattaatatattttttaaagagccagagtttttaaaaaagaatttgatttgagtgtcattttttgcttaggccaccagggggtgatatgcttaaagagacacagggagacgcggcaaaaggtgggttggc

SEQ ID NO: 15316 - DNA, 1615 bp, Homo sapiens
tcacttaaaagttaggacagtaaatcctgttgtcaacctttgaatccacataatccatacattcttgtaactaacataagcctcctcaccttcctcccttttatgtcatcaccactctttactcaaaggcagatggctcaagagtaggtggataaattacttgagtgaatgctagcccgccctaacaaaagggtttgttcactgcttcacttgcttcaagtttgctaacattgatacagaagaaattaaacaagtctgcaactcttcttaagtgttatttgaggccacacaggaataaagattcaagatgctacataatgtcaaataggtctctgttaaggtttaaaatatttagaggacaccaggttgccaacagagttctacttcccattttccttttattaagggtgatagaaaatacagaaaacactaacttgtataatatatttatattttggggaaaacacttttatatttcaatggggtttcaaaaaatataacagcatttttgaaagctgattttatggaataaggtaaaaagacacctgatgttgacaggtaagcccttgggtaccatcaaaaggtcacccaggaaaaatcgaacattttatccaatttcatggctaactgttgtgtaatctatgctgtcctaccaatacttctgaagttgaattgttcagtggcagtaggttctgtgcaaggacagaagcagtcaaatagtagaaaacagctatgttcctcaacttaaagttaccaagagttctcattccaagacagaagttaaaaatcaataattgtgtgcaaacgatgacttcactgayggttagccagatacagtcaaatcaaaggacttgttgccagtggcatgactgactctgtgccagttttcagaaatttaaaattttccctaaatgcacctggtctaaacagcaatggccagtattctcactataaaaacttgactgtttctgcttgctgtcagccacttaccaaagcgcttgccatttaacaattgttccagaaaatgtagttttgtcattttcaaaaatcaggattctgcctcttatttagtgtcctatcaccccagcttcagggctgtttggtgaagcagccgtgactccttcaggacacttgttccttaatttgttatgtatgttccttccaaagggggttcataatgaaatacatttgggaaatgccagactgaagacaacgaaacagatttcttggaggacttctgagaatcttgactatctacctagaatcccctgggggagtgggcagaatttcccccacctctctggccaagtacctgtttatatttcctcagtctacagttctctggaacactgttggagaaacactgctctccaaacagagggctatttcgtaatctttatgggacgacactgctttttgatgatgtaattgtggcaaagtagagttcttttaaaaagctgtaaagtgtttcagaagctagagttatgaagtagtagagactttgtagtctttggtatttagttaaacttgactttgtagcagtgggttctttagttctttttttagtttctaatacctttgagaatctgatggaacctacagccccccgctctgg

SEQ ID NO: 15317 - DNA, 1615 bp, Homo sapiens
tcacttaaaagttaggacagtaaatcctgttgtcaacctttgaatccacataatccatacattcttgtaactaacataagcctcctcaccttcctcccttttatgtcatcaccactctttactcaaaggcagatggctcaagagtaggtggataaattacttgagtgaatgctagcccgccctaacaaaagggtttgttcactgcttcacttgcttcaagtttgctaacattgatacagaagaaattaaacaagtctgcaactcttcttaagtgttatttgaggccacacaggaataaagattcaagatgctacataatgtcaaataggtctctgttaaggtttaaaatatttagaggacaccaggttgccaacagagttctacttcccattttccttttattaagggtgatagaaaatacagaaaacactaacttgtataatatatttatattttggggaaaacacttttatatttcaatggggtttcaaaaaatataacagcatttttgaaagctgattttatggaataaggtaaaaagacacctgatgttgacaggtaagcccttgggtaccatcaaaaggtcacccaggaaaaatcgaacattttatccaatttcatggctaactgttgtgtaatctatgctgtcctaccaatacttctgaagttgaattgttcagtggcagtaggttctgtgcaaggacagaagcagtcaaatagtagaaaacagctatgttcctcaacttaaagttaccaagagttctcattccaagacagaagttaaaaatcaataattgtgtgcaaacgatgacttcactgatggttagccagatacagtcaaatcaaaggacttgttgccagtggcatgactgactctgtgccagttttcagaaatttaaaattttccctaaatgcacctggtctaaacagsaatggccagtattctcactataaaaacttgactgtttctgcttgctgtcagccacttaccaaagcgcttgccatttaacaattgttccagaaaatgtagttttgtcattttcaaaaatcaggattctgcctcttatttagtgtcctatcaccccagcttcagggctgtttggtgaagcagccgtgactccttcaggacacttgttccttaatttgttatgtatgttccttccaaagggggttcataatgaaatacatttgggaaatgccagactgaagacaacgaaacagatttcttggaggacttctgagaatcttgactatctacctagaatcccctgggggagtgggcagaatttcccccacctctctggccaagtacctgtttatatttcctcagtctacagttctctggaacactgttggagaaacactgctctccaaacagagggctatttcgtaatctttatgggacgacactgctttttgatgatgtaattgtggcaaagtagagttcttttaaaaagctgtaaagtgtttcagaagctagagttatgaagtagtagagactttgtagtctttggtatttagttaaacttgactttgtagcagtgggttctttagttctttttttagtttctaatacctttgagaatctgatggaacctacagccccccgctctgg

SEQ ID NO: 15318 - DNA, 527 bp, Homo sapiens
acctaagtaccttctcataaagtgaacctggcagttttggacagatgtcgtcctcagtcctgtggtggtgatggctcaggcctcctaggctaggaacatatcagctaaggcctactgcagccactcaccagaagggtctctccactagagaacagtagctgcgcctccagcattgctctgtttcagaggtgtgtctctctggtcagtcagttcragaaggttaattaataaaccccgcatgctgagaaatgagtttcctcaagtgggcccagttttcagggagactggcacatgcctgtcatccctgcttctacacgagatttcttagaacagtcgcagtctgccttctagattccatcctgttttgttctaactcttgggttcaattttagaaaaatcaggctgttatttaagtaaggggccaatctcaacagaccacttatcatctaaattgaattggactaaagtcagcgccttccaaagaacagctagttccatggatattatatacgaggaaaatatgtatg

SEQ ID NO: 15319 - DNA, 527 bp, Homo sapiens
acctaagtaccttctcataaagtgaacctggcagttttggacagatgtcgtcctcagtcctgtggtggtgatggctcaggcctcctaggctaggaacatatcagctaaggcctactgcagccactcaccagaagggtctctccactagagaacagtagctgcgcctccagcattgctctgtttcagaggtgtgtctctctggtcagtcagttcaagaaggttaattaataaascccgcatgctgagaaatgagtttcctcaagtgggcccagttttcagggagactggcacatgcctgtcatccctgcttctacacgagatttcttagaacagtcgcagtctgccttctagattccatcctgttttgttctaactcttgggttcaattttagaaaaatcaggctgttatttaagtaaggggccaatctcaacagaccacttatcatctaaattgaattggactaaagtcagcgccttccaaagaacagctagttccatggatattatatacgaggaaaatatgtatg

SEQ ID NO: 15320 - DNA, 527 bp, Homo sapiens
acctaagtaccttctcataaagtgaacctggcagttttggacagatgtcgtcctcagtcctgtggtggtgatggctcaggcctcctaggctaggaacatatcagctaaggcctactgcagccactcaccagaagggtctctccactagagaacagtagctgcgcctccagcattgctctgtttcagaggtgtgtctctctggtcagtcagttcaagaaggttaattaataaaccccrcatgctgagaaatgagtttcctcaagtgggcccagttttcagggagactggcacatgcctgtcatccctgcttctacacgagatttcttagaacagtcgcagtctgccttctagattccatcctgttttgttctaactcttgggttcaattttagaaaaatcaggctgttatttaagtaaggggccaatctcaacagaccacttatcatctaaattgaattggactaaagtcagcgccttccaaagaacagctagttccatggatattatatacgaggaaaatatgtatg

SEQ ID NO: 15321 - DNA, 580 bp, Homo sapiens
ggggctgaaagagcatggatgctcagagtggcagttttatttgaagttgctgggttattctgatatacaatgacagtatcctaaagaaatgagatctttaaaagccaggacctttttcaagcagtctaagctcaaaggagcagagaattattgaaggtagaacaggattcaggccacatttcttttaaatgctcatggaagtcagtcttgatagtgaacagatgttcattcagtgctgaattattaggttggtgcaaaagtaattgcgacttttgccattacacatagaacctaagtttctgctctgagaataaaggctaaatgctgattaatccattctgtaagacttggccaaaatgtgtttttaaccattattagcatgtagtttcttttagccccattttaatctcttgtgggttayaaccccacttgggatgcagtgaagaaaaaagcaacatggttcagagaactggacctttcttttgacagtttaaaattctacaactattactgaccttttacaactattacaactaccttttcagtcagtggtccccaaccttcttggcaccagggacta

SEQ ID NO: 15322 - DNA, 527 bp, Homo sapiens
  misc_feature (1)...(527): n = A,T,C or G
tagaatacaggttccacaccacaaagggctgcccattctggtctcaacaatgactagactaaacacccctgtgtaccaagtcaactcctctgccactatgactcttttctgcttgtaacactagctatgtgggtcccagatgacaccaggaaaaccatcagtgccttctgatgtgtagcaaaacctctaatccttgatttaatttggcttctagtagtctcagaagtatagagaaaaagataccaagccacatcctcctgcctccattacactctgttagtgggctcacaaggcagttctgacttacatttcttagcattaggctcagtaattcagctatattaatacatcttccctgttaaagcagcagtatgaagccgaagccaraaaacaatctgagtaagatacagaatgattcaccatgttactggacccattctgtaaatctcattctcntagtttgtgagtttcccttccatgagattcntcattctctcctcttaagaaatctctgatggcctgtcctg

SEQ ID NO: 15323 - DNA, 564 bp, Homo sapiens
tgttagcaaaacctcaggagaagatctggaaggctgtacatgacattgatcatgatagttacatcaggtcccaggggagtgaagcggtgacccgaggagcgtgtgctttctctgcagcatgttaattttttactaggaacgtttattacaaactacctacatgattaagttattttaaggatatgacaaacatttttctrtaacctgttttaatgacatttcagcaaagtgactttctctctgcaccctgccttatccctgtttgaattattttaatgtgcttattcccagcagggcagaatccttggtgtctgtagtcctcagagcccctcgggcacacatcagtctcatggtccctgtcctcataatctgtgagggacgaccctggaggctttctagcattccacacttagggtgttcacaacccacgcgcaggtctccacatccactttcctcctccgctttcactctctcttgtacctaagatatacctccctgtactcttcaggcacattcaaacccccacccatcttgcaattgctaacagaaactcagctgctttca

SEQ ID NO: 15324 - DNA, 564 bp, Homo sapiens
tgttagcaaaacctcaggagaagatctggaaggctgtacatgacattgatcatgatagttacatcaggtcccaggggagtgaagcggtgacccgaggagcgtgtgctttctctgcagcatgttaattttttactaggaacgtttattacaaactacctacatgattaagttattttaaggatatgacaaacatttttctgtaacctgttttaatracatttcagcaaagtgactttctctctgcaccctgccttatccctgtttgaattattttaatgtgcttattcccagcagggcagaatccttggtgtctgtagtcctcagagcccctcgggcacacatcagtctcatggtccctgtcctcataatctgtgagggacgaccctggaggctttctagcattccacacttagggtgttcacaacccacgcgcaggtctccacatccactttcctcctccgctttcactctctcttgtacctaagatatacctccctgtactcttcaggcacattcaaacccccacccatcttgcaattgctaacagaaactcagctgctttca

SEQ ID NO: 15325 - DNA, 564 bp, Homo sapiens
tgttagcaaaacctcaggagaagatctggaaggctgtacatgacattgatcatgatagttacatcaggtcccaggggagtgaagcggtgacccgaggagcgtgtgctttctctgcagcatgttaattttttactaggaacgtttattacaaactacctacatgattaagttattttaaggatatgacaaacatttttctgtaacctgttttaatgacatttcagcaaagtgactttctctctgcaccctgccttatccctgtttgaattattttaatgtgcttattcccagcagggcagaatccttggtgtctgtagtcctcagagcccctcgggcacacatcagtctcatggtccctgtcctcataatctgtgagggacgaccctggaggctttctagcattccacacttagggtgttcacaacccaygcgcaggtctccacatccactttcctcctccgctttcactctctcttgtacctaagatatacctccctgtactcttcaggcacattcaaacccccacccatcttgcaattgctaacagaaactcagctgctttca

SEQ ID NO: 15326 - DNA, 528 bp, Homo sapiens
ctgagcgtctgggccacttagttgcagccgtggccttgatcagtcagtgatacttaaatttattcagtaaagattaattgacaaaggttgtgagtaaacaccactagagcgtaattgacattgctgacttcccgagtagaaagcaattaagcacccaccgtagatgaaaggttagtcttaggaccacatgagtaaacaagctagttaggtaaactaccttgctttgtacccactttaggctatttactcaaaataaggattaggttgccttcagccataaccttatcctgagacttttgcaaaaatcttcaggccttccaagaaggtttgtggyttatcgttttccccaccatcctgaatagatagaaggaataagttctaatgtttcttagcagagtaggttgactacagtaaacaatatattggatctttgaaaatagctagaaaagataactttttggggaaggttatatatacaaatttactttttaagtgttattataatttactggattaatttggattttt

SEQ ID NO: 15327 - DNA, 528 bp, Homo sapiens
ctgagcgtctgggccacttagttgcagccgtggccttgatcagtcagtgatacttaaatttattcagtaaagattaattgacaaaggttgtgagtaaacaccactagagcgtaattgacattgctgacttcccgagtagaaagcaattaagcacccaccgtagatgaaaggttagtcttaggaccacatgagtaaacaagctagttaggtaaactaccttgctttgtacccactttaggctatttactcaaaataaggattaggttgccttcagccataaccttatcctgagacttttgcaaaaatcttcaggccttccaagaaggtttgtggtttatcrttttccccaccatcctgaatagatagaaggaataagttctaatgtttcttagcagagtaggttgactacagtaaacaatatattggatctttgaaaatagctagaaaagataactttttggggaaggttatatatacaaatttactttttaagtgttattataatttactggattaatttggattttt

SEQ ID NO: 15328 - DNA, 554 bp, Homo sapiens
gaaagtgatggtaggttggcctggagatgttacgagaaaaacccatgtcctcctgaaggcccaggataggaacatctttggagaagaaagggtaggctgggtcaaatgttctaaaagcagacttcatagtttggctataaggacagtcatgctcccaatataagcctgccaagtagtctgagtcaagagaaagaaagtttgggcaaattcagaatcttytggactcagtgggctccatgtctaaaaccagattttggtcttgtaccttttagtatctaatcatggcaagggaatgcctagttgaaagagaaatgagcttttcgagtttgggattagacagcaaataactggaactaaattgattttgttgagtttcaaaatgactcagaaacaattggacccaattctcctcaaaattaacatcagtaaaaaagattaagaaaaataaaactcccctgggcagaacattgtaaactgggattttctcagacacttctagttcttccatccctggtcgacaaagacataaacttgggaatattggcaggatttta

SEQ ID NO: 15329 - DNA, 527 bp, Homo sapiens
ctttaagayattaggttccctagaatccaaaaatgacataatttggcatatttagtataaaaattacacaggaagcgttgtcaaatatgaaatggtgattggtttcgtttgggctgtagttgtataactgtgttattgatatgtgttccaagatcatgggaaactcctataattctgatatgacttggtatacattatcagtaacagttataattgttatgctaaattgtcgtatgccacagaggtaacaaatttccttgtcaattgtgtctttgactatggctgccctaaaaccttttgtcatccttggacaattgttgtcttgtttgggtcctctttagaaggtggttctactactactacttggtttttgtactacctcttttctttccctgaagtcagaagaatcagggcagatatagaaggaacacatagacatttttcattacccagggtggttcagctggatatagatattaggaaactagtcagtgttaaatggctatttttttaatttcaatacgttt

SEQ ID NO: 15330 - DNA, 591 bp, Homo sapiens
tattttctcttcctctatttctaagttaaaagtgacatttctttcactctgctgtttggcttgacaaacaacgtctttcctcctcctgggatagatttgattgaaggggatgcatcaggtaggaaagtaaaagttttgtttcccgattgctctggcagtgctgctgctgacttctcatactggagatgacagcagcttcacaaggtctttgcaattttatatgcctgaaaaaaagggacataaaatttaaaccacgtataggagaaaaacgcaaattttgaagtatgtacagtgtgctcattatacatacttagtgttacttgtataggtactctatcaacagagttgtaaattrtgtaatgatcttgtcattttgtaaactttttgtcttaatgcaattggtcttgattgttgcagagaattattctggaaaaaataaacattcacatgaattgcaaatacaaatgtaaaagcattacattgttgaacaatattgcagcatatcagcaacaaaggtaaaacaatgttttcatctacatagttgactacataagctatatattcatggagtaataaaagtactcaatgttt

SEQ ID NO: 15331 - DNA, 591 bp, Homo sapiens
tattttctcttcctctatttctaagttaaaagtgacatttctttcactctgctgtttggcttgacaaacaacgtctttcctcctcctgggatagatttgattgaaggggatgcatcaggtaggaaagtaaaagttttgtttcccgattgctctggcagtgctgctgctgacttctcatactggagatgacagcagcttcacaaggtctttgcaattttatatgcctgaaaaaaagggacataaaatttaaaccacgtataggagaaaaacgcaaattttgaagtatgtacagtgtgctcattatacatacttagtgttacttgtataggtactctatcaacagagttgtaaattatgtaatgatcttgtcattttgtaaactttttgtcttaatgcaattggtcttgattgttgcagagaattattctggaaaaaataaacattcacatgaattgcaaatacaaatgtaaaagcattacattgttgaacaatattgcagcatatcagcaacaaaggtaaaacaatgttttcatctacatagttgactacataagctatrtattcatggagtaataaaagtactcaatgttt

SEQ ID NO: 15332 - DNA, 534 bp, Homo sapiens
ttttgcacactctatggatattactcaaaatgctgcatggccatttattcattggtcagcccaagtatgggggcttggctgggacaagggtgtggtatcagggagggcaagagttcctggtgcagaaatgatgtaggaacttgaggacaagtcaaactgaacgtgtatctgacttccagagtgccaatactgtttcatgcatttactgttgttctagaacattttgatatattatcttatttaatcctcacggtgccactgtatgacaatagctatttgttatttctcrccacagtatcaatttgcagtgaaggaagctgagtcccagagaaacaaagtgacttggttcaaggccacagaattcataagtgaaagaggctggatttgaacctggatctcccaatgtctcaagccacactgggttgcctcttgaaattgcttgttcagaggactaaggagagacactaaagcatcaggacaccatccaagaaaggagaggaagggagggaagcaaaagtcagtaagggtccctga

SEQ ID NO: 15333 - DNA, 604 bp, Homo sapiens
tggcttgccatttgttctggtatttttaaaattactaagacataaataaacatatgatctaaatgcagaaataggggtctctgtccaccatgtgctagaaaaatatctcagggtctcaggactaaaataaacagaatttctaccatatgtagaattgaaaaactattgaattttgcccaattcagaataaggcaaagcatgagtaattacttttttctctcttttcattatagctacagggcaagagtatgaaagatgagcaattatacgatgctcttaattgatacaagaagtcaactsagttaactcatggaaaaccagtttctattctttcccccacacttctttgtagaagaaatttgtatattgaagataattacttgaactctcattttcatttctatactataaaaaatcaatagatttttaaaaatgtttggagaagacgcgtaaatagaaaaaggagcagtaaagaaacaaatatctccatgtagaaagactttaaaatgtttgtgttggtattgtttaagttactgtaaagagtatcttttcaaaagaaaaactaagaataaaatggaataaactggggggtgagcataggcgt

SEQ ID NO: 15334 - DNA, 606 bp, Homo sapiens
gctgtaattatttgctttatgtgtggctgtgtgaaattttctcactattcctaatttctgtgtttatacaaacaggaaaaatatattaataccacatgaaatacaaagctgtttgtagaaattcaataggaatacggacaaatcaacaggcgaatagtcctattaattaatacaatcawaaaaagaaaagaagttacatgttaaaagtagaaagagtaagaaattaactatgaaagtcatgactaagaattcatcttagggatggagtaacccagtttttatactatacagtctaaaactttcagaaaatcatttagatttttcccttgtatttcctactggtctaagattccttttttatttttcaaccccccaaaaagtagatatgaagatgatggttatgttatcaatgtgtgagagagaactttttaagaagtatagcaaaatttatgctactgaggagagaagataaagccttttaaattattcatattgatagaagtttgactacgcaaaaactttgccaaaataaatttagaggcattaaatctaagattctttattgcaattttagaattaaaattccacaagaaaaatatcagaaaa

SEQ ID NO: 15335 - DNA, 606 bp, Homo sapiens
gctgtaattatttgctttatgtgtggctgtgtgaaattttctcactattcctaatttctgtgtttatacaaacaggaaaaatatattaataccacatgaaatacaaagctgtttgtagaaattcaataggaatacggacaaatcaacaggcgaatagtcctattaattaatacaatcataaaaagaaaagaagttacatgttaaaagtagaaagagtaagaaattaactatgaaagtcatgactaagaattcatcttagggatggagtaacccagtttttatactatacagtctaaaactttcagaaaatcatttagatttttcccttgtatttcctactggtctaagrttccttttttatttttcaaccccccaaaaagtagatatgaagatgatggttatgttatcaatgtgtgagagagaactttttaagaagtatagcaaaatttatgctactgaggagagaagataaagccttttaaattattcatattgatagaagtttgactacgcaaaaactttgccaaaataaatttagaggcattaaatctaagattctttattgcaattttagaattaaaattccacaagaaaaatatcagaaaa

SEQ ID NO: 15336 - DNA, 524 bp, Homo sapiens
taaaaggtactatggcaattgctgatgtggctcgctgcgtgggcatggcaagatgacgtggcaaagtcccagagtgacagttagagcccggttatcctcctstgtggcacactgcttgtccctttccttcacagcactcctctcatttgtaattcgctagtattcttcttcctactgattgatcctctgactcctatgtttggaccctcagcaacaagcagccacggactgtgcgtgttcttgctcacgtgtgtctgcccagcaacaggtacagtgcccagaatgagagctgcgtctctagcatttgcatgatgttatgacagtctttgaggccagaaagagctacagcaatggaaaatgtttggagacttggagagttaggcaagaaagacagggactgaactctgaacagctgcagacagtgagtcagctgggtggattaaggatgacctataggaagcaggggagaaaggagcaacagtttctttgatgctcctcccatcaaaacatggggttgatgtccc

SEQ ID NO: 15337 - DNA, 516 bp, Homo sapiens
taagctagacttaattaaaatttaaaacgtcttcgaaaaatattgtgagaagaataggaagacaagccacaactgagagaaaaatatttgcaaagtatatctgatacaggtctttatccagaatatataagaactctcaaaattcagcaataggaaaacaacccaatttttttaaatgggcaaaagatgtgaacagatgcttcaccaaagaagatatagggatggtatataagcacatgaaaagatgctcatcattagtaattagaaaaatgaaaattaaaaccagaacaataccattatatgctattaaaatggttaaaatttaaaaggctgatgatacccagtgttggcaaagctgtggaggaactgaaaatctcatgcactgctagtgatatacaataaactataaatatttcaaggttataatttgataagttttgacatatgtacatgcccatctgatacataatacagacagacatatacatatgtcaaactgayatacaataaactata

SEQ ID NO: 15338 - DNA, 556 bp, Homo sapiens
tgagacatagctttacatacaattattaatgaaagatgccaaatgggacagagccatctatataatttaagctatatgaaatattttatgatagccaaacaccatgcgttaacataggttctataacaaagccatagcaactgattataaattattttacattggtcactaaaagaaaacattactctaattgatgcgtttactagtatctttcagaaaattcatttagatctttgggaaaaaaaaaagcttgctcagatgtttggaagtaaacggagcacctggatgactaygtcttctctcctccaagtcatgaaggagtcaagcatggccatactgctttcctactcactgaacagctacactttgctttgcataacagatgtgtccccaataagccttttgcaaatttaattccattttcaagaaatgtgtgcaatttcctatttagaagttgccattactgaaccatttttcaataaagtaaattccaaagccattttctaatctgttcatattgttgaagcaaatctagattttcacaagctccttttag

SEQ ID NO: 15339 - DNA, 1351 bp, Homo sapiens
gatttgcttaagctagtttgaattgggtttctattccttgaaatggaaagattccgtctacagacaccatcttgtcctttctcttacattttcagatgaaaagagtaagagccctatagcaggaactagctcttgggtcttccatatcttcgactaagctttgtacttcagattaaaaaaaaaaaaaaatccggagtagaacaactattttatattgtttagaaagtgaattttgtcccaaaaaatgacaaaagatttatgagagctcttctctgtcctcaagccatgcatagtttaactggagagacaggctcagcatatatyaaaacaaggcagtgttttaagatttagttcttgttaatcagggccaaaaaaaacccaacttctgatgaacttggttcattcactctttggtagaaatggtagcagacccataatgttcatatttctaccaacatggttaacaggcagtttcatctggggtcatgagttggtgattccttcaccctgataattaggttttgccagcctggggtttaatgaaaattattaaaatggtgaattggaggagacttgcctagctgtgttaacaggagcatagttccttggggatagattgctcagagcttcagtgttttcaggattgaactgaatcatttattggtcacattgtttaagaaacaataataaacaaataataaaaacttgagaggcatgggagatggcctagtttttgaagggctgtggaatacagttagggatctctagacttggttccacacataacatagctttttacagttatcactggacatttacaatatgccagatactacgctaagcactttatatggattatttcatttaattctcataacagctcttgaggaatgtaattcattctccttttgcagttatgcaaactgtgactcagaaaagtgaatttgcttgcccaaagttagacagctaataaacgtgggaggcagaatttgaaatcagttccagagcctgagtcttaacattacctataccgccttcccagtaaaggaaagaacccagggatagcagggaccaggggggaggagtgtcactttgcagagagatgtgcactgagaggaccctggattctaatggactagctcacgatgtgcttcacttatcccagaacaaagtaaagaaggcccgagtaggtgcaatggcaggaggagaggcaaggaggatggcaatgggagattttgcaaaagaacactgcaagacttagaaaaaaatgaaagagagatgagtcaaaacatatcagagtccattttaaacgcgggtataaaatatcagtgtccaaaatagtagctgtcaa

SEQ ID NO: 15340 - DNA, 554 bp, Homo sapiens
ggtcatcatcctcgacctgttgcatcagaaactctagaagggaggtgtatagatccctctaggtgattctgatgcatgcccaagtttgagaatgactcccagaagatagcccatactagctcatggagatcatccaccttgttggtggacttcaagagacccaagaatggaggtgaatattatcagaactacatacatggagttccttatcaatgctccccactcctgtcttctcccctttgtagttttcttcacctacgtggccagcattcccaccacagtcacccattttgacaacaaaaaggtaatctgtcttctggaaatgttaacactttaaagagaatggctgacagagagcaagcttatttaaaaaataacttcctaatgctgggacttggagcrtctgtgatatatctctatattccataatagagaagacaaactcttcaattcatttttgagcctggccctggtctagagtcctgagaatttcttgcccctcaaccatcttaatgtcagcggagaagcttctaatccatctaccttttttacct

SEQ ID NO: 15341 - DNA, 526 bp, Homo sapiens
tacaaacaaacagttagatggaaagtgtaagttctagtatccatcacagcagggtgactataggaaacagcagtgcattgcctacttcaaaatagctagaaaagatctgaagtgttctcaacacgaaaaaatgatacatgtttgaggtgatgggtatcctaaatactctgattttatcactacacattgtgtgcgtgtatcaaaatatcaagtgtcccataaatacgtacaattattatgtatcgattttttaaatgggggcaaggttttgtcttcttttgccttgcaaagctcagaaccaagcctatacattttaagtcgatatttttcttcaaggaaatgaacatttagtagcaaacagacaaagtttcaggtaactgtttttaataaaaatggtcaagtaattgaccattggttgttgtgtgggcttcatrgattaatggggagtaacagagtaatttaaagcatttaggaattcacttcatagaaaacatccttaggtggaaagtaagccaaacatctcccc

SEQ ID NO: 15342 - DNA, 518 bp, Homo sapiens
tatacacatgctcctcagaagaaagccccatggtcagttttggaaacggtctttcttagaaattcctaattcagattagcatattaaaagttctgaggggaaaacaatttttaactttgcataagctgatgtttcgcaaaagtatttgaccccaaaattttcttatttataacacctattgatatttgtagaacattgatactatgtgggacatagtattgctgttttaggagaattttttaaatgctccaattgatttgttaaactacttagccggtctcagtctagggcaggggtcagcaacttataaaagctggcttgggatctgtttttataaggcccagragctaacagtggttttcacattagtaaagagttgtaaaaacaaaaactaagataacaacaacaaaaaacgattgagcaacagagacctaaaacatttactatctggccctttataaataatctttacgtacaccgccctaggaaattaacctttaaaaaattaaatccatgtg

SEQ ID NO: 15343 - DNA, 555 bp, Homo sapiens
atatgtgtgcgtgtgtgtatacatacatacgtatatacatatgcatatgcatacacacatacatttttccagttagggacaaactaaattgtgttaccagtgcatatcttgatctcctgtgactcatagccaagtgggatttgctagacagaatgagatttttttttttgtgacaagttctaatctcagattcccccactctaacacctctattttaagtctttgttactgttttgaagtttccgagttaaaactgattgcactattayagaaaaagaaagccagaggagctttttttggtttttatttttaaatttgtgtcttgcttgaaggcctaggaaatggccctgcaacaccaacccgggctttctcaattgattgatcagagctttagctgatttccttttctggcgtgaatctcattctatcccaagataccagtatattcatccctttctaattttgcaggtcattacacagcagccttcagagaattaccaggtatccacaagacacctcaggagatctacacattcccagtggaagatcatcgct

SEQ ID NO: 15344 - DNA, 555 bp, Homo sapiens
atatgtgtgcgtgtgtgtatacatacatacgtatatacatatgcatatgcatacacacatacatttttccagttagggacaaactaaattgtgttaccagtgcatatcttgatctcctgtgactcatagccaagtgggatttgctagacagaatgagatttttttttttgtgacaagttctaatctcagattcccccactctaacacctctattttaagtctttgttactgttttgaagtttccgagttaaaactgattgcactattacagaaaaagaaagccagaggagctttttttggtttttatttttaaatttgtgtcttgcttgaaggcctaggaaatggccctgcaacaccaacccgggctttctcaattgattgatcagagctttagctgatttccttttctggcgtgaatctcattctatcccaagataccagtatattcatccctttctaattttscaggtcattacacagcagccttcagagaattaccaggtatccacaagacacctcaggagatctacacattcccagtggaagatcatcgct

SEQ ID NO: 15345 - DNA, 730 bp, Homo sapiens
tgaatcagtgtgaccttaccttcatgcagtcaatcarcaagtatctatagagtctctactgggtgccaggccctgttccaaaagctaaattcacaacaacaacttattcctaattcttattcatttcctaggaatgagtgtcttccacaagttccttttggtctctggaggggttcgtacagtgaaatcttcagaacatatggtcagaaaccttgaaaattccatgggctcaattattcccagttaacctagctctattaaagaaaagattgtcctgtcccaacccattagttaaatccatggcactccagcaagcctgcctggggtgggttatgaggctttgcttctccctccatgttgcttcctttattctggctctaccctccttgctcagtttgcaagctttcttccatttccattggtctccatgcaccaaccgcagagccactttctcctcctcacctctgcagagccagacgcctacttcctgcttcttttccccaaccctaccacctccttccccagcccccttggctgcaggaaaccacacagcaggaccattctacctggtccactaaacaaagataaaattaaggtctattaaaatgacattgcagccaggcacagtggctcccatctgtaatcccagcacattgggaggccaaggcaggaaaatcacttgagcccaggggttcaagaccgacctgggcaacatggcaagacctcctct

SEQ ID NO: 15346 - DNA, 730 bp, Homo sapiens
tgaatcagtgtgaccttaccttcatgcagtcaatcaacaagtatctatagagtctctactgggtgccaggccctgttccaaaagctaaattcacaacaacaacttattcctaattcttattcatttcctaggaatgagtgtcttccacaagttccttttggtctctggaggggttcgtacagtgaaatcttcagaacatatggtcagaaaccttgaaaattccatgggctcaattattcccagttaacctagctctattaaagaaaagattgtcctgtcccaacccattagttaaatccatggcactccagcaagcctgcctggggtgggttatgaggctttgcttctccctccatgttgcttcctttattctggctctaccctccttgctcagtttgcaagctttcttccatttccattggtctccatgcaccaaccgcagagccactttctcctcctcacctctgcagagccagacgcctacttcctgcttcttttccccaaccctaccacctccttccccagcccccttggctgcaggaaaccacacagcaggaccattctacctggtccactaaacaaagataaaattaaggtctattaaaatgacattgcagccaggcacagtggctcccatctgtaatcccagcacattgggaggccaaggcaggaaratcacttgagcccaggggttcaagaccgacctgggcaacatggcaagacctcctct

SEQ ID NO: 15347 - DNA, 588 bp, Homo sapiens
ttttaaaaatatatatacttatatatagaaataggaactttaaaaaccttcagagatgcaatttaatctctcttaaccttagtttctccatatatgaaatgagagtgataacagtattactttaaagagcatagctattatatctctttacatatattttagtaggatgaaaatgtataaagttgatagctgaaaattagtgaactgactgtagttctagtattctgtctgactttggaaatctagaaattataggaatatgttcaacttgattcatgtacatcatttgatgtaaatgcccttccctttccaatcataaaaaggatataattaatattatttgatcttcatctayaggaaatacatacattctcttttgtatagattttttatacaattttgtatagattttgtatagatttatatacaaatgtaacccatttgtatagattttttgtaatttttaagatagatatttctaatagggactttcaaatgacctcagacagtaagatcacaaaattttgagaatggtctgtatttgtctttttgatcaatactcactcggaagcatctaaagatttcatg

SEQ ID NO: 15348 - DNA, 236 bp, Homo sapiens
ctcagttagtgtgtgccagccacatactaaagtggctgaatttagttagggcctcttactgtcctgtatttcccactcagtccttcttttaggttggcttctttacgcctgtgggagaaaacaaaatagacacttgaatatgagagttctagtcctgtataaataatacrgtaaggccttcagataattagatttctaggctaaaaagaaaaattagtgattcaataacaaaacca

SEQ ID NO: 15349 - DNA, 510 bp, Homo sapiens
caatgagaaatacatatttaaagtattttttaattaaaataaaatctayatgcaacaaaatgcactcactttaggagtaaaatcaaatgagttttgacaaaaatatttgttaaatatttataaaatataaaatgtttggccaggcgcggtgactcatactagtaatcctagcactttgggacgctaaggtgggtggatcacttgagctcaggagtttaagtccagcctgggaaacatggcgagactccatctctacaaaaaattcaaccattagctaggtgtggtggtgcatacctgtagtcccagttactcgagaggctgaggtgggaggattgcttgaacccaggagtcagaggttgcaatgagccgagattgcatgactgcactccagcctgggtgacagagaaagaccctgtctcaaagagaaagagaaaagtatatatataacctgtataatacaccaacaaagacagaacaattccacaatgccaaaatatttcttttatgttt

SEQ ID NO: 15350 - DNA, 551 bp, Homo sapiens
atttgcatttggagcaacagaattgtgagtgtggtggagaacacaaagataatcggagcaggaggatctggcgccgagatagatgaatttcagaaatggccccaatgttcacacttttctggatatactccctctgcaatttgattttacattctctttcattaataagtggaatctattgcaccaatccatgaatctggggtggccttgtgccttgctttggaaaacagaacgcgacagaaatggtggtgtgctcattcttagcctaggacttgtgtacttctcactctcaggaaaccctgtcattctcatatggacagsctgagctagcctgctggatcatgatagatacatagtccaatcgtttctatcattctagccaacagactgtcatgtgagtgaggacatcttagaccagtgaacctactggctaaccgtagaaaacctgagtgaatctaaatgagatctgttcagcccagcccaaatcaaggaacaacacagcagacccatagaccatgagcaataataatcacctgttgttttaagcattg

SEQ ID NO: 15351 - DNA, 650 bp, Homo sapiens
ggcagttcttatgactgcagattagtgagcaggtaggaagacaattgtgcctgcctaataataactgccccctggtatttaaagctgtaattcagctgctttgctgctgctttgaaaggacatagcgtgtgtgagctaaaagagtaacggaataaagtccaggttgtagccttagtatgcagagcgtgggacatgacagaaaaacaggagacacatgatgtattcctaactcagagaatctatcatcaatgcagagcaacaaatggtaatgagtctgagttcagtaaatgtatcagaatgtactttttaagaatgtgatacaccaaccaatagctgagtttgaaaaggaaacagaagatgacccmcaaattacagataatcaagagtgaaaaagcattttgagttgaattacttagcaattgttaaaggtagtttaaatgctatcttactaaaactatctacaacatcagtggcaaagacacttatgatactgtgagaattcaggaagaatttaaatggaattgtaacataattttatgatttgttgaagattatctttttctcatttttttccttactctttgttactccaactcaatatagcaaatctcatgtttagaggatcgaaaaaaaaacattatatgatctca

SEQ ID NO: 15352 - DNA, 528 bp, Homo sapiens
atcaggctgctccagggtccaagacctgtgggggtccccttggtcttgagtcttacctctgcaaaaactccaggtaactctctgtatcaatttagaggcccaggggagtcaggggcattctcccattcccaggattacatagatacttgttggaagtgtgagtcccctggggactttcactcattcactatttccccattttggggagcttcctctggctccacatcaattccagataggctgctgcccagctttgctcttctctgttctctgtgtcttctcagtcttttgatggaacctgatgtggtttcttagatgattggcttgcagggtcagtgattacttactactttgcttcctctctgtgagagtggtgcacactggcttctagtccaccatcttgaccccccctccagttttttaatactactaaagttactacaaacatgcaggtatgycttggtatagacatatgctttcatttcttttgatgggtggagtaaaatgtctagattacataatcagtca

SEQ ID NO: 15353 - DNA, 528 bp, Homo sapiens
atcaggctgctccagggtccaagacctgtgggggtccccttggtcttgagtcttacctctgcaaaaactccaggtaactctctgtatcaatttagaggcccaggggagtcaggggcattctcccattcccaggattacatagatacttgttggaagtgtgagtcccctggggactttcactcattcactatttccccattttggggagcttcctctggctccacatcaattccagataggctgctgcccagctttgctcttctctgttctctgtgtcttctcagtcttttgatggaacctgatgtggtttcttagatgattggcttgcagggtcagtgattacttactactttgcttcctctctgtgagagtggtgcacactggcttctagtccaccatcttgaccccccctccagttttttaatactactaaagttactacaaacatgcaggtatgtcttggtatagacatatgctttcatttcttttgatgggtggagtaaaatgtcyagattacataatcagtca

SEQ ID NO: 15354 - DNA, 650 bp, Homo sapiens
tatctatatagtcaatcatttttctcttttacgtctgtcttgatctctttttacccaccacatatgtataactatgtgaaaaattatatttgtgcataataaaatgtgataactttttacaacagaatgtgattttatttttatgtttttcttcataaggtcccaaagaacttcaagtacttctaatataagctgaactgattagatttcattaatggaattmcatatttatgaaggaaatacaaattctcagtccaggatttaagtatttctcttaaagaattctacctgggattatgattaacttaaaataaagaacccagatgtgccagctctgggcagattttgtgccagctttaggcagcttcagattttgaagctttgtggaggcagaagtctctccatattcagatacatgacattggctgtaagagcaactgagggcactaaatagtgatcacgtttcaaatacagaatttataattaattttaaattaattttcagatttagtactaaagaacttgaccagatcaatggatccaaaggatgtgcttattttcaaaaaggaaatatttatatttctcgctgtagtgctgaaattttttggatttgcgagaagacagctgccccagtgaagactgaggatttg

SEQ ID NO: 15355 - DNA, 543 bp, Homo sapiens
tttatccaatgatataagccatctttctaatattaactttgtcagtcatagaaatgattattggtttctaccttttaactggtgttgaactcaggagagggaaagatgtgccgtttattgaggcacatcttcaacacacaacttcaacatctgattcactggaccaggagccttaaaaaataaacagggagtgaaatttggagacccaactattatgttaagaggcttttggkgaagccagttttgggtttggacttgagcaagcatacatttgtgattgcagtggttttgtggaagtttatattaagccagaagtctcttttaatggatgtaactggtttttatcagttgtaactggggaggaagtttcaggttttcattgctggccagggggagttttttttttttttttttttgatggagtctcactctgtcgcccaggctggagggcagtggcacgatctcggctcactgcaacctccacctcctgggttcaagcagttctcctgcctcagcctcccaagtagctgggactacacgtgt

SEQ ID NO: 15356 - DNA, 567 bp, Homo sapiens
tgcagagtaatgaagaaattatataatgctatcttaatagtgaaaataaatctattagtcttgtatcagtcagggttcaactggagaagcagaaccagtaggagggcaggagggagaataaagaaaataatgacatattactatggagactgactacgcaagttggagatcaataaggcagtcgttttgggaaaacaaacaaataaaaaaaagactggagcaggcagaaatgtaactggcaccatttgatccaattatcccattactgagtatatactcaaaagaaaataaattattctaccaaaacgacacatgcactcctatgttcatggctgcactattcacaataacaaagacataatcaacctaggtgtccatcaattacacactgtataagtaaaatgtggtacttatacaccatggaatactacacagccataaaaaagaatgaaatcatgttctttacagaaatgtggatggagctggaggctgtaatcctaagccaattaatgcagcatcagaaaaccaaatgctrtatattcttacttatatgcaggagctaagcac

SEQ ID NO: 15357 - DNA, 520 bp, Homo sapiens
aaaaggatatagactctagcagatacgattcccaagcagggtggtgttcagcaccctgatctccttcagtttttacctgaggcaggttcacatctgctttacagctcatttccttcagtttctcatacatttctctcaggagtatacccatcttagccattctagtttgacttctcttgagttgctgaaaaattatcctgccttctcttgccaggctctctacgtgcttttgctcttcttcacggaggtattgacacaccttaggatattcagcactgatcatcatgctccgcaaatttataaaaacctgtagtgatagttgattaattaaatcatgtgtctaagtggttttaytctttccttatcagctattctgctttgtttcatgttttgtgctattctactaaatatagtttaatgcttttccacttcaaatacagtataaatcttcctttcttcctccttcccttcctcttccgtttccctgcatcactccatctactttccctcaaacctccat

SEQ ID NO: 15358 - DNA, 520 bp, Homo sapiens
aaaaggatatagactctagcagatacgattcccaagcagggtggtgttcagcaccctgatctccttcagtttttacctgaggcaggttcacatctgctttacagctcatttccttcagtttctcatacatttctctcaggagtatacccatcttagccattctagtttgacttctcttgagttgctgaaaaattatcctgccttctcttgccaggctctctacgtgcttttgctcttcttcacggaggtattgacacaccttaggatattcagcactgatcatcatgctccgcaaatttataaaaacctgtagtgatagttgattaattaaatcatgtgtctaagtggttttattctttccttatcagctattctgctttgtttcatgttttgtgctattctactaaatayagtttaatgcttttccacttcaaatacagtataaatcttcctttcttcctccttcccttcctcttccgtttccctgcatcactccatctactttccctcaaacctccat

SEQ ID NO: 15359 - DNA, 528 bp, Homo sapiens
gacccctttacctctattccctactctttcctgaaccaaacattacaacttaccaagaacttttttctaaatccaaatattatgctttagtcctagaagtcttcaccttccttctgcatttgacaccattttctacttattccttttaaccataccttgtttttcctgccacagaaaaatacattcttacaaagccactgattcatttcttctgcactttcttatccctgaaaatgggttcttcttggccagcatagattctacaaacctggattctttgtatccattctctgctttatttttccctgaagcacttcacgaacattatttattataaagtttacattttaatttgtagattgaattccmccactagattatagactcctagggtaagcgatctatttcttcttttgttcacttctgtatcattttgttgggctacagcagtaagcaacacatgataggccctcacgagaatgcaggactcctcagaaaatccatctgaaatgatcaacatgatttttt

SEQ ID NO: 15360 - DNA, 1227 bp, Homo sapiens
aaagagcagagggaaaaacccaaaactgttaatgtttgaggtgaaatattggcagcctagctattttttaccctttacagactttaacatttgagttaactttccagattctattattaccttgatgtgtgactagataattattatattcagtttttgttaattcaaactcgtaacttgaataaaaggaaagacctaattcatgagagacacagcaaaaaatacaactattattattttttttaaatcctaaaatgccacctaaggagattcagaatctgtttttaaaataagtaaaacatgaagaacagttcttcagggaaagatgattcttgggtcaagcaaagctttaggttttcccagcactgctcccacaaaggtcacaacgttgtttttcacattgtgtttttaaggatttttaaggatattcttttgagagacagattagcatggtgattaagcatgtgacattgaagccagactgcctgggttgaaattcacactctgcctatattagctgtatgaccttgtgagttaattaactcatctgtgcctcattttttccataaaatgggagtaataatagttcccacctattagagcttttttgataaataagtatataaatgaatgcctgtagatatataattatatatatatatatttattattattattatttttttttgagacggagttttgctcttattgcccaggctggagtacaatggcacgatctcsgctcactgcaacctccgcctcccgggttcaagtgattctcctgcctcagcctcccgagtagctgggattacaggcatgcaccaccacgcccggctaattttgtatttttagtagagatggggtttctccagttggtcaggctggtcttgaactcccgacctcaggtgatttgcctgcctcggcgtcccaaagtgctgggattacaggcatgagccaccgtgcccagccaaaaattaatagatttttgacacatgtggtgaaggaagtttaagaggaaggtgaagggaaaagtccagaggcaggatagcttgatttgtgttttataggaacaggatatgattcaagctaactggaacatagaaatctttagggagattctgggaaataagattggattagattgtggcagatttggagtgtgaaaccagaggatttgctaggaaatataaaatcccattctttagagtaatatagtctatttgtcat

SEQ ID NO: 15361 - DNA, 1227 bp, Homo sapiens
aaagagcagagggaaaaacccaaaactgttaatgtttgaggtgaaatattggcagcctagctattttttaccctttacagactttaacatttgagttaactttccagattctattattaccttgatgtgtgactagataattattatattcagtttttgttaattcaaactcgtaacttgaataaaaggaaagacctaattcatgagagacacagcaaaaaatacaactattattattttttttaaatcctaaaatgccacctaaggagattcagaatctgtttttaaaataagtaaaacatgaagaacagttcttcagggaaagatgattcttgggtcaagcaaagctttaggttttcccagcactgctcccacaaaggtcacaacgttgtttttcacattgtgtttttaaggatttttaaggatattcttttgagagacagattagcatggtgattaagcatgtgacattgaagccagactgcctgggttgaaattcacactctgcctatattagctgtatgaccttgtgagttaattaactcatctgtgcctcattttttccataaaatgggagtaataatagttcccacctattagagcttttttgataaataagtatataaatgaatgcctgtagatatataattatatatatatatatttattattattattatttttttttgagacggagttttgctcttattgcccaggctggagtacaatggcacgatctcggctcactgcaacctccgcctcccgggttcaagtgattctcctgcctcagcctcccgagtagctgggattacaggcatgcaccaccacgcccggctaattttgtatttttagtagagatggggtttctccagttggtcaggctggtcttgaactcccgacctcaggtgatttgcctgcctcggcgtcccaaagtgctgggattacaggcatgagccaccgtgcccagccaaaaattaatagatttttgacacatgtggtgaaggaagtttaagaggaaggtgaagggaaaagtccagaggcaggatagcttgatttgtgttttataggaacaggatatgattcaagctaactggaacatagaaatctttagggagattctgggaaataagattggattagattktggcagatttggagtgtgaaaccagaggatttgctaggaaatataaaatcccattctttagagtaatatagtctatttgtcat

SEQ ID NO: 15362 - DNA, 537 bp, Homo sapiens
aagtaaaagacaaacagatgtagggaaatatgcaacaaaaatgacaaaagattatgttttgttgtataaacagtttacatatggagaaaacgcacacaacatatataagcaaagataatggaataagacttacaaactacaaatcaatatagaaaaaaaccaaagcagcctaatgtaaaagtgggcagaggatgtaaatgggcaatttacataaagacaaataggcaaaagaaaattaaaatrtgttcatcttcactagtaatcaggtaaatgctaactgaaaccagttataaaacagaaaaaaacggccaggcgcggtggctcatgcctgtaatcccagcactttgggaggccaaggcgggtggatcacaaggtcaggagatcaagactgtcctggttaacaaggtgaaaccccgtctctactaaaaatacaaaaaaattagccgggtgtggtggcgggcgcctgtagtcgcagctactcgggaggcagaggcaggagaatggcgtcaacccgggaggtggaacctgcagtgagcc

SEQ ID NO: 15363 - DNA, 521 bp, Homo sapiens
gagatctacaagcagcatttacaaactggttaaccaaataaatagtataggtaatatggaagtgtgatttcaggaaataacttttctctgaagaatgcaagtccttttaaatgtttacccccacggagtcattaaaatgagacagcaggccaggcacagtggttcacgcctgtaatctcaatactctgggaggctgaggcaggaggatcacttgaagccaggagtttgagaccggtctgggcgacatarcaataccccatttctacaaaaaaattttaaaacctggccagatgtggtggtgcagacctgtagtccaagctacttggaggactgaggcaggaggatcattgcttgagcccaagcattcaaagctgcattgagctacaattgtcactgtactccagcttgggaaacacagtgagaccctgtatcaaaaataaaaagagagaatcacaacctactccctccttgacctatgtattcatctcttgaaactgcttgctattgcttgcaagtagcta

SEQ ID NO: 15364 - DNA, 569 bp, Homo sapiens
atggaggaaggaacaagaagtcatccacatagcagagagggctttaaaaacttctaaagttttattcgattttgtgtgtatttcataatgagagtggcaatgtctaaaataggaagaacagacatgagaaagagcagaattcattttcttccaccaaactttcaaagacctagacccaccaattcttcagggagaaaggaggctactatactaattactacatagcctcttactattcgggcctttccataaacacacaacccaagctctcaccaatttttaaacacttttaactttgatgtaattataggttcacaggaaattatcaaaaaatgtacaatgaggtcctatggatccttcgcttagttttccccaaggataacatcytgaataacacgatattaaaaccaggaaattgacattggtacaacccatagaacttatttagatgtcaccacatttacatgtactcatttgtgtgagtgtgtagttctatgcaattttatcaaatacgcagactcttgtaaccaccaccgcggtcaagatacagaacagttccatccgcaagc

SEQ ID NO: 15365 - DNA, 716 bp, Homo sapiens
gtacagttttacttagttgtgagaatagaaacttagttggaggaaaatgaaaaacactgggaaataagaaacagagataaaattactgtgrtgagtactttgctatggaaaggcacagagaaatgaatcgttatctcagaacagacatgaagtattattttttttcacctggcagggtatatctgcagcctgataaaaattatcttgacaaagatcattatcttgagaaagataacacattatgtggaagacagaatcaatgataagagacagttttttgagtgtatgaggaaaactggactcttaaagctaaagtatatgaattagcctgtgattgaactggtggcactctattttaatggtttatatacagtttttatttaattccaacaaaaacctagtgatgtgggcacatttatgatccacatcttacagatgaggaaactgatctatggaaggattaagcaattattaagcagtttacttataaaaccactgaaacttatactttagaagaggacaatgaactgaagaaaaaacaaaaattcctaaactgaggtagagactgtggagtaaatgcatcagggatactgttaacttctttctggaaagagacagaagttgtggattgttagaatttttttctttcaaccaattcaaacttaaatatgctttactttgctattatagctaaaaatattcttataattctacag

SEQ ID NO: 15366 - DNA, 538 bp, Homo sapiens
acctaggaagtcttaataggagggtaggataagcagagcccatttgaagattttggtgcaagaagacacgatggaattgtagcaggaaatatggtaccaaatatgtaaagccattaaatatcataaaatttcccacccttttccagatcaaagaaaaggtgataagaggtagatacaaaaatgatggtctttttatttttctgaaagattttgtcacctcttagccaagacgattttgtgatattacaaaagaaatagcacattaaaactgtatgtttcwtatgagttcagcttcagagaaaatattgtaggtattttcacactattattttaaagacagcaatgaaaagagatcaagtttaggtacttactcatcaagtgttactttataaccacatgtgtttgttttaattcttcaagaaactctactttgtcactgaatgaggatcaactagaggtgactggttaggcctgggacgaaggtcaaactgagctttgctgaattattttaaacaaaatagatttccaaactcattta

SEQ ID NO: 15367 - DNA, 499 bp, Homo sapiens
gtactgtttgattgaaatgtgccattgagtgattgaagtatgccacttgtgggataatatgtgggatataaattttctgacagattttttttcttcagtcattttcccgtgtaagagaatttaaagctatagtagttattatattaaaattaagaaaaggtattcccattcattttaaagatatttctatttttttaaccattgaaataaaattattggaggcttataggaaaaaactattgactccaaaatatcaaagaaaaaattttaagtaaaaatcaataaatgtctaaatgtttaaaaaygttgtaatcttgtacatataaatttttatattttcaaaaatgaggttcaatttacactcatattattttaaagttgtgttaaaatatttttaaaattttacagcaaacttttaagtttaacttgtatatagatacaactaaatactagaaggaattttgcaaagtgcttagggcacacattgttcttacaacac

SEQ ID NO: 15368 - DNA, 536 bp, Homo sapiens
acccttgctataataaaacatatrgttttaaactgcacacactaaacaaaatattaatagcaataaatatagcggaggccacaaatttagttgctattaaagttttcaggtagtgacatacataatgtttaactagagttaactctacatacaaatctcttgattgcattcctaagaccttacctcccaaacctagctacaaaatgctataaaatagcaaataaaacgattaaatgagttattaaaaggaatattaaactattttatgagacagggtcttcctctgtcacccaggctggagttcagttgtgcaatctcagctcactgcaagcttgacctcccagtagcttggacctcagtctcccaaggagtttaaactacaggtacacactatcacacctggctaatttttttttgtatttttgtagagatggggttttgtcgtgttgcccaggttggtctcaaactcctgggctccagtgatccacctcagtctcccaaagagctaggattgcaggcatgagccacaatgcctg

SEQ ID NO: 15369 - DNA, 536 bp, Homo sapiens
acccttgctataataaaacatatggttttaaactgcacacactaaacaaaatattaatagcaataaatatagcggaggccacaaatttagttgctattaaagttttcaggtagtgacatacataatgtttaactagagttaactctacatacaaatctcttgattgcattcctaagaccttacctcccaaacctagctacaaaatgctataaaatagcaaataaaacgattaaatgagttattaaaaggaatattaaactattttatgagacagggtcttcctctgtcacccaggctggagttcagttgtgcaatctcagctcactgcaagcttgacctcccagtagcttggacctcagtctcccaaggagtttaaactacaggtrcacactatcacacctggctaatttttttttgtatttttgtagagatggggttttgtcgtgttgcccaggttggtctcaaactcctgggctccagtgatccacctcagtctcccaaagagctaggattgcaggcatgagccacaatgcctg

SEQ ID NO: 15370 - DNA, 536 bp, Homo sapiens
acccttgctataataaaacatatggttttaaactgcacacactaaacaaaatattaatagcaataaatatagcggaggccacaaatttagttgctattaaagttttcaggtagtgacatacataatgtttaactagagttaactctacatacaaatctcttgattgcattcctaagaccttacctcccaaacctagctacaaaatgctataaaatagcaaataaaacgattaaatgagttattaaaaggaatattaaactattttatgagacagggtcttcctctgtcacccaggctggagttcagttgtgcaatctcagctcactgcaagcttgacctcccagtagcttggacctcagtctcccaaggagtttaaactacaggtacacactatcacacctggctaatttttttttgtatttttgtagagatggggttttgtcrtgttgcccaggttggtctcaaactcctgggctccagtgatccacctcagtctcccaaagagctaggattgcaggcatgagccacaatgcctg

SEQ ID NO: 15371 - DNA, 563 bp, Homo sapiens
aattgagtgtttattgccttagaacaatataaataccatgataagttcaataactaagattagcataatttcctctaataatactaatggttcaatcacaagcacagatcattaaattattagttcaatttacaaagtagagaatacggaattttatgagcaccagagatcttttctagctgagtaaaaatattcattctcatgatccttctggtatctgatttgaaatagtgggtgagatgatggtcccaccagattgcataagtgaaattggttcaatgattggaagagtgtggctccaagaatatattatgtgggaggatctgggtaactaagtgctccctgaacctccgtgccatcaagctcgctttgccagaagaagcagtagtgcttcccttgaatgatgaarctcatatcttgctttaataacaattctcttgcctaaggtaagttccctacagtggggagctgatgctccccatgccccaaaccccatttcccctaagactatcagtagaattaaatattagcctgtctctgtgagatgtataaacacaggatta

SEQ ID NO: 15372 - DNA, 530 bp, Homo sapiens
cgtgagtcaattctcatgataaatcccctctttctatctattatctatctatctgtctatctatctatctatctatcacctatctatcacctatcttcatcaccaccatcattatctatcgtctatgtatctacctattatctatctatctatctatttatctatcatctatcttcatcacyactattattattattatctatcatctatctatctatctatctatctatctatctatctatctatctatcatctatccattcatctgtatagctttccatcctgttggttctgtctctctggagaacttgaccaatatacatgccaggaacagaataactgaagcagaataatggccctgaggttgaacatccccatttgacatgtatccagtactgaagtagatgagagagagacaaccttgtgtatatggatgtgtaaatatgtgacacccaaaatggatagtggagtgaaaaagtgtggtgtgcattgtgtgtgtgtgtgtagggtgggaggagaaaggctgggga

SEQ ID NO: 15373 - DNA, 619 bp, Homo sapiens
ttttaagactttgctataaacatcagctggtccttcaaaagtgtaccaaattaactcacccaacacaatgccagagtgtgcgttttcatgtcttcttgccacacacacacagcgctctctctcgctctctcgcrctctctctctctcctcccctccctccctctccctctcccttctcatctctctctctctctctctctctctctgtctctctctctgtctcacacatgcacatacacaacacactcacacacacacaaaataatatctcctggccattttatctgaatttctttgaggagtgaggttgaacatgttttcatggttattgctaattttctttatattatgaagtgactatttttgttctttgcccattttccttctgggatattctattttccgtcagagcctttttcaaattgtttcttggagttggtcattcgccctttagttttttatttggtatttttcatagagagaaaattttttaaatttttaagtggacaaatctatacttgttttcctttgtggtttcttaattggtattatgtttagaaagtcttgcttgaataaaaattacataaatgttggcccctatcatattctagtatttcaa

SEQ ID NO: 15374 - DNA, 619 bp, Homo sapiens
ttttaagactttgctataaacatcagctggtccttcaaaagtgtaccaaattaactcacccaacacaatgccagagtgtgcgttttcatgtcttcttgccacacacacacagcgctctctctcgctctctcgcactctctctctctcctcccctccctccctctccctctcccttctcatctctctctctctctctctctctctctgtctctctctctgtctcacacatgcacatacacaacacactcacacacacacaaaataatatctcctggccattttatctgaatttctttgaggagtgaggttgaacatgttttcatggttattgctaattttctttatattatgaagtgactatttttgttctttgcccattttccttctgggatattctrttttccgtcagagcctttttcaaattgtttcttggagttggtcattcgccctttagttttttatttggtatttttcatagagagaaaattttttaaatttttaagtggacaaatctatacttgttttcctttgtggtttcttaattggtattatgtttagaaagtcttgcttgaataaaaattacataaatgttggcccctatcatattctagtatttcaa

SEQ ID NO: 15375 - DNA, 569 bp, Homo sapiens
aaatagatatttgaagaatataaccacttcaaataatagttcaaaagaaaaaaatcaatacaatggagagggaacatatatcaagtcaaccaaaagtaatggaaaagacagatctagaactagaaataaacacaataaaattttaaagaaataagggaggctgttagcagtaaccaacaagaataagtaataattaaaaagcmtcaagataacacaatacagaaagttatttaaaataaagtaccacacatatgagtcaaagagtagtataaatatgtaagaaacaaatcagcaaggtaagtggtcaaacaggaatgttaaaaaggtgacagaaagggataaaaaagtataatatatatttaaaaagtagaagatataaaacatgaagtatccattttgggttcaaaacatcctagaagaggaggagagggagaggaacatagagaattaattatatttgaaaaataattttgtcaactaccagaaataatcaaaaacaagattttaagaaagaaaacactggttaaaataagagattgcatgattaattccttaatcatatggctaaa

SEQ ID NO: 15376 - DNA, 577 bp, Homo sapiens
cagccaggcacggtggctcacgcctgtaatcccagcactttgggaggccaaggtaggcagattgcctgagatcagggattccagatcagcctggacaacatggcaaaascctgtcgctactaaatatacaaaaaaaaaaaaaaaaaatgagctgggcgtggtggcacactcttgtaatcccagttactggggaggctgagacacgagaattgcttgaacctggtaagcagaggttgcagtgagccgagatggcaccactgcactctagcctgggtgtcagagtgagactatttcccctcaccatcccccccacagaaaagtataactcatcctttacctgaatccctgaatttgcttggcataaaaagtcctcacataattggatgagagtgaactcattgcttattgggttattgggtagcactaaggcaatataactcttatgtgagaatagagtcaggacatgatagcctctgattacaaagatggtcatctatcccaatgcctaatttactgagagatatgtttggaagatctgagaaagtgaaagctaacacaattaatgatgggatccgaa

SEQ ID NO: 15377 - DNA, 577 bp, Homo sapiens
cagccaggcacggtggctcacgcctgtaatcccagcactttgggaggccaaggtaggcagattgcctgagatcagggattccagatcagcctggacaacatggcaaaaccctgtcgctactaaatatacaaaaaaaaaaaaaaaaaatgagctgggcgtggtggcacactcttgtaatcccagttactggggaggctgagacacgagaattgcttgaacctggtaagcagaggttgcagtgagccgagatggcaccactgcactctagcctgggtgtcagagtgagactayttcccctcaccatcccccccacagaaaagtataactcatcctttacctgaatccctgaatttgcttggcataaaaagtcctcacataattggatgagagtgaactcattgcttattgggttattgggtagcactaaggcaatataactcttatgtgagaatagagtcaggacatgatagcctctgattacaaagatggtcatctatcccaatgcctaatttactgagagatatgtttggaagatctgagaaagtgaaagctaacacaattaatgatgggatccgaa

SEQ ID NO: 15378 - DNA, 538 bp, Homo sapiens
aaagtgagaattcttggaacacaaagcaaaagaaaacaatcctaaattgtacttagggttcaattaagagcagctgttgtgagcagggaataatacaggagtagagaaagattatcatctgcactgccatgggatgaacaatttttcaatatagggactattctttaaatagttagtctaaaatatttcagacaaaattcrgaataaccacttcactgaatcaacatgtctaagtaaaagttcaaatggcagcatatatgtgtgtgtgtgtgtgtgtatatatatatatatatttagtttaaatatgcatatatttagtttaaaaattggtatatgaaaacccatatcaggctgtatttttatgcatttaaaattttactttgtcagataatttttacttcttccctaacatgataaaaatatacccctttggaggaaaggttattataagggaaattttattttctaagtagaggctttttaggtttctgatgcttttacagacagaatttgccaaagattttgtttcttacagtgc

SEQ ID NO: 15379 - DNA, 538 bp, Homo sapiens
aaagtgagaattcttggaacacaaagcaaaagaaaacaatcctaaattgtacttagggttcaattaagagcagctgttgtgagcagggaataatacaggagtagagaaagattatcatctgcactgccatgggatgaacaatttttcaatatagggactattctttaaatagttagtctaaaatatttcagacaaaattcagaataaccacttcactgaatcaacatgtctaagtaaaagttcaaatggcagcatatatgtgtgtgtgtgtgtrtgtatatatatatatatatttagtttaaatatgcatatatttagtttaaaaattggtatatgaaaacccatatcaggctgtatttttatgcatttaaaattttactttgtcagataatttttacttcttccctaacatgataaaaatatacccctttggaggaaaggttattataagggaaattttattttctaagtagaggctttttaggtttctgatgcttttacagacagaatttgccaaagattttgtttcttacagtgc

SEQ ID NO: 15380 - DNA, 538 bp, Homo sapiens
aaagtgagaattcttggaacacaaagcaaaagaaaacaatcctaaattgtacttagggttcaattaagagcagctgttgtgagcagggaataatacaggagtagagaaagattatcatctgcactgccatgggatgaacaatttttcaatatagggactattctttaaatagttagtctaaaatatttcagacaaaattcagaataaccacttcactgaatcaacatgtctaagtaaaagttcaaatggcagcatatatgtgtgtgtgtgtgtgtrtatatatatatatatatttagtttaaatatgcatatatttagtttaaaaattggtatatgaaaacccatatcaggctgtatttttatgcatttaaaattttactttgtcagataatttttacttcttccctaacatgataaaaatatacccctttggaggaaaggttattataagggaaattttattttctaagtagaggctttttaggtttctgatgcttttacagacagaatttgccaaagattttgtttcttacagtgc

SEQ ID NO: 15381 - DNA, 656 bp, Homo sapiens
tcccctgcccgctagatgtccggtcggttttagcccgcgttggctactggatggtccgctgtgcgggcttcttgggctcctgcttctcttccctgggcttggagcttcgcctcttgtccttccctgacctcggcgtggtgtcttccttcacggcctgtcctcgcccctcgtctgccgctgtcgctcccgcttcctccttggctctggcacacggcggctccttggctctcggccttgccctcctggtcctcctcgccctggcattggccttggctttcgccctcgcgttcygtctccacacttctctggccttcctggccgccttgcgaaggggctggcggcgcctccgggagctccggggcgcggctggggtcctccagggagcgcgcgtgccctcctcttgcctcgcgcgtcccggctttctcctgggcttgggaaccttccagaccctgaagtagccggcgggcgtcgctgccgctgacccggaggagcgtggccttggcctgccccctgggcgcttcgtggcggccgctcttcctgcgcacttcgtagccggcgtttcggagctccttcttgagagctgccagagtcagccctttgtgagtggagatggcctggagcaccaactgggacactctgagcacggagcttgagca

SEQ ID NO: 15382 - DNA, 518 bp, Homo sapiens
cctgcatctttctgactcaattatcttgcatttatttaatttatctcaccccaagatgaatgacagaaacctgttcagcagtgtactaagactcccccattgacctgaacctgctactacttttttttccaaaagtcattttctgactcatcttgttttatattctaagaccctgtcttccccctgcactactatgtggcttctactttaatacaaatgaccccaacaacagtcatttgaacaaatgatcccaccagtcccagtcatagctttggagaagactaacgtggcttataaaaaggaatgcaaaaataaaataacaatgtttcttaaaagcatggggatagtttggcaattgtgcattcatccttttaatcctcagcacaattgtttggaagtgagtctggggagcctagacccaagggatctcactagagragcaggaaaatctctcagcaagtagcctgaaaatatgaagatctggtctccctggccctttccattgaagaatactaagg

SEQ ID NO: 15383 - DNA, 584 bp, Homo sapiens
tgcacttcagcctgagcaacaagagtaaaactccgtctcaaaaaaaaaaaaaaaaagaaagaaaacaaacctcattgagctactgtgaaaactgagataagattgcacatgttagggggccgggtgcagtggctcacgcctgtaatcccagcactttgggaggctgaggmgggcggatcatgaggtcaggagatggagactatcctggctaacatggtgaaaccccatctctactaaaaatacaaaaaaaaaaaaaagattgcacatggtaggtgcctaataaaaggtggtccccttccttcaacaggagactagacatcacaagaggtggtcttcaccacacacacacacacacacacacacacacacacacacacacacacggttcagccttagttggaccacttcaccagagctggcactagctttgtgtctcctcctgcctcccaggcccttgtagctggaatttctcaggcccagagggctctctggactcccctacagacctcagctcccccactgatgttggcctggactgcttcttctacatctctgtctaccctggctatggcgtggaaatcaag

SEQ ID NO: 15384 - DNA, 858 bp, Homo sapiens
tccgggcggcaaacacctgatgtgcatgccatccgccccggcctcactaccactgccgttcctgggctgactgacctttctagtgctgaccctactggcttggggctgtcctctctttctaaggagagactgaacagtttgcctatggctatctgtgaggattgctgggttacttggccacaaactcctggcggttatgtgaggccagagaggggtcctcaggcaagaggagtatggctggttccaggcagtgctttcctctcctggacacatagctctgacctacccaactctcagagaccaggctgccatgaccaatacacaggacctttgtctccaaatgctcaaggcagcagaatattgtaacctagtaaagctcctggggggctggggcaagtttcttctctgcagaaaggacagacctgcctcrgcttggtctcagaatggaactgcccttcaaatctgatcatgccccatcctttgctgaaaattgcttagtggctccccattaccctcaggatagagttaaagctgaaaatggtgttcaagccctttatgaatccacctctctctagactcagcttcagtcccctctccccgcataccctctgcttcaggcacacttcactgtgtgctcactatcttgtgctatttcatgcctgcacatctctgcatatgcagttccaggaacccaccccactttcccaaactaatatttctgaaatccttccatgctgtctccttgggaagccttgcttgcctcctctctcatcttggagtagctctccatcccttgggctcctccaccactctgcctttactcctattgtagcatcctctgcactgagctgcttgcca

SEQ ID NO: 15385 - DNA, 581 bp, Homo sapiens
gcctcagatttttattttttccacaaatacattttacatttttgttaatgaacatctaggtaatacttacgacatgccaaagtaccattctggtactttgcaaacatgaactcagttaatctttgtaacaaccctctcatgagagcattgttattgttatctctacttggggatattatccctgtgaggaaatcaaggcatggagacgttaaggtcatacagcaaatgattggcaaactagtgttgtcagatttagccatatgacgtttataacaatgtataactttctactgcagtcctttcttgatatcgatggggaatggatctatgaccgcctcctgccactaaccaccccctcactgataccaaaatccacagatgctcaagaccttgataggcagcggtgtggtatctgtgcataacttatgcacatctccccgtatacttcaaatcatgtctccactacttataatacctaatacaatgtgaatgctacgtaaatagttgttagcctgtattttttgtktgtaatattttttatagtatcgctattttttttctgagtattttccatccatgat

SEQ ID NO: 15386 - DNA, 512 bp, Homo sapiens
aattargtgcagatcagagatgataaaagacttactgaaaattccactgctaataggtagtggtgctggaatttgaacccaggcctcgtggctccagtttttctgcctcagtcacaaccccgtatcacctctcttctatggaaaagaaaagaagggcacatatcgcgttcatatcagctcctaaaggagtgacagagctatccctttcttgtggtggggagcagaggggtcattgttctttgttctttagtttcaggatcacttgttgttggatgggcaaggtctcatcactgcttaaagcagtccgttctgaagaatcttttttgatcttgcagaataggtcatttggcattgtgttgtgggtttcattttcaaaaaaatatgatgaagtcttaaccccagtatctcagaatatgaccttatttttaaacagggcctttatggaaataatcaagttactttgttacggcagccctagggagctaatacaggttgagagtggtttttgagtg

SEQ ID NO: 15387 - DNA, 526 bp, Homo sapiens
tagttatgtacagacaagagtatatatccttacatatacaagagtgtatatacatacatatatacatacatatactcttgtctgtagctacatatgcaagagtgatacatacatatactcttgtctgtagataactattgagaagatagtttaagagtgtacatcctctaaacacactgaagaaaaataatagaatgatacamacagataaaaaaggagagaaaaaggaatacagtcatgtactacataaaaacgtttcagtcaatgatggaccgtgtgtatatacaacagtggtcccagaagattataatggagttgaaaaattcttgtttctttctgacattgtagccatcataatggtaatgtaacattatactgcaacacattactcatgtgtttctagtgatgctggtgtaaatcaatttactccactgccagtcatataaaagtatagcatatacaattatgtacagtacatagtacttgatagtcataagtgactgtgtaactggtttatgtattcact

SEQ ID NO: 15388 - DNA, 498 bp, Homo sapiens
ccccagtggaaggaccctcttcttcctttgtaaagtaaagcttttgcattcgtgtagtgctctgaacatactgcttgacaaattcattacagtaatttacacaaatcacattttcatggattttctcttcccttgtagaatcttacttaattctttgtgtctttgtgtctcaagggcctagcctagttccttgtggaattaatgacagatggagaaccaactgttgcgggtgatggggaaatagaacggtgtcctgggattttccctagttcaccttcttcccatagaggggatcagcaaaaggtggataaactgacaccaaggaaggtacagggagcctggctgtaaagggaggaggagggcaatggccgagtcttactgaggccatgatggagycatctgactcccatggggtgtgataaagaagcaagcaatttgagacaggtaatggttgtgtgagtgtgtgtgtgagacacacacacatacagacaggtggag

SEQ ID NO: 15389 - DNA, 509 bp, Homo sapiens
tttatgtcccagtcacggaggctttcttcactcaggcttccttactagtgatcttggggatgcaaatggaaacaataattagtcacatttttcaccagtcagagtatcacaaaatgaaaagtactgaaacagtaagtgaggtataaatgatacagccattttgtagagtgatttggaagtttcaaaacaaattaacagacacgagaaagtgcacatgtgttttacttctgtgtcctaaagaaactcttctttctaaaaaagatatttttattctttaatcactgaagaaactcttctaatgcatgagtgggtcttcrcaaagctgcttctcattcagaagtgtttgtgaaagtacatctttgaaaccacctaaatgaaaacaataataaaatatcctaagagaataaatatcgtagagtttgcttctcattcagaagtgtttgtgaaagtaaatctttgaaaccacctaaatgaaaacaataataaaatatcctaagagaataaatacc

SEQ ID NO: 15390 - DNA, 454 bp, Homo sapiens
  misc_feature (1)...(454): n = A,T,C or G
tgtcatacagaagaatatatctcagagaaagttaaacctggagatgttacaagcaaatgtggattcaaggaggttcttakggggtaggtattataaaagatggccttaataaaaatattctgatgctacaaagtgaggctcataaatttttattgtgttacgtgccaggggtccagaagagatgaatgaatattaccttatttgttttttactgtctgtttctatccaatcatttgtatagtanctgcctcttccctgaagaagcctgtttttgagatgtcctatttagaaaaagtgataaaggaagagatactttgtctgaaaaattgctgcttacttcangatgtccaagactgaaatgctctggcttttctgggtaaaggggcttcccatttttatttttcttttctaacttttgggaaaatcacctgctcttttaaatggtgacctacca

SEQ ID NO: 15391 - DNA, 523 bp, Homo sapiens
gtatttttagtagagacggggtttcaccatattggccaggctggtctcaaactcctggcctcaagtgatccacctaccttggcctttcaaagtgctgggattacaggcgtgagccaccacgtctggccaataatccccttttctaagaagtcttttctaatctcactaacctgattatgatctcctcttcagaagccccatggcactttrtttctctcttattctgttacagttcttctgctcaatttcctgccctctgcaggatgctctaccattattcactccacttgaggatgagtttaaaattcagcccaccaggggccaactcaaaatctacaagccaagtatacctgttctattcccactcaacactttccctgaatctgaatccccatagtacattattagtaggtgcctctgatagcaagaacacacacagtttcttcatctttatataaaatatatagatgctctgctgtagaaggtatgcagtaactccatattaattaaagaaacaaagggc

SEQ ID NO: 15392 - DNA, 556 bp, Homo sapiens
gtttgtgtgccatctgggtatagctattgaatctagaggcctgcaatgagtagttgagtgcgtataacattatgtggygaatactatcagagattgatatggtttggctgtgtctccactcaaatatcagcttgagttgtatctcccagaattcccatgtattgtgggagggacccgggggaggtaattgaatcatgggggccagtctttcccatgctattctcatgatagtgaataagtctcacgagatctgatgggtttattaggggtttctgcttttgcttcttcctcattttctcttgccaccaccatgtaagaagtgcctttcacctcccaccatgattctgaggcttcctcagccatctgggaggaaacctctttttcttcccaatctcaggtatgtctttatcagcagcatgaaaacagactaatacagagatatatctacaaagacctatggaagcacagaagacagtttgttaatagatgaagtaatagttgatcctggccctaaaaggtgagttatatttttccaagtaaaaatgtggataaaggt

SEQ ID NO: 15393 - DNA, 336 bp, Homo sapiens
gaaagttagcttggatgataacagccagtgctgccactgatgcccaaggatcactgtcttaatccaakacatgaacgttctgttaaaataattgatatgcaggaaaaatattgggcagccagacaaatatggcaaatgcccactacaaattcttttgagaatctcatgaaattcttgtactctgtcaacagaaaaaagcaaaaatactcattctcaacttttgttgttgctgttgttaaatatggacatatagaacttactcttgcaatctcagagcagtagatacataaaaagcacattctaagatataattttcttaaacatttagtgagtaaa

SEQ ID NO: 15394 - DNA, 654 bp, Homo sapiens
aatacttatttaaatctcatttatgttgcctgattaattaatggaattattaaaagctgaagtcagcaagttagaaaaaaaaacagcatccttaatttttaaaaatgagttttatgttacataatttaaagtctttctggtatctagccaagcattcaactgagaaaaagtgtgtgctgccgtcacatttcttgccatcacattctttataaagatcacactgkgtcactgtgaccagaagccaagatttttttctcctacttgatcttatttacacatctgttatttataatgattgcccaaattaatttcatgttaagccataatataaaatgttacactctatttattcagaatctattctttgtgttatcagactgtatttaatctctcacaactgagtaggtattattcttattttacagaggacaaaagtgactctcagaaaatttaatgaattcagctggtaaataacatgataaaatatcattctagatctttacatcatgtaccttttgactaccagttcactagagcctacgaatttcattgtatcaagtgtttaatataaagaaagccatctagatgtgactatcacgtaaacaacggactctatccattctcactgacccttaacagtttcaaaatctccca

SEQ ID NO: 15395 - DNA, 654 bp, Homo sapiens
aatacttatttaaatctcatttatgttgcctgattaattaatggaattattaaaagctgaagtcagcaagttagaaaaaaaaacagcatccttaatttttaaaaatgagttttatgttacataatttaaagtctttctggtatctagccaagcattcaactgagaaaaagtgtgtgctgccgtcacatttcttgccatcacattctttataaagatcacactgtgtcactgtgaccagaagccaagatttttttctcctacttgatcttatttacacatctgttatttataatgattgccmaaattaatttcatgttaagccataatataaaatgttacactctatttattcagaatctattctttgtgttatcagactgtatttaatctctcacaactgagtaggtattattcttattttacagaggacaaaagtgactctcagaaaatttaatgaattcagctggtaaataacatgataaaatatcattctagatctttacatcatgtaccttttgactaccagttcactagagcctacgaatttcattgtatcaagtgtttaatataaagaaagccatctagatgtgactatcacgtaaacaacggactctatccattctcactgacccttaacagtttcaaaatctccca

SEQ ID NO: 15396 - DNA, 530 bp, Homo sapiens
cataattgctctgtacttgggggaatgcagtacttacattttagttgtgtgaaaaagaaaaccacacataaaattattagagctaatttactccaagacgtggtttatgtccgggtgctgtttgttcacagaagggagaacctgtgtgagttgagatgatgactggcatcgtagaggattgagcattaaaggatgaatcagacttaaaatataatcatggaaacctgataattggcactgaatataatgtattacataaatttgggtcakgcagttttaatttcactaaacttatatcccaagctggaaaattatgaggaattctcacagtggataaaaataaaacactttgaatactattagagctatatcaaatacttttacattcagtagctactagcagagttaccatcaatattaacttaaaaaaattaatcatatctatagacatatacattttgaattatgcaaagattgtttggaataaaaaccccaaatccccgtgttttatgactttttttaatgtggtt

SEQ ID NO: 15397 - DNA, 616 bp, Homo sapiens
aggaacaatgcaaattgttctgattcttaactcctcctcaaacgcaggacctttctattctggtgtatttcatcccccacaaaatatttttaagagtctccaagagacgcctttaaatgtacttggaaagaagtccaagctgccgggtgctgggacttgtctgccaggcaactgctacctcctgtaggacactactccactcagactgaattccatggattatttaaaaaggtgcacttctccttgctgaaaaatagaagtaagtcagataaagtgtagtaagttagctctcaaagcagtatgaaccaaattaatggagtgttttaagttctgtgtaaaataaacatacgactagtgatacaactstggtcaccccaggaatgaggttgctcttttccatgaaggcctaatataactgaaaatgggtgaaaccctgctgggatgaagtcagaggtcagatagctaaatataagcacatttttctaaaacctactgtgaaaggcagtagagcagtctaacatgaatatggttttggcatttttatttcaagctgtgacctcttcaaaaaaaaaaagttactgggatttattattatttagatgataaaagctggtca

SEQ ID NO: 15398 - DNA, 522 bp, Homo sapiens
gtaggcaatctgaccgcaagagctagtttcatttgtccttgcagtttttatagcaaagcctatgcctgtcatatatcagatagacaagagacttgaactgttttgggaatgaatgtatcagaaatcactctgtcttagtggtatttcagagagtactcttgattttacattttcactgtgacttctgaacaatatattcaagatctgtaataactctgtgtttccttgagaaaaatttgattgtagaacagtcaagttctacaataaacagctgttcaaaaargcaaatatctgcgcctagggactaagctgctcatggagtcagtacttgtggtttgtttgcaaagccgcctacctttggcatggtttcttgtatttccacttcatttctgactggggtgtggcaacatgaactttctcctcttattgattcctagcagttcacaattctaccacaaagcttgatcttgttttacaatatgtctttgttcagcttgcaaaattcaggacagtacattctga

SEQ ID NO: 15399 - DNA, 1577 bp, Homo sapiens
agtaggcataggtccccactctgccacttgctagacattccacttgaagcctacttctgagcctggcctcagtttcctcatctgtgataggggtatattaactaccattggggtagattataggatgacatggtatgagttctgtgcctggcacagcactagaaggagctactgcagctactgatactcctcgwacggatccatggtgtcccagcagctcatgttggtaattcatttctcttattccaaatgcatgacaaccttgtggataaaagattcccacgtcacagggaatctgaaatttccagctgtgcaactggcaatataccacaatctgaccactctcaacagcaaccctgcctccactgaagtccaagacactatccccttgggtctgggtaattgcagaagccttctacctggtttctctgtttctccccttcctccttctccagtctatccctcaacaaagtggccagaaggatccattaaaacatgaatccctctttcctctgctcaaaatctgccaatggccgtatgtatcactgcaaaaattccaagttcacgtaatgatggatatggtttggatctgtgaccccacccaaatctcacagtgaatagtaatccccagtgttggaggtggggcctggcgggaggcgattagatcatgggggtgaattcttgcgaatggtttagtgccatccccttggtgctatcctcatgagagtgagttcttatgagacctggttgtttgaaagtgtgtggcacttcccctcttgctctcttttgctcctgctctcaccatgtgagatacctcattcctcctttctcttcgtgcatgattggaagcttcctgaggcctccccagaagatgccagcattgtgtttcctgtacagcctgcagaactgtgacccaattaagcctttttaaaaaattttttataaattacccatcctcaggtagttagttatagccatgcaagaacggactgatacaatgacctacaaagacctccatgatttgcacaatgacttctgctctgtttcctctctgccatcatctcctgcttggatgaatgaatgaaataaatgataaggagataggaccaggatcgtaaaagaactctaacctatggttgtctcctcaacgcagccaactatgcaacaattataagaactggtgtgtacgtatgtttattgcggcattattcacaatagcaaagactcggaaccaacccaaatgtccaacaatgatagactggattaagaaaatgtggcacatatacaccatggaatactatgcagccataaaaaatgatgagttcacgtcctttgtagggacatggatgaaactggaaatcatcattctcagtaaactatcgcaagaacaaaaaaccaaacactgcatactctcactcataggtgggaattgaacaatgagaacacatggacacaggaaggggaacatcacactttggggactgttgtgaggtggggggaggggggagggatggcattgggagatatacctaatgctagatgacgagttagtgggtgcagcacaccagtgtggcaca

SEQ ID NO: 15400 - DNA, 568 bp, Homo sapiens
gcccttttggcccctattcccccttacttcactaagggcacagagtgctgcttggctgtttgagaaaacagatgaggtgtcatgaaggcagtgcaaagttggctggcacctgyatatgtttcatgaatttagggggctttgccattccctatcagaagagaagcatctgctgaaaattctccatatgacacttcatttaccaaatgggcctgcaactccccaaagaaggaaaacaaccttcacagagagaaaagaaggaaagggaaggctttcagtactccaagttgaactctaggtcttctcctgtctttcctgctgtcccctggtggtcacacttaaaagagccttgacaatgtcctagcactcatcaccatgatattctctgtctctctctctctctctttgctaaaactaattcccagcaggcagagctcataggccaagttctagcaacacttcctcatcaaaggagttcttggacagaatcctggtttgtacagatccaagcaaatgtccaagacatcggatcaaaccctaacttgtaacttgaagtctgcctcataccctc

SEQ ID NO: 15401 - DNA, 568 bp, Homo sapiens
gcccttttggcccctattcccccttacttcactaagggcacagagtgctgcttggctgtttgagaaaacagatgaggtgtcatgaaggcagtgcaaagttggctggcacctgcatatgtttcatgaatttagggggctttgccattccctatcagaagagaagcatctgctgaaaattctccatatgacacttcatttaccaaatgggcctgcaactccccaaagaaggaaaacaaccttcacagagagaaaagaaggaaagggaaggctttcagtactccaagttgaactctaggtcttctcctrtctttcctgctgtcccctggtggtcacacttaaaagagccttgacaatgtcctagcactcatcaccatgatattctctgtctctctctctctctctttgctaaaactaattcccagcaggcagagctcataggccaagttctagcaacacttcctcatcaaaggagttcttggacagaatcctggtttgtacagatccaagcaaatgtccaagacatcggatcaaaccctaacttgtaacttgaagtctgcctcataccctc

SEQ ID NO: 15402 - DNA, 521 bp, Homo sapiens
tggtgctttcagtgcctgatttgttcttctgcccttccaggtattataataattgtaatagctccctcattcctcagcaggcaccctgtgtatctcagggccaccctgaaaaccaggcaaaggccatstgtttcacacttcctcccttctgcaacagcgagcatgaaccacagggccagttcagagacagctcatcttgtacatccaaactctgctctgctctgctgttgcttgtagtttaaatctgctgtgttacagtggcagtggggagaagaaccctgagcttccaactctttcttcctgcagaggcctgtggggcacacacagtgaccttggcgaacagtggtctcagggaaggtcccaaccacatagccataaacctctctggggattagcacagttgggacaatgttcacagaagccatatgctgtggtagaaagaacccaatctgggctagtcttgcctctacaacttactaactctatgatcttaggtaagttatttacattcttcgattccc

SEQ ID NO: 15403 - DNA, 538 bp, Homo sapiens
attatagatttatgtgaatttaaaaaaaatggagcaccaaaacaactaatgtttttctaaaggatcacttccagtgagaagataacctcttgctttataaatctgttaaaggaaatgtatattaattggtgatggtacccttcctttacttgtaaagatttttctggtgtgtgtgtgtgtgtgtgtgtgtgtgygcgcgtgtgtttaaatttccacttaatagtttttttgtgctcaatagaatttatttatttatttatttatttacttatttatttttaagacagagtctcactctgtcacccaggcttgagtgcagtggcgtgatctcggctcactgcaacctctgccgcccaggttcaagaaattctccggcctcagcctcccgagtagctgaggttacaggcacctgccaccactcccagctaatttttgtatttgtagtagagatggggtttcaccatattggtcaggctggtcttgaactcctgacctcatgatccacccgcctcggcctcccaaagtgttaggattacag

SEQ ID NO: 15404 - DNA, 677 bp, Homo sapiens
ttcttttgtccatcaaaattgtttccaatttggatatggtaaatagtgcagcaatatctaayggtgaggacaaatgagatcagaaagaaaaatggaataactccttcgtaaggagctaagatccagtggaaaattaagatgcgacattttaaagcagtagattgagagctagtaacaacagcaattgaggaccaatcacttagatactgtgatcactgaattgaattgtcacagaaaatttgggccgattttgaagtggaaaactggacagatcaatgtaaaaaccttaaaaactattgtgtgactttcaagatgaacacttactctaggtagaaacacaggtattttctgtttcttcatgaaatatgtctgacaaaaatgcaatttaacttctaagggaaggcactaccaagattacacattaaatgttcctcagcccagggtccacctgaaagtacaacctgagtcaaagctcctatgaggctagtctatttcagaatatgatctcaggtaagaggtggaatccggggcaaagagagtgaaacagggaaggagaaaatgtcgatgtaagaatgtattattaagctggatgccctctaagcagctgagttgtttccacttggacctccagaggagccttatacagtgtacggttgtccaagacaaaacaagaatat

SEQ ID NO: 15405 - DNA, 408 bp, Homo sapiens
tggcactccttatgtgtgggaatcctgtggtgccagtgcacaggayctttctatacaggaagaatattcgtttgttctctcagccaccctaccttcttcaccaccacctcagggtcactttctgctgtttgtcagcttggagtttctatgatcataggcatgtcattagacattcttaaatgactcccactctccctctgcccccgtagcctaggccaaaaccaataattttattttatttttcctgatgaggacccttttaagggccatcctatcactgaatatgtagcactttgaagtcctaactttagacaattttttcagtcttagctcgaccttgcacaggtgcagtccttacctcttttttcagagaaacccttagaaaccaaagcccccagaaagcatttc

SEQ ID NO: 15406 - DNA, 612 bp, Homo sapiens
ggaagcaatgaagcacaaaaggacagctttgactccttaagattacatctttgagccaaccagtgagaactcctgactcactggccccctacccaccaaattattcttaaaaactccgatccccgaagtctcatasagactgatttgagtaataataaaactccagtctcccgcatagccggctctgcatgaattactttttctctattgcaattttcctgtcctgataaatcgactttttctagacaacaggaaaggtgaactcattggacgtttacacaaagatattgcaaagtcaaatctgaaagaaagtcatcttctctcaagttttagctaccatgttccaaggttgtcaggcatttaaaaaaaaaaattaaatgtctttctttacacttacaagttcatatacttgctttgtatctatgttttaaaaataaaccaaagcttcaaattccttctttaaatttaaaatagagagtctgttagaatcttcctgtcaactggagtcttctaaatatgagaatatttatcatatggaaaattatcggtacaattatagctactcctaacatattaaatatgactttgactatcaacacaccgaatataggc

SEQ ID NO: 15407 - DNA, 612 bp, Homo sapiens
ggaagcaatgaagcacaaaaggacagctttgactccttaagattacatctttgagccaaccagtgagaactcctgactcactggccccctacccaccaaattattcttaaaaactccgatccccgaagtctcatagagactgatttgagtaataataaaactccagtctcccgcatagccggctctgcatgaattactttttctctattgcaattttcctgtcctgataaatcgactttttctagacaacaggaaaggtgaactcattggacgtttacacaaagawattgcaaagtcaaatctgaaagaaagtcatcttctctcaagttttagctaccatgttccaaggttgtcaggcatttaaaaaaaaaaattaaatgtctttctttacacttacaagttcatatacttgctttgtatctatgttttaaaaataaaccaaagcttcaaattccttctttaaatttaaaatagagagtctgttagaatcttcctgtcaactggagtcttctaaatatgagaatatttatcatatggaaaattatcggtacaattatagctactcctaacatattaaatatgactttgactatcaacacaccgaatataggc

SEQ ID NO: 15408 - DNA, 612 bp, Homo sapiens
ggaagcaatgaagcacaaaaggacagctttgactccttaagattacatctttgagccaaccagtgagaactcctgactcactggccccctacccaccaaattattcttaaaaactccgatccccgaagtctcatagagactgatttgagtaataataaaactccagtctcccgcatagccggctctgcatgaattactttttctctattgcaattttcctgtcctgataaatcgactttttctagacaacaggaaaggtgaactcattggacgtttacacaaagatawtgcaaagtcaaatctgaaagaaagtcatcttctctcaagttttagctaccatgttccaaggttgtcaggcatttaaaaaaaaaaattaaatgtctttctttacacttacaagttcatatacttgctttgtatctatgttttaaaaataaaccaaagcttcaaattccttctttaaatttaaaatagagagtctgttagaatcttcctgtcaactggagtcttctaaatatgagaatatttatcatatggaaaattatcggtacaattatagctactcctaacatattaaatatgactttgactatcaacacaccgaatataggc

SEQ ID NO: 15409 - DNA, 612 bp, Homo sapiens
ggaagcaatgaagcacaaaaggacagctttgactccttaagattacatctttgagccaaccagtgagaactcctgactcactggccccctacccaccaaattattcttaaaaactccgatccccgaagtctcatagagactgatttgagtaataataaaactccagtctcccgcatagccggctctgcatgaattactttttctctattgcaattttcctgtcctgataaatcgactttttctagacaacaggaaaggtgaactcattggacgtttacacaaagatatkgcaaagtcaaatctgaaagaaagtcatcttctctcaagttttagctaccatgttccaaggttgtcaggcatttaaaaaaaaaaattaaatgtctttctttacacttacaagttcatatacttgctttgtatctatgttttaaaaataaaccaaagcttcaaattccttctttaaatttaaaatagagagtctgttagaatcttcctgtcaactggagtcttctaaatatgagaatatttatcatatggaaaattatcggtacaattatagctactcctaacatattaaatatgactttgactatcaacacaccgaatataggc

SEQ ID NO: 15410 - DNA, 612 bp, Homo sapiens
ggaagcaatgaagcacaaaaggacagctttgactccttaagattacatctttgagccaaccagtgagaactcctgactcactggccccctacccaccaaattattcttaaaaactccgatccccgaagtctcatagagactgatttgagtaataataaaactccagtctcccgcatagccggctctgcatgaattactttttctctattgcaattttcctgtcctgataaatcgactttttctagacaacaggaaaggtgaactcattggacgtttacacaaagatattgcaaagtcaaatctgaaagaaagtcaycttctctcaagttttagctaccatgttccaaggttgtcaggcatttaaaaaaaaaaattaaatgtctttctttacacttacaagttcatatacttgctttgtatctatgttttaaaaataaaccaaagcttcaaattccttctttaaatttaaaatagagagtctgttagaatcttcctgtcaactggagtcttctaaatatgagaatatttatcatatggaaaattatcggtacaattatagctactcctaacatattaaatatgactttgactatcaacacaccgaatataggc

SEQ ID NO: 15411 - DNA, 566 bp, Homo sapiens
caatgttaatacgtagcaaaaattcagtaaaggagtaacatcagaggctacctgtcccaatactaactgtcctgttcagaaaaaaggaattcaccacctacagtgaaagctcactccgtattttaagataaccccattttctrgtaaattattccttccgttcctgtaacttttattcattgaccttagtttttatccctaagacaatattaacgaaatcaaatcctgcctttatttacataaatacatctgctgtgactcctcaatacatgagatttgtgtaacagcattcaaagccatgattataaattacaattagtatacatcatgaagtcattcatctcaatgttgtcaaatattgcccaaggaattttccattccattagataattatactctaagctaataagtaatcagccctcctttactttttgactttgtagaatatgatgggaaaactccaattagtcactcccaatgtttataggaaaaaaggacagaaatatacccttgtatgaatttaacaagagctttcctttattcaattttcttggggacaagggtca

SEQ ID NO: 15412 - DNA, 566 bp, Homo sapiens
caatgttaatacgtagcaaaaattcagtaaaggagtaacatcagaggctacctgtcccaatactaactgtcctgttcagaaaaaaggaattcaccacctacagtgaaagctcactccgtattttaagataaccccattttctggtaaattattccttccgttcctgtaacttttattcattgaccttagtttttatccctaagacaatattaacgaaatcaaatcctgcctttatttacataaatacatctgctgtgactcctcaatacatgagatttgtrtaacagcattcaaagccatgattataaattacaattagtatacatcatgaagtcattcatctcaatgttgtcaaatattgcccaaggaattttccattccattagataattatactctaagctaataagtaatcagccctcctttactttttgactttgtagaatatgatgggaaaactccaattagtcactcccaatgtttataggaaaaaaggacagaaatatacccttgtatgaatttaacaagagctttcctttattcaattttcttggggacaagggtca

SEQ ID NO: 15413 - DNA, 1441 bp, Homo sapiens
taagaaaatctggctgacatacattactctctattaaaatttttttcttgattacaatgccaactttcctttctgcagcgcgatagagttgtattttattttaaaagaaacatgattaaacttccccacaaatatttcagatttgttatgggccactaaaacgtcagatctctgatagttctgtcaattcattctttttcaagatgatatatgaaacatactggagagtggggtatgttataatctggaatttagaacttgaacagagacttttttaaggcactaagattacttaaaaraaaaaaaggcacagtgcctttttgttccaaatgtgttttccaacaccaaacattcctagaaatacttaaatcataatgtcaatgtccttgcatttacaaccatgatacttttaatatggaagttcatgctacatttttccatttttcagttttactgaaaacacagaagagatcagtggaaactctctgcaggctttttagaggcaaagctgaagtccaggaaaactttggtggaaggcctttgctgtccaaaccccttgtgaaggaaccttctgtcctgtagtgggattgcagcttcttggaaaggggagccatttatcacagtcctaaatgaaagcattctttaaacacaaatgtctttttttccctttgtctaattactgagaggaaaagtgagaaggaaatgtcaaaacagagaaacagtggtgtatagagagagcagccactctggagctcaaccagcttttgtgagggtctgggcgatttgtcaaatggttgtggcataagtcaagctctgaggttgaaaggtcttgacctaaggagtcctggaatcagacagtgtaagcaaggggtctgctagaattttcagctgtagtggagatgaacaatgatgggagctggacataacaaaacctcatttgcataattcaggtaagtaattttattgaaactgacaaggatgtgacaggctaagaaagagaagagaacacactcttgctgggaaccactaaagcttctcagttaggtatgtgaaaataaatgacagctaatctcttcactaagaaatctgtaaacaatgccattttacccaggactcacccatgaccttttgtagagctggttatagattccttagtccagtcttccagaatatagcagatggaatgggctaaattcaaattatgttttaggctttacattatagtaattatttacctgaataggagttccctccaaagcaggtctacattgagaaagaaagaatagaaactttttaaagtgggtggtgatcaaatatttgagatcgatgctatataaaataatatttttacttaagaattgatattttgggggggacaattttaacttgagtagcttgtacaaagaatgaataaaggtgaaatgctttcagagtttcagtt

SEQ ID NO: 15414 - DNA, 1185 bp, Homo sapiens
  misc_feature (1)...(1185): n = A,T,C or G
cccggtgtgccgtttgctaagaccattggaaaagagcagtattagggtgggagtgacccgattttccaggtgccaatagcaaatacagcaataattgttatttgttttgcagttgtttgtgcctctcttcctcttttgctgtcttgctttgtcatttgatgatttttgtagtgatttgccttaacttttcattttttatgtttcctttatgtgtgtgtatctattataggtttttttctttgtgggtaactcaaggtttgcataaaataccttgtagttataattatccattttatgttaacaacttaacttcaactgcatattaaaattatacactttactttcccccacccacactttgtgcttttgtagacaatttgcttctttttatattgtgtatccattaacacatttttatcttttaattattatattagaattaaaagtaacttctaaaccattaaaaaaactattttggaggtaaattttgagaataatttttcttccttgggtagaaattcatactctctttgaaannnnnnnnnnnnnnnnnnnnnnnnnnnnnnnnnnnnnnnnnnnnnnnnnnnnnnnnnnnnnnnnnnnnnnnnnnnnnnnnnnnnnnnnnnnnnnnnnnnntgtacatgtagaccccttttttaaaataaaagaaaaaaaatgcttcattactaaattagatgttaagtttgtatataacagaccctcaattcaatttctacaacaatggkgatgttaatagtgcttcagatgatctaaacaactgtgttaacaactttatggtaaggaatttgtagtcataatgcaatgtcaagaattctgtatatataaattgtttcttctttaaaaagtattttttcattaaactatggtcagaagccagaacatcccaggcatcataccaatgattttaaattgttggaaatttttaattagaaatatataactcagtgagattttaccataattgcaaatattttacttcatgttatgtagactcatagctcttaaacattttaagtctgttattatattctagtagtgccaagaagcttatgaggcatttaataaacatcttgaaatccatttacactagcacatttcaatgaaactgtttccagtataatagattttgatagaattgattacattgctgaatgtaaatatcat

SEQ ID NO: 15415 - DNA, 1170 bp, Homo sapiens
atggtcttaggctaaaacagtacattcatagccttgttaatcccttgtgaatatgacttgcttcagtttctcctttctcaagcctattgggtaaaaataagcattggccaaaccaattactgtgcatcccagaggtttggttaatctattttagatatgacaacaaaactggaagataacacatctggaacagcaattacaattctatttcttggttacatttttggtaattctactgtcatccactatattccatctccaacctgtaggagacagactggtgaactgaatgggaagtttcccaagtaaagcatcccattctttaagtctttgaggctgacactaatatttactctttcccacaagatgtagtattgcttctaaaaaaatggagacatttcagggaattctactttgtctttttcactatggttctataggttaggaaaccaaagtaaggattctggtaactgctaaatatattcatttgattttatattcagaaaccagkaacatgatcactaggaagattcatggatgtgctggatcaactgtgagatggcttacttttaatatctgataatcccctcctctaagaagaaaccatggtgacattttgtgttcttgagtcagtcattgacagtggaagacagctcaggaagagcatcaactctcttgcaaaagtggctccttttcagccaagtgcaattctccagggaagacagtagatagccattttcaaccaatagcttaacagtgtctggaacatggttatgtatgtaggcatcaataacatctactacaaaggctaaaaaatacttaaaaccaaaagtttttttttttaacttaaaaacttttctaggtttaatctaaccagtaaacaaattagttattagggccttaaggttccatatagtatgatataaagtatactagtctatgaggaatataccacaaaaagagtcacaaaatataccccaaagtatctatctgttttgttgtagaatgttgttaaatatataattatcaaatttggcatacttgtttgccacaaaaaaagacctttggttttaaaggagttgaccttaacgcatttttgtcttatttgtacttttcaaaaacatattattttgtgataaactatattaccactgtaatggagactgttta

SEQ ID NO: 15416 - DNA, 1170 bp, Homo sapiens
atggtcttaggctaaaacagtacattcatagccttgttaatcccttgtgaatatgacttgcttcagtttctcctttctcaagcctattgggtaaaaataagcattggccaaaccaattactgtgcatcccagaggtttggttaatctattttagatatgacaacaaaactggaagataacacatctggaacagcaattacaattctatttcttggttacatttttggtaattctactgtcatccactatattccatctccaacctgtaggagacagactggtgaactgaatgggaagtttcccaagtaaagcatcccattctttaagtctttgaggctgacactaatatttactctttcccacaagatgtagtattgcttctaaaaaaatggagacatttcagggaattctactttgtctttttcactatggttctataggttaggaaaccaaagtaaggattctggtaactgctaaatatattcatttgattttatattcagaaaccaggaacatgatcactaggaagattcatggatgtgctggatcaactgtgagatggcttacttttaatatctgayaatcccctcctctaagaagaaaccatggtgacattttgtgttcttgagtcagtcattgacagtggaagacagctcaggaagagcatcaactctcttgcaaaagtggctccttttcagccaagtgcaattctccagggaagacagtagatagccattttcaaccaatagcttaacagtgtctggaacatggttatgtatgtaggcatcaataacatctactacaaaggctaaaaaatacttaaaaccaaaagtttttttttttaacttaaaaacttttctaggtttaatctaaccagtaaacaaattagttattagggccttaaggttccatatagtatgatataaagtatactagtctatgaggaatataccacaaaaagagtcacaaaatataccccaaagtatctatctgttttgttgtagaatgttgttaaatatataattatcaaatttggcatacttgtttgccacaaaaaaagacctttggttttaaaggagttgaccttaacgcatttttgtcttatttgtacttttcaaaaacatattattttgtgataaactatattaccactgtaatggagactgttta

SEQ ID NO: 15417 - DNA, 541 bp, Homo sapiens
cttcctcattttagaatgacagcgctttgattttaggagtcaggcagggtggggggccttgtgggaggagtgcgggttcggcgtcagatcctcctgcctgtgaattctggccctgtcgcttggacctgatacttgattgcctgtttcttcgggtgtaagctggggcggataacgatgcctctcgtgcagaactgttctgagggtgagggaccctcatccagggaccagtgaagccagattttttgttcctggtgtaacagcccaatggcttyttccttttttttttttttttttttttgatacgaagtcttgctctgttgcccaggctggagtgcagtgcagtggtgcgatcttggctcactgcaacctcaacctctcaggttcaagctattctcctgtcttagcctcccgagtagctggggctacaggcgcgcgccaccacgcccggctaattttgtatttttagtagagggggtttcaccatgttggtcaggctggtctcaaactcctgacctcaagtggtcgcccgactcagcctccc

SEQ ID NO: 15418 - DNA, 580 bp, Homo sapiens
tgatctgttaactctttttgtaactttccgactacagctctatagtatgccaaccaagcattaagtacatccaatggaaaggaaggtgaaaaaagacagttcgcatttacaaatttccagtgactttggtttgatttgataacaaacattcacactgttgcttagaataaaatgccgaagaaaagacattaaagagaagaaacatttctttatgtagttaaaggtctttaaaaaaacctctttagtagggagaaaacacaccattaaaagagagttaatggtgtgttttggccttcattattttgagtgtcaaagtaaatgaaatacatatgaataaggctatgataggaaaattratccagagaaaagcttaaattttaactaaaaaaacaaacaaacaaacaaagaaaaaccatggctgtgcacagaggtgcacacctgtaatcccagcactttgggaggctgaggcaggcagctcacttgaggccaggagtttgagaccaggctggccaacatggcaaaaccttgtctctttttactaaaaatacaaaaaattagccgggtatggtggtgcatgcct

SEQ ID NO: 15419 - DNA, 580 bp, Homo sapiens
tgatctgttaactctttttgtaactttccgactacagctctatagtatgccaaccaagcattaagtacatccaatggaaaggaaggtgaaaaaagacagttcgcatttacaaatttccagtgactttggtttgatttgataacaaacattcacactgttgcttagaataaaatgccgaagaaaagacattaaagagaagaaacatttctttatgtagttaaaggtctttaaaaaaacctctttagtagggagaaaacacaccattaaaagagagttaatggtgtgttttggccttcattattttgagtgtcaaagtaaatgaaatacatatgaataaggctatgataggaaaattaatccagagaaaagcttaaattttaactaaaaaaacaaacaaacaaacaaagaaaaaccatggctgtgcacagaggtgcacacctgtaatcccagcactttgggaggctgaggcaggcagctcacttgaggccaggagtttgagaccaggctggccaacatggcaaaaccttgtctctttttactaaaaatacaaaaaattagccgggtatggtggtrcatgcct

SEQ ID NO: 15420 - DNA, 545 bp, Homo sapiens
gctgagcagaaatacyttgtgctatggggcatgggggtccaacctcattcctcagccctttgcaaattgtatccaaaggagatacaatttgcaggcaaagaaattcacccactgacctcatgatacatttctccaagggcaggggactaaaatattatctaagatttttccacactgcttgtgtgcttcctgcattcttactaacagcagacattgccaccttccaatatctggaattcatgtttatataaatagtaccctgcttttgtaaactgatttataatgtgaaagatgctttcttaaataaattgtctcatttgattttttaaactacccggaaaacaaaacaaaacaaaacaaaacaaaaaacaaaaaaaacaaaactcaggttcagggagattagctaactttcctgtaaccacagaggataaattcttcatattcttttaaaagcatcattttacattttggaccctctgaatgtaggtgacttgggacaaaactgtgatcttaatttgtatccaggtctaggcaagagtatcacg

SEQ ID NO: 15421 - DNA, 1376 bp, Homo sapiens
gtctatgttatttacactcaaagaatctctggagacaaagtacagtaagtaagttccatcttaatttataaatgatggacttcttgcaacacttagttgaattccatttctaatagttgctataaaccaggttaaagaaagacaaatcattcctattttgacacagacaggcagaagctttcttgtctgcatatgtgcacattttttcatacatgtcaattgatgtactgatcaaacattgttgtcttcatttgagatcccccccaaaatagattctgaatcaaggatttgaatgcaagtttagttgggatcccaagaaacattgctaggatagtgggttactcagaaagagaatgaagccagtgaaggtttgttatcaagccatttgccagtgtcatcaactggatctcagttcctctggggaccactggaaggtggtgcagaacaatgctcaggaactcaacaacggggctagaaagatgggtatttatttatcaattccccatctataattgcttgagagttgctctggggagcattaactctcaggcacttctgctttttcttgcttggaggaaagcacgcttcctaggccagaaaatagccttcagtcagggatacttagttaggttttcaccgtgttatctttcagggttacagtggcaaatcctaggggtgaagggagtgagggtaggagattcactaagggcatagacagcatctgctacaatgattaaacccctgccatgttttagatatagggttagaaattggccttgaaataaagtcaatgtcctgtgtaaagattggactttggcaaggatttttattactagaataccaagcttattacccctaatcaatcttcttgttttgcaatcggctttttcattaagtagagagaatatagagaagacaggacttttaatagataaatcacactaaaaattaaagatttgctttttaaactacttcttaaactcaacattaaaaatatatctagatttacctktatatgtatgtatctattcaaaaggatattattttataaaagtcttgaaaaactgtttttaaaaaacaaactattttatacaaatgaatagagtcttgatgtaaatagttttcaaaagcatgacttgagacgtgaaatcaataactattgataaatatatagaaattcatacttaaattcatgtagaagtcacatacatttaactttcagttatagacatgtgcctccagcagatgtcatgtaggaagtgttggatataccaacattgacactggaaacttgctggagttacagaaaacatcttatatttaataaatatagcactttgcatattagaattcattgcacattcatatttatgttt

SEQ ID NO: 15422 - DNA, 522 bp, Homo sapiens
actgcgatggtgccttatttatctttgcactcccagggtacacaatggaaggtcaataaattcttgcmgaataaagaaaaaaaataagcactttccactgaggaatacctccctaattttggaaccacaggattcacaggtagcctcttaaataccagtctctcaattggtgtattgcatagggcttccacatttaaacagtgcaatccgcatcacagacttaatgtaaatcaaatgagaaaggacgtctggagactcatggtctcctacaaggagcagcagagagaatttacttctctttttcttttttgaaatccaatccaacatttttttaaaaaaagataaaaagacaaaattgtacatattatcatctacaacatgatgttttgaggtacacatatattgtggaataattaaatttattaggttggtgcaaaagtaattgaggtttttgccattacttttaatggcaattactttgcagtaattactgcagttacctttgcaccaacctaagtaact

SEQ ID NO: 15423 - DNA, 606 bp, Homo sapiens
atattttaaaaataaatttagtgtagcctaagtttacagtgtttataaataagtttacagtaatatacagtaatatcctaggccttcccattcacactcaccgactcacctagaggaactttagatctgcagtctctgttcctggtaagtaccctatacaggtgtatcattttttattttttcaatcatattactacaacttttctatgtgtagatacacaaatacttacaattatgttacaattgcctacagtatttaatgcggtaacataccattacaatagacagttggaaaagcctagctgcaatagacaatattactgtatagcctgggtgtctagtagactataccacataggtttgtgtaagtacactctatggtgttcacacagtggtgaaatcacctaacgatwtatttctcagaacatatccatgttgttaaccaacacattggtatacacacaaacacacacaacatacacacacacaagcacatatacagtcatgttggaagatttgtatagtgaactcttacattcacacaatctaggttctatattaacattttactaaactcatgttattacatacgtattcatatatcat

SEQ ID NO: 15424 - DNA, 1305 bp, Homo sapiens
ctccaactctgatttgttaacatatgaaatattctagcctgtttcctttgttgtctgtgttctcccactccaataatgagaagcctgtctcctgccatcagtaatccacttacttagctgtttaattttagtatagagttttcagaattgtttgccagtactcacatgaaaaacaactttaacaactagagtattatgctcatttacagttccttttggctttagtcttagtccctacttatttctaaagttacttaagtcaacacttctcccacacctgctttagtaaagtaatttcatatatttgtaacacagttagattttgtcatcatagtattcattctattctgggatccactgatgttctaaattttttttttcaattgcatatattaatattcactttgtgctttaaggtttatgtagattyaaaaaattttacagtatcaagtatccaccgctgcagtatcctaaaaaatagtttcataaataaatgagtagaaaagtatggacaaatttccagtgcagaaaattccaaataacttatgcatatattatacattcaggaagatggaatttaactccttgtttcttaagtatggattgcacatagtgacttcctttttacgagtatagtttggaaagaaggaaaaagagtaatttaattgtggagcaacctgacaaactacttcagcttggtgatcaagattaacatcaatagtaataagtcatgttattggcatgagacctcgacatgaagtgatgagactggccctttatctcttggtcttccttccaaaaacccatagccccagtctacttatgagaaaaacaccagacaaagcccagttgagggatattctacaaaaaatctcattagtactttccaaaatggtaaagatcgtcaaaaacaaggcacatctgagaaactatcacagtctggaggagtctaaggagacagggtgaccaaatgcaatgtcgtatcttggataggatcctggagcaaaaaaaggatatttggtaaaaagtaagtaaatctgaataaagaatcaacttcataataatatattaatttggctcattaatcttgaacagtgtacacttataaaagacactaattataggagaaactgggtgtttggggaggaaagtatatgaaaactccttcctatccctatacaacttttctatataaaactgttctactataaaaagtttatttaaaaatatataacataggaggcacaactttaaaagaagcataactatggcacagatcaacttcttgtaaactgggtaggtagg

SEQ ID NO: 15425 - DNA, 512 bp, Homo sapiens
  misc_feature (1)...(512): n = A,T,C or G
ctgagaggatgcccttgttaggggaattctctcaggatttgcatgaacaataatatctgaagatcattastatgaagaggggattggtatcactgggcggggggctgacctatctactgtgataactgcttctaatacagctgctcaggaggagaaaaatttgcttttcttttgtcaagagaagtaacagcaccacataacagtttgaagaggtgtttttactgtccagaaagtcaatcatggcctatgtgaaggctgtaaatctagagaagttcagcaacagcacacgaagtggtatgtggaggacactgaaattgatggtccagggtcatttaataagggtggngtgttttattacctgaatgtcacagcaatggtgcccaacagagcaaagagttggttggaagagaagggactagagcacaaagaccggtgagcaacaggcagcagctcttattatatatgcaatggcccttccctaccacttcacacgaaaagaaactaaaaacagt

SEQ ID NO: 15426 - DNA, 536 bp, Homo sapiens
ttccagggtgaaaggaagacagatcattaagaaatattgtaggaccagccaggtatcctagggaaccttgggaaatttctccagagagatggttgagactaattcggtttattcagcactgtggctctgtggacataaaagggcacctgggtaccattagggttgcaatgctaagcataacaatatcgaagtcataartatgatgttgtcccaggtctcttaggcctgagaaaggtcatgcctttgttcatcccagtccttctttcagcaaatagctgctgaccacctacagctgtgaacaagacaagcgaggtccctccctgacctcttgttgcctttgggttgtcctgggggtgtccctgctggagctgccaaacagcaagacttcagcggccctgcacccggatgcatctgctgcctcactgccatgctcacgaatggaagacattcatctttgcccagcggctggcgggcaggctgctacaacctccacttagtctaccccagctgcaggctgtaatgttgggggagctgcc

SEQ ID NO: 15427 - DNA, 786 bp, Homo sapiens
gtttaaaagtgcatagcatctcccccctgctctctcttcctcctgctccaatcgtgtaagacacgcctgcttccccytcaccttctaccatgtttataagttctctgaggcctccccagccatgcttcctgtagagccagcagaactgtgagccaattaagcctcttttctttataaattaccaagtctcagatagctccttatttcagtgtgagaacagactaatacagtttatattttcagccccaatctttcctttgagttcagctccccttctccagcttcctaccgggtatttgcacttgaatttcctattattgtcaaaatccaaatggcaataccccatgtaattttcgctgttctctctgaatcccagccccataaccattaacaccttctgtttccattaatggtcctccattttccaaagctcttaggtacggaaatcttaggcactatctcaccttacctagccaatccatcacaagtccccttggttttaattgcagaatctcttaccctttcattccactgttactcctaccaccctagtcaggttcctcttacttcatacctaggtaagtgtgatcgcattctaactgaagtccctttccagctctccagatcatcctgtaccttagtataagactgaccttcctaaaatacatttccaacatgtcgtatgtctgagttgacatttgcctccactcctataattttacctgctgtctatctggtctagtcccgcatttgcactggctattccatgggtccctgaaacccagc

SEQ ID NO: 15428 - DNA, 367 bp, Homo sapiens
ccgccctcctcggcctcccaaaatgctgggattacatgcgtgagccacagcgcccagcctggtgagtgtattaaatgagagaatcaatgaattatcctataaaacaaaaatgaaaacaaatacccctcagaaaattcctgccaaattagcttctgcccaaacggacagattttcatgctatacrtttgggaaattgcaaatatgaaattctctctttttaagaaatagtatgtgttcaaaaaaagtaatataattttttaaaaataaaaaataaataagttagtacagataaagttgtaacctacctcagtccatttttgtcatccttccacagaagtaaactactgaatttagtgtttgttttttc

SEQ ID NO: 15429 - DNA, 496 bp, Homo sapiens
tgggactttttttgacttttggataggctgttgaaaggtcggtgaggattgaaatatttataatgataacaagaatttatttttaaagccttttctcaaggaattctcacartcctcttgagtctacaccattagacttaatttacagatgggaaaacttaggcaagggcagttaatgaaaattgcctaagataaaataattcattaagtgacaaaccatactctaaattcaaggtttcccaattctaaatctcatgcacatttcaatatgtctggttagcaacttggtagctgacttaaagcacatgcaaaaactatgggttaaaggaatctaacaaggtgaaatttatcaaggataaacttaaggtactgcctgaatttatgccaaaataccctcaaataagtgaggtataatgtcccagcagctcattgaaaaaagactcaggaagtctggttagcaggaagaacagcataaatcattatatgtgacaggacc

SEQ ID NO: 15430 - DNA, 549 bp, Homo sapiens
ggatctaagagcttgcaggaaaacttaagaatttgggatcctgcaacccctgatgagcaacctgagacacagaaaagggaaatgccttggaaaggtcagccccagaaggaagagagcagagagggaaacccaggactagtgattccccatcctgtatgcttcacccaccaccccacgcagctggcctgaatgattggtgtagcccttccccacattcctagagagtgtgtcttttacaaagccaccgtccacacayacagagtggcaccagctatgcaaccaacccctcttacactagaccgctgtgtctggtgacttgaaagtcaaggccaatgtggtcacactaaggccactaagtcttaaagaaaagtacttctctatcattggcagagaactttaggctggagacagattaaagtttaaaacaaatccaaggagtcaactttgtagacaacacaggttatttaagcctctgttccttctttgttagagtacactgaaacttttcttcagagctgaccctggaagtaggcagaaaggttgctgtct

SEQ ID NO: 15431 - DNA, 1154 bp, Homo sapiens
cctattaattttaaggtttacatgtagatgcttttggattttctacatacttaatcctatcatctgcaaatagtgacaatttttcttcctttccaattcttatatccttttaaaaattcataattcacttaacatactcaatgttgcatagaagtgatgatagcaggaaatcttgtcttatatctaataccaaaagaaaaacttctaatttttatcatgttatatgatgttggctgtggagtttctrtaactactttcattggactaagcagactggatcattgtttccaattctttattccttccctgtgttagaatcatacattcacacattatgtcatgtaaatgcttattgtgtcttattgttggtggaatttatttctccattccttgatgttgaccatgtgacctttctttggcctaggagatattagtgaatatgatgtaaacaagtattttaagtgtggttgcatggtttacttgtcttcctctttcatcactatgagaaaaaaatatgctttgatagctgcttttttgagcagaatcagaaaatacatagaacagaactaatcacaacattcagcctgagataagcccaaccaatcacagctgagtccatcagagccttaccctaccccatggcttgtaatcagtgttataagccaccaagatttggagattggagtttgtttgttaaacagtggtattatagtgaaaaacctccctgagatgctatctagtcctagtttgctaagagtttgtattataaatggactttgaattttatcaaatgctttatctgcatttattgagataataatataaattttccctcatcctattaatgtggtaatttatcttgtttgatttttgaatgctaaacaaaccctgcattcctagatttaaacagacaaaacgacttagtactgaggtattattctctatattttgctgaattcagcttgcttatttaattttttagtttgtgcatctatgtttgtgaaagaaattgattcataaatttcttccatcatattgttcttatctgattttattaccagtgttatgccattctttggaagagtttggccacgactagaatgatttcttcctcgaataacatttataacattctccaatgaagatatgtaaac

SEQ ID NO: 15432 - DNA, 538 bp, Homo sapiens
cagggatgatggtcagatgcaattacaggttatgaatttggcataaaagtaatgctaagtgtttcacactgcacttactgttgtcagtgttctaagtgttttttatttaccaattcatttacacttgtttgtcttttttttcaggtctccaactcctgggctcaagctgtcctcccacttctgcctccccaaaagctgagattacaggcgtgagccacccggccctactcatttaatccttacaacaacccttagagctgggaactatttttatcatcatcacataattgtttacaaaaataaatmgaggcttagagagcatatgcacctcaacccaagatcccacaagtagaatattattgttacagatttggttgcaaataatctgcttcttatgattgtgctttaaatttttcaccgtgtcacatcactttggtggtgtaaaattataaaacaacatttaagtcttaactttaaaaatgtgtttttggcctggtgcgatggctcatgcccataatcctagcacttggggaggatg

SEQ ID NO: 15433 - DNA, 383 bp, Homo sapiens
acatgtttctctcgcctccatgagaaccactaatttacagtcgactatatcatagaaaaggcgcaagtgcattaaattttgcaaagctatctttataaattctaattaatcatgaaagaatgagtcatagaagtaaggtgcaagggacactgttatataattcacatgataactgattttgatagtttcttttatgtagaacttgtttatataagaaacagaattttatgactcttagatatacaagtgatctttgcacatttaatgccttttgggtatagtaggcaaccaaagagttcttagtaagttyaaataatgtgtttctctgtagaataaggaaaatacacatagcaaattaaacatttaagattctaagttcttta

SEQ ID NO: 15434 - DNA, 546 bp, Homo sapiens
ctgaggaattctcacttgtaaattccactaatatttgtccactcactaaataccagaccttgttccaggcattagggataaaaaggatgccctgatttcatagagcttgcattttagttggaagaagcagtcaataacccaacaaatcaacaggatgaccaatagacaaacagcaaaaaaataaggaggaaaatgttaagtgttatctgagagctaaatttcagtgatttgatgaacagtgaggggtagtcagggcgggactttccgagggcagggcatttgaggtgaggtctgaaggagcggaaagcaatccatttggctggagcacaggagyggaagtgaaagtgagggaaaagcagggatggtcccggagagtctggtggagatgtagattttaatattcctgtgaagggaaatcactggagcctggcaagtagggggagtggcatggtgtgattagtaacttcaaaagatgtgtttgtatggagaatagattgtagctggcaagattcgaaacagggtgagcagttagaagctatgagaatg

SEQ ID NO: 15435 - DNA, 519 bp, Homo sapiens
taaaattcagtatgtatattacaaaatttaaaaayattataacattaaggtagaaagtaggaagtttggaacattttagtggttacctttaaaggggaccttggattaatgtgtggctccattcaaaagcttgtttaaataaaatttttaatacattatttatatttcccttttaagttctgatttaacaaatcaaacattactagatacttaaataatttataagtctagtattttaaacgtatacatatggtaagccttaagtacttttaaatgtttgaatattatctataaattaatatgatttttacttaaaagcacaaatgtaaatttactgctcagacacatgatttatattgaaagctcaagcctgatccacgaattgaacagaccaaattcttttaaagattaaaaagaatacataaaacaacaaatgtgcacagataatataaaaatattaatactatgagtttgatttttatatatatttctatggttaattctaaatcttcctatggc

SEQ ID NO: 15436 - DNA, 301 bp, Homo sapiens
tgatcaagcagacaaaagagtggaaaagttgaagccatttgtaccttaatctaaacccaccagggaagaacaggtatagagattatatttagggtgccatagttaggtttattgtgagactaactacaaagtkcagttgaaaggggaaagggtgtaggaggttgtatgagccatgaacaatgtacaaagaatgtgacaaactcaatttggattcagacaaaagtcaaagagggttttgcaagagcaggtgttagttcccagcaggaaagcagggcacagctataatctggttgatggctca

SEQ ID NO: 15437 - DNA, 666 bp, Homo sapiens
ttaatatgccaagatgaaaacatatttttaaaaagtcccaagtaactgtgtaagttgaaaactgcacatcttggctgttagcttccattggttttcagaactgttcatcttgaggaggaaacagctaccttcagaggtcggctgctggtacagctttgagtcactaggaggtaagaggataactggtaaaccacgaatgaagcgataaaggaggtgtgtctctaccataaatgctaatgtgggcaattcagctgcatttttcacaataagcactttaccacactttatagaagcattcagataatgatcaccaattattctgtggttctccrtgctctctcagttgcagaggcagcaatggaaataagagttggtctttatgcaggaacatgtatttagaaaacgctttggtattctacagggctgggaagagactctgttcttttgttagccaggggtaaacaggccagcactctcatagaagtgagaagtactcctgctgctctatgaactgggtcctgttatgggctgaattgtgtccccccaaattggtatgttgaaatcctaactccccagtcccccaaatttgtctgttgaagttctaattcccagagactatatttggagacacggtctttaaagagataattaaggttaaatgagggc

SEQ ID NO: 15438 - DNA, 1228 bp, Homo sapiens
atggggtatattgtaggtaggtaggacaaaacaaattccagtttaccaagaatgaagccaaggaaggacccagagaggctgtgctattggtygaggccacactgctaaactcaaatctagccctgactccaaatctggctgtatcttgttttcttttgggcaggactatcctaggccacgaatgcctgccttgcagtcacccacttaccagtggagccctgccaagactcagaagtgccatgggtctcattaggtcccaatatacacctttatatccccagccttgactctcccgagtttcagtcctacttcttcaaagacattatgaataaagtttcttttctgaaggtagcttccctcaaaaaagaattttgggagccatgttcctccttaaaaaacaaccaggctgggtgcagtggctcacagctgtaatcccagcactttgggaggctgaggcagatggatcacttgagtccaggtgtttgtgaccagcctgggcaatgtggcgaaatcctgtctctacaaaagagccccgccaaaaaatcagcagggcatggtggtgtatgcctacggtcccagctattcgggaggctgaggtgggaggatcacctgagtccgggaggcggaggttgcagtgagccaagatagcagcactgcactccagcctgggtgacagagtgagaccctgtctcaaaaacaaaaaacaacaaaaaacaaaaacaaacaaaacacaaccaataagcagatcaacagagaaaataaatggaggcagtttgcttactaacaacagagtggcaataaaaacttaggcctaggtttcataagatgtcttaaaacaataagcgataatgatgcggcatgtctaggaacccactctaaacatctttccctttcacttggaggatgaagggtgacaaggatgacaggcacaaagcatcaaatggtaactcctaagctccattttagcaagtggtgggaaagacaatccagatttacccaatgtcttttacgtcctgagaactcaatgtgcacatttttttctaattctctcaaccccaatcaatcaaacaggttcttcctgagtgcctacaaccatacaccttgccctgtgccaggcatgggggaaatggtggtgacaggacagctgcaatgtctttcctgtggagctgccagtctagggcagtggctctcagcctttctcccaccgtgacacactggaggggtgcag

SEQ ID NO: 15439 - DNA, 539 bp, Homo sapiens
taatcccagcactttgggaggccgaggcaggcggatcacgaggtcaggagtttgagaccagcttggccaacatggtgaaacgccgtctctactaaaaatacaaaaattagctgggactggtggcacgagcctgtaatcccaagctacttgggaggctgaggcaagagaatcgcttgaacctgggaggtggaggttgcagtgagctgagattgcgccattgcactccaacctgggtgacagagcaagaatctgtcttaaaaaaaaaggagtgaaacgtgctcctggcacatgcaggcgggagctcaggaatgcgcactggagggtttgtcagggtctggctgcctgggtcccagccctacctggggcctggctagtcctggggaggcctgggaagtgctgggccccgtgctgtgccgtaaatggagatacaggtgtgtccagggatggggctagagacaaaactacaggagcccaggctagcctggtttttagggkatggctggtctggtggggagagggcagcaaggtgaactccaaag

SEQ ID NO: 15440 - DNA, 535 bp, Homo sapiens
aatttacaagaagatgaaaccaagtgtctatttaggattctgaagttcacaaaaataatcattttagttatattttgttagcaacttatagactattttaaaatatttagtttacatagctttgattcagcttcatggaaaacttcctttctatagaatccagttaatttcattcccggtaagttttctgtatcagttgccctaaatgactctgataatattaccctgtatagaagagcttgtttaagtgcttgtgccaggctgtgctgagcacttcatgtgtgcatcatctgatgagatccttggagtatccagctcagggttgtgcctccacctgctttgtcctcagtttaccaagcagccccaggtggagggagctttcaaagcctgaccrctgtttccctatatcctgaaacacagtagaccctgaaatatcgttacaaacttgtactcctttaataatgtaatgtttgctgacagtttgacttcccagatggaagtgaaagagtgttctgtgcatcatagctctttagca

SEQ ID NO: 15441 - DNA, 728 bp, Homo sapiens
tgtcccagttcccaaacttctagaatgctatcccaaactaacctctgatttggcaaagtaggcagccaccttgagaagcaattagagatgactgaaaggaccatccacagtaaaatatttttcccacctacttgccacagactgagattgcccgtactagagctacttatttggatgaagtctatgatgccttttaaaaaagattaatttaaaatgcaaaggtgacagggcacagcggcgcacgcctatgawcccagcactttgggaggccaaagcgggtggatcacctgaggtcaggagtttgagaccagcctgggcagcatggtgaaaccctgtctctaccaaaaatacaaaaaattagctgggcgtggtggtgggcgcctgtaattccagctactcaggaggctgagacaggataattacttgaacctgggaagcggaggttgctgtgagccaagattgcaccattgcactccagcctgggcaacaagagcaaaactctgtctcaataaataaataaataaataaataaataaataaataaataaaataaaatgcaaaggtgttggagggcaaagatttgtctacaaaggtgtttatcacatgataatatttaaaaattgtaaccatgttcagtaataagaaattagttaattaaattattactcattaaatagaactatatggctatttattaaatttcatggaacagtgaataatacacaaaa

SEQ ID NO: 15442 - DNA, 513 bp, Homo sapiens
taatccagagaaagatgatctttgtgacgttagataataattaaagagacaaggacccctctgcatcattcaactgaagatgtgttactctgtactcactctcttagttcttaagatctcacagacctgttggcaagtatactccaggacagcaggaggagacagcatgagagaagagaagcagctgaggtctttggttctcacaggtatctcctttcctcacactcaatgactttttccaacctcattcaacatgtaaattgagagacagaatagaattgtgcccaacactgcctacccrctacccactatcgatttgctccttacactaatagaacccccattatgtctggtgtgatgatgtacttagttaaactacttcttcccaaactctcttgcatttatgcacaagcacgtgacccagttttgctcaaagagacgtaggtaaaagttgctgagtagtactcccaggaaaggtttttggttttgttttgctaaagggaaagacctggc

SEQ ID NO: 15443 - DNA, 522 bp, Homo sapiens
gcaatgggggcttgatatgactctgaactcatacagatgggtccatctccactggggtagatatcaaagttgctccaagatgcaacttggggccccaaagcatctgctatcatgtgtaaagtacctgaccctttataaccatcaaaatggccaaaactaaaaaggtgaacataccaagcgttgatgaagatgtggggaggggagtaytcgtgcatggctgtggggtgtgtaatgagtgcaggctttttaaaaaacaatctggcttgtctcagtgaaatttagttggtacatgcgctatgatctggtgacctcccacatcccaggcatacagcttagaggaactgactcatgtacaggtttataaggacatctttattcagatgttcactgagcttgttggtgacaacctggaggaaagttagatacaaactgagtgtccatttttaaaggaatggataaggaaactaaggtggatgcaccttatgaaataccatgcagcagcaaaaagcaacatacaaaatg

SEQ ID NO: 15444 - DNA, 522 bp, Homo sapiens
gcaatgggggcttgatatgactctgaactcatacagatgggtccatctccactggggtagatatcaaagttgctccaagatgcaacttggggccccaaagcatctgctatcatgtgtaaagtacctgaccctttataaccatcaaaatggccaaaactaaaaaggtgaacataccaagcgttgatgaagatgtggggaggggagtattcgtgcatggctgtggggtgtgtaatgagtgcaggctttttaaaaaacaatctggcttgtctcagtgaaatttarttggtacatgcgctatgatctggtgacctcccacatcccaggcatacagcttagaggaactgactcatgtacaggtttataaggacatctttattcagatgttcactgagcttgttggtgacaacctggaggaaagttagatacaaactgagtgtccatttttaaaggaatggataaggaaactaaggtggatgcaccttatgaaataccatgcagcagcaaaaagcaacatacaaaatg

SEQ ID NO: 15445 - DNA, 577 bp, Homo sapiens
atgctgagttgggacctattaaatcaataggtatgaaattgtgatacacaggccatcagctttagcatcatctctggtacttgttaaaaatccatattcccaggcctctggtcagacctgctgagtcagaaggggctatgagggaggaatctgcattttatggacatgcataagtccactaaatgtaaagacattgccttccatcaggctttgcagktacccactttttttcacttgtgcccagactctagtcctaggattggtctctctacttcctttttagtcccctgtatggctctaagtctggacagcaaacagatggctcactcaaatagagtatgcctttaataaaaaggtgccaacctaggagagtgcagtaccccaggctaagtaacagtggggagttgtcaccaccaggaggaaggggagctataagttatctgagcttggagaacctcaacaccatttggcctatttcctgaagagttcttttaatgcccctgggttgtttagtgggaaggtcctatgcaggggctcttaggctatggagtgggatctttgtgcagtggggccaggt

SEQ ID NO: 15446 - DNA, 485 bp, Homo sapiens
tgccacagcttgtaggtcagttgttggtgaaacagatctgttaattacatgataacttcagcattaaattgaatttatagaagtcctttctaaastaccaatttttaatttcccttaacattctgttatttttaaaggtagaattacatattacctgtccaaagtcggtattatgttaaatattcaaagaaaaaaaaaagacttttagagactcattttgctagtaactattctgaacgctgaaatggtttcattcagtgaaatgtacacctatcttgccataattaaattcagcttccttggctcttgcttcaaaaaggattcatttttaaaaatataatgaccattcttatacagaatacaagttattaagtcgcccgccagcaatattctctcaagctacctagtcatcatccctttaagcttttcatatcttatagttccaagatttggatcattaatttttctcccttatgcatacattg

SEQ ID NO: 15447 - DNA, 485 bp, Homo sapiens
tgccacagcttgtaggtcagttgttggtgaaacagatctgttaattacatgataacttcagcattaaattgaatttatagaagtcctttctaaactaccaatttttaatttcccttaacattctgttatttttaaaggtagaattacatattacctgtccaaagtcggtattatgttaaatattcaaagaaaaaaaaaagacttttagagactcattttgctagtaactattctgaacgctgaaatggtttcattcagtgaaatgtacacctatcttgccataattaaattcagcttccttggctcttgcttcaaaaaggattcatttttaaaaatataatgaccattcttatacagaatacaagttattaagtcgccygccagcaatattctctcaagctacctagtcatcatccctttaagcttttcatatcttatagttccaagatttggatcattaatttttctcccttatgcatacattg

SEQ ID NO: 15448 - DNA, 525 bp, Homo sapiens
aagaaggggaaacgtcctccctcagtgggttcctgaatcacagtttattttgacttggaaacacaacatgtttgattggctggaacataagccacccaggaatagatttactagcatcaagcgttgtttagggcaactgggttgatgctgaggctttcattcctaatggccataatggatggaagrtttctaagaagcttgattattattgggttcattaataactaaccctaacatgactctattgggactgtgattaatccaaataaaagtaactttgttcatgaagaagatttttatttttatttttttctggtaactgctatatactcaaataacaaagaaacaaagaaccaaactagaaacaagtgcagatgccaggaagtcagtcacaactactttcctctcccgggatcccctctggcggcctgagaatgcctcccagcaagtgcgccctctattgtttcccagttactttgtcatctcttcgtctgattttgaaggacggcacagtttcctagtaag

SEQ ID NO: 15449 - DNA, 532 bp, Homo sapiens
tgattataaatttctcctgttatataacaataattaaccctctaaattgtataaaagcaccaaatgaactccatttcatcttagtatataacccagtgaccaaaatcattaacttaactcacagctaaacctttctttttcagaggtgcaggctcrgcaagaaaatattcattaaaagaactaaaatgtttcataacaatagaggttaggttgtttttggaaattctaaagttctcttattttaaatttatataagtgcttttaagtctctacaaagaaattaacttaagagctcccatagaatttgagaatttatcatctgattcatcagtttgcttctatctggatccgatatccctagagtgtggtataacagagtttacaaccaactgaaaaggttgcccattgtagaattgaaacagtttatattgggttgaagggaatgtattaaccctttttgaacttgcttaatgaaaaacaggtatagaatggattccttcatcagccaaaagacagatgagtaactccaagg

SEQ ID NO: 15450 - DNA, 506 bp, Homo sapiens
tcatgatgcgacagtcatgacacagtctcatcaacaatagtcgaagtaccaagagtcaaagtgccctgccctgctgcccagagtgtggtgtgggacccaggcctctcatgtaatccacaatctacatgactaatattcagagcagagatggtggaaactctgaggacctcatccatcagccctttctgaggtccagagcttgagcctcccctgctcaaggcagccacattagtttctgttacatgcaaccgaagcacactgaccaagagagaaacattacgtgactgcygccagacagcccagctagtaagtggcagagtgaggatctgaacccagggctgtctgatgtcaacgccccatgcttcctctcaagcaatatccctaaggggtcaagttcatgggacttgcaagtcctgactttgacttttcatgccttctgcatcttccttataaaattcttacacacttacctccatgtctctctatgcacaggtgtgtaataatgc

SEQ ID NO: 15451 - DNA, 573 bp, Homo sapiens
tcttattaaccaaaatccttgtaatacttaaataagtacctatattcacctaaccaaaaatgtgtatatacatcatgcttttattagtcccattagtaaataatgaaaatcatttataaaaatgacaaataaatatctgtaaaaataaaaaaatcagtagcaaggtaaatccattatatctctattatgtatacatccaagtctttagtgcactgtgattcctattggtgatttttttcaaaatgattttaaaatctaaaagcttggctgggcatggtggctcacacctgtcatcccagcactttgggaggctgaggccagcagatcatgaggtgaggagtatgagaccagcctggatagcatggtgaaaacctgtttctactaaaaatatatatatatataaattagccaagtatggtggtgcacacctgtaatcccagctactcgggaggctgaggcaggacaatcgcttgaacccrggaggcggaggttgcaatgaactgagatggcgccactgcactccagcctggtcgacagagtgagactccatctcaacaaataaataaataaata

SEQ ID NO: 15452 - DNA, 517 bp, Homo sapiens
cctctaamattgaatgttaagtcaactagaaataatgacaatatttaagaaataaaattctttttattttttatagtttataaaaaattatttttgaattataagttaaacaacttgaacatgcagatacctaaaagtgtcatctaggtgatagtattaatattttaatagcttataattgtgagtcacagttgccccattgggtttactgaaaagcagttatttatcttatatgtgtgaatggagaataggctttttataatcctaagcatacagatcttttaagattagcgctatatttagatctgaataaaattgataggcttgtaataacaaattttaatacttttttctaatagaagtgaaaaacagaagtcatttgttaaaatgagtttaagagaaacttcacatgtatttattaaataacacttaaaccacatggtaagttactaatcagtaatttcaatctattttattttagtcactgaaaaagcataacattctttaattattcaat

SEQ ID NO: 15453 - DNA, 517 bp, Homo sapiens
cctctaaaattgaatgttaagtcaactagaaataatgacaatatttaagaaataaaattctttttattttttatrgtttataaaaaattatttttgaattataagttaaacaacttgaacatgcagatacctaaaagtgtcatctaggtgatagtattaatattttaatagcttataattgtgagtcacagttgccccattgggtttactgaaaagcagttatttatcttatatgtgtgaatggagaataggctttttataatcctaagcatacagatcttttaagattagcgctatatttagatctgaataaaattgataggcttgtaataacaaattttaatacttttttctaatagaagtgaaaaacagaagtcatttgttaaaatgagtttaagagaaacttcacatgtatttattaaataacacttaaaccacatggtaagttactaatcagtaatttcaatctattttattttagtcactgaaaaagcataacattctttaattattcaat

SEQ ID NO: 15454 - DNA, 988 bp, Homo sapiens
ttttgtttactattatcatcacattttgtctttctaagtttttattattgtaaatggatagtgccaacaatcccagtattgcatactgtacatcattctctaggttatattacatatataaatctggaacagtattggatgaaaatgcacccaaaagggaaagcacgcataaaagtcagagataaactataacttgacagtgtgcacaaaaaaatcatctattccaaattatatacccttagctttctaatgccaactttaaattatgtttgtctttcttgtgcattttcagacttkttaagcagaattacaatctgatatttgtttggctatttatttggtggaaaatcatctctcattgtggttaagtcagtgaaggtggtacaaccatacaaccgcacacttggacagatggagatgacgtctgcacatacagattagagccttcggacatctccatgtggactttccccacatcatctgaagaggtgctcatcttgcttgcacattatttcctttggtaggtttttcacactcttgtctcaggaaattaagttctttcctttgggactgcatcctattttagcgaagacaaggactgaggcatcagtatccttcatgcaagaaagaaaaataaaataaaatattcctttgcagtatttttgcttgttctttgcctggccaggctgaagtttgctgtcttcaaaagtaggaagtctgttgcagaataggctgcttgccagatttagtctgggcctcatgggcctgagatttactgtgtttaatctttttttctgatgggcattctaaatacctgtttcatgcgatgtttaatttcagcacagcaggtattagtgtatccaaaaatgggaataagctgcctgtttcctcgtatgatgaaatgcctaaaacacagctaggtttttactgtgcctagtcctttatccccttaatagtcagtgtctgttccttaaaaaatggtactttt

SEQ ID NO: 15455 - DNA, 988 bp, Homo sapiens
ttttgtttactattatcatcacattttgtctttctaagtttttattattgtaaatggatagtgccaacaatcccagtattgcatactgtacatcattctctaggttatattacatatataaatctggaacagtattggatgaaaatgcacccaaaagggaaagcacgcataaaagtcagagataaactataacttgacagtgtgcacaaaaaaatcatctattccaaattatatacccttagctttctaatgccaactttaaattatgtttgtctttcttgtgcattttcagactttttaagcagaattacaatctgatatttgtttkgctatttatttggtggaaaatcatctctcattgtggttaagtcagtgaaggtggtacaaccatacaaccgcacacttggacagatggagatgacgtctgcacatacagattagagccttcggacatctccatgtggactttccccacatcatctgaagaggtgctcatcttgcttgcacattatttcctttggtaggtttttcacactcttgtctcaggaaattaagttctttcctttgggactgcatcctattttagcgaagacaaggactgaggcatcagtatccttcatgcaagaaagaaaaataaaataaaatattcctttgcagtatttttgcttgttctttgcctggccaggctgaagtttgctgtcttcaaaagtaggaagtctgttgcagaataggctgcttgccagatttagtctgggcctcatgggcctgagatttactgtgtttaatctttttttctgatgggcattctaaatacctgtttcatgcgatgtttaatttcagcacagcaggtattagtgtatccaaaaatgggaataagctgcctgtttcctcgtatgatgaaatgcctaaaacacagctaggtttttactgtgcctagtcctttatccccttaatagtcagtgtctgttccttaaaaaatggtactttt

SEQ ID NO: 15456 - DNA, 988 bp, Homo sapiens
ttttgtttactattatcatcacattttgtctttctaagtttttattattgtaaatggatagtgccaacaatcccagtattgcatactgtacatcattctctaggttatattacatatataaatctggaacagtattggatgaaaatgcacccaaaagggaaagcacgcataaaagtcagagataaactataacttgacagtgtgcacaaaaaaatcatctattccaaattatatacccttagctttctaatgccaactttaaattatgtttgtctttcttgtgcattttcagactttttaagcagaattacaatctgatatttgtttggctatttatttggtggaaaatcatctctcattgtggttaagtcagtgaaggtggtacaaccatacaaccgcacacttggacagatggagatgacgtctgcacatacagattagagccttcggacatctccatgtggactttccccacatcatctgaagaggtgctcatcttgcttgcacattatttcctttggtaggtttttcacactcttgtctcaggaaattaagttctttcctttgggactgcatcctattttagcgaagacaaggactgaggcatcagtatccttcatgcaagaaagaaaaataaaataaaatattcctttgcagtatttttgcttgttctttgcctggccaggctgaagtttgctgtcttcaaaagtaggaagtctgttgcagaataggctgcttgccagatttagtctgggcctcatgggcctgagatttactgtgtttaatctttttttctgatgggcattmtaaatacctgtttcatgcgatgtttaatttcagcacagcaggtattagtgtatccaaaaatgggaataagctgcctgtttcctcgtatgatgaaatgcctaaaacacagctaggtttttactgtgcctagtcctttatccccttaatagtcagtgtctgttccttaaaaaatggtactttt

SEQ ID NO: 15457 - DNA, 473 bp, Homo sapiens
atagaaataaaagaatgtctgtaatagtccatggcacctgccttggtttatttttatctataaagttggagtggatgatctataaggatcctttgagtttgaagctgatggagagctcaaagagttcagcaggggtaaataactagaaagggcaggcaatgcttattcagcacyttcttcataaacagagtttgtaggcagggtaagggtgggtgaaaggtggagctgggaatctatcagctggggtttgaatgggagtggagaaagcatcccaagagtggagaaagccacagcaaggggcagaacgtgaaagagcatgcagaatggaggctgcgtgtggcatccaggcgggcctcagatggcaccgatcctcagacagtggtcagggtaacactttcaagacagctcccttgtgagctttagtacctctctttagaagttgctggcagtgcattggctgggatcctgaaagt

SEQ ID NO: 15458 - DNA, 455 bp, Homo sapiens
agtttcacagcacaggtgtgtgcttgattctctacttgcggttccccactgccaccacccccccccccacacccgctgccttgatgctgatagtggctgtctaaagtacaaagggaaagttaagcttacaggttgtccttctctttgattgtattcttggctgtagcttctcagccctttgcaggaggaactcacatcagkctggaacataaaaacaggagaattttcagccctggaaataattgcttcttggagtagatcctttgggagcctccacactgaggaatgaagtttgactaagccccagcaatgaataggacttggatgaggagaaagggtctgagatctgtgtttcgaggcaaggaaaattctggcaggatccgtttgcatatatattgaggcctaattaggccctcggtgtgtttggaaactgctttgttgcggtgggtatgata

SEQ ID NO: 15459 - DNA, 2193 bp, Homo sapiens
aaaaaaaaagaaaacatgcctttgaaagaaaagaagaagtcaaagaaagactctgagattgaagtattttgaaaagaaaagaaaaggttcacctgctgagaatataaaggaaacagatttcagaaggactcacttcccaaaaagacaacagaaaaaccatttagtacaatatactgcaaaaaattactataatgccatagatgttgggggatgctgacaataatatccaaaaccatgacggttaaattcattgatgtcaatttaaaatatacttctaaatcttgacagaatgaagtgtcacttacagtcaaaaacccagccctcatgtgcaacaaaacacatgtgtccgtgtaccatgtggaatgtgttctttccacttgagtgttaatttctctcaggaagacagtggaacagtaaggagaaaactttgccttccacctaaataagaaatctcygtttataacaagctcagtcctgcccccctcaacccgccccgccgtggcctcctgagtgccatctaatcagtttacaagagggtctcacggagggcaaacaactggccaagttcaggaatgacactcaagcctgcagcccaggaactcaagtgctcaagaattaggatgacaaatttagtccagtcgcaggaggacaattaagaaggctggctggtttgtttcataactggattcctgggcagcccttgtatgacagctgtttaacaccagcccaagggggatgagccgagatgaaagagaaaatgagttcaactgagcctcattctgctactaaaaagaagaagaaaaagaaaagagggagagattcagacatttggcgtcaccttgggctactactgtattgtgtttggagggctgcatttcttttcttgggggatgaggtggtcagattagagggaaagaggttatattttgaaagaaaagcagactgttgttagtgagcaaatcagaaccggttccaagaaacctaagtcctggctggagcccatgctacaggtcataaccgtatcccaaacaaaaatccttatcggaatgctcatccccaaagccgacttcaattgctgccttttcatctcagcagccaccaacaggccaggggctcagcagccgctttcattaatttccgctatcactgctgatcttgaagctttcgccaggaagggagccaagggctctgtctttttcataggtaatttacaattatgagggccagtttccttgaaccctatggtggggcagaggggattggggagcaagcttctttctctcctaaagaaacaaagggattgattaaaaaaaaaaaaaaaaaaaaacagacggtgagagctcatgaataccgcagctctggctccagcccgaaataaacatgaaaaataatgaaagtcctgaaagtgaacagctgaggacgcatctccggctgcatttgggggcagctctcaaaagccacctggagtttcctgaatcccaagtaataactttcaaactattttctaagccaattttttgagagccctgaatggctggcataagtgccaagaacaatgcagcagcacagcttccctgggagcagcccggccccctgcccagccgacagtcaccaggcaggagagccacgtgaaaggcaagcggcagggaacagccccctctgggagcccttctctttcttgatgtgctttactgactcttgaatttacactctacccattctgttctggggaaataatttctaaaccaaatacattaaagggtagattttttttaattaactgcaataaaaaatggttttttaaaaaaagagatacctaacttgttagatgtattagtaataagttaataacaggccctgcacatacttcatctcatttaatactcccatcacatgtaggaggtcagtgttaattttatctctggtgatcagagagattaaatctttcagtcaagatcacaaagctataaagttccttagctaggatcaaacccaggtctggctagctccacccaaagcctgcagatgtattttcattgcaaaacatggtctctcccgttaaaagagaacactatcagtgcaagctatggagagggatttcagggctaagcccttctgtccaagtgtggatccctcatgactcattctcactatgatgattgataaagccatcatgcctgcacaagactagga

SEQ ID NO: 15460 - DNA, 2193 bp, Homo sapiens
aaaaaaaaagaaaacatgcctttgaaagaaaagaagaagtcaaagaaagactctgagattgaagtattttgaaaagaaaagaaaaggttcacctgctgagaatataaaggaaacagatttcagaaggactcacttcccaaaaagacaacagaaaaaccatttagtacaatatactgcaaaaaattactataatgccatagatgttgggggatgctgacaataatatccaaaaccatgacggttaaattcattgatgtcaatttaaaatatacttctaaatcttgacagaatgaagtgtcacttacagtcaaaaacccagccctcatgtgcaacaaaacacatgtgtccgtgtaccatgtggaatgtgttctttccacttgagtgttaatttctctcaggaagacagtggaacagtaaggagaaaactttgccttccacctaaataagaaatctccgtttataacaagctcagtcctgcccccctcaacccgccccgccgtggcctcctgagtgccatctaatcagtttacaagagggtctcacggagggcaaacaactggccaagttcaggaatgacactcaagcctgcagcccaggaactcaagtgctcaagaattaggatgacaaatttagtccagtcgcaggaggacaattaagaaggctggctggtttgtttcataactggattcctgggcagcccttgtatgacagctgtttaacaccagcccaagggggatgagccgagatgaaagagaaaatgagttcaactgagcctcattctgctactaaaaagaagaagaaaaagaaaagagggagagattcagacatttggcgtcaccttgggctactactgtattgtgtttggagggctgcatttcttttcttgggggatgaggtggtcagattagagggaaagaggttatattttgaaagaaaagcagactgttgttagtgagcaaatcagaaccggttccaagaaacctaagtcctggctggagcccatgctacaggtcataaccgtatcccaaacaaaaatccttatcggaatgctcatccccaaagccgacttcaattgctgccttttcatctcagcagccaccaacaggccaggggctcagcagccgctttcattaatttccgctatcactgctgatcttgaagctttcgccaggaagggagccaagggctctgtctttttcataggtaatttacaattatgagggccagtttccttgaaccctatggtggggcagaggggattggggagcaagcttctttctctcctaaagaaacaaagggattgattaaaaaaaaaaaaaaaaaaaaacagacggtgagagctcatgaataccgcagctctggctccagcccgaaataaacatgaaaaataatgaaagtcctgaaagtgaacagctgaggacgcatctccggctgcatttgggggcagctctcaaaagccacctggagtttcctgaatcccaagtaataactttcaaactattttctaagccaattttttgagagccctgaatggctggcataagtgccaagaacaatgcagcagcacagcttccctgggagcagcccggccccctgcccagccgacagtcaccaggcaggagagccacgtgaaaggcaagcggcagggaacagccccctctgggagcccttctctttcttgatgtgctttactgactcttgaatttacactctacccattctgttctggggaaataatttctaaaccaaatacattaaagggtagattttktttaattaactgcaataaaaaatggttttttaaaaaaagagatacctaacttgttagatgtattagtaataagttaataacaggccctgcacatacttcatctcatttaatactcccatcacatgtaggaggtcagtgttaattttatctctggtgatcagagagattaaatctttcagtcaagatcacaaagctataaagttccttagctaggatcaaacccaggtctggctagctccacccaaagcctgcagatgtattttcattgcaaaacatggtctctcccgttaaaagagaacactatcagtgcaagctatggagagggatttcagggctaagcccttctgtccaagtgtggatccctcatgactcattctcactatgatgattgataaagccatcatgcctgcacaagactagga

SEQ ID NO: 15461 - DNA, 1904 bp, Homo sapiens
actaattctttctcttaggagaggacaaacttgtcccacagtcctctgtccatcaggggacttcacaggcccaccaagtggcttctgctgtgttattcagggacattctctccatggagagtactccagtctgaagcactcctaccaccaaatgcccccacatcaagtgccttctccaacaccacacggcaaggagcttcatctcattttgaaaagcagtcgttaagtgttcccacatttgaatgctaaagacacttgcaagagacaatttgccggcctttgcagatggagagagagaaacccaggaaggataaatcaatcactcaccgacagttacgaaggacgttgctgaagatagagcctgggaacctccatgcttagtccagagctcttttcactctaacaagcgccctcctgtcacagcctccttcttgtcctttaaaactggagagatgctgcctcctgttccaaagaccaccttccatcaaggaaggagggacatttacaatactgtgaccaccaatcccatgggtttcccatctctgttgttacccaggaagtcctggtcatgtcatggccacatatgtttagtggaaaaaaacaccaccaatacaactgtcattgtggaggtatggaggtctggagtctctcataagcctggggttttgtgtcatcagggcctgtggccaccttacctgggctgagtttgtggatgaggttctctgtcagcctgcagccctcagccagctgctctcagatatcctgcccctgggagttgtcaggctcatccggagtgaggagggcctggagatgctgattcaatgagcgggaggcatctctcccttcctgtaatctcttccttaaccaggccagctctcgtgcctgagagtgaactaggactttatattgcctaaggtgagacagtagagaaaatttaataatggaaagggatgagtgatcagttctaatattgcaacagagatctctgagacaatgtcctcaaggagacctccaagcagaaggtcagcacatgtttggggaaatgcctgtggccaagacaaaaagaattttttttacaggcttcctctatatcagagagtgcaactgaaatatcctcgacaatgttgcattcatatttctcttctgtaaacaaaagtaggtctttctaaatcagtttcaaaaagacatcctttcaattcctcactttggccatcgacatttccatgtgaaaatacacataaggtattttgtggtgactagatacaaagccaggtacagaaatgaggctaggtgcagatggggcaaattgaaaagacgaaagaagaaaagaatgacagggtcgagaaggcaacactgattgagtgaaagaatgagaagccgcagtccgtcaggaggtgattctgactaagggtaagtggggtgatgatggcacaccattttgagtatactgaatgctgctgggtggttyccactcctttggttaattttgcattatgcaagtttcacctcaacagttacttgtttgaaaaagagaaaacaaggttctgagaaacaactgcaactcataacttattattatccttgttctctgtttgataaatatttgggtgtcgtgagcctgccatggcaattcctgcccttcccctggcccagcttagctcttatttctcccggctgagctgctgtacttcagagattcacatacctgcccacctgcctgcccccacggggccgcctcacctgagctcctcagcttgcccaagctgctctgcaagcttctcgtccttgaattgcagctcatccctcagcatagattttatgaggtctttgaattcttcatactctgagaaaagacagacgcgcctgcctcagtggaaggctagacatgctgctgtggtcattgc

SEQ ID NO: 15462 - DNA, 1904 bp, Homo sapiens
actaattctttctcttaggagaggacaaacttgtcccacagtcctctgtccatcaggggacttcacaggcccaccaagtggcttctgctgtgttattcagggacattctctccatggagagtactccagtctgaagcactcctaccaccaaatgcccccacatcaagtgccttctccaacaccacacggcaaggagcttcatctcattttgaaaagcagtcgttaagtgttcccacatttgaatgctaaagacacttgcaagagacaatttgccggcctttgcagatggagagagagaaacccaggaaggataaatcaatcactcaccgacagttacgaaggacgttgctgaagatagagcctgggaacctccatgcttagtccagagctcttttcactctaacaagcgccctcctgtcacagcctccttcttgtcctttaaaactggagagatgctgcctcctgttccaaagaccaccttccatcaaggaaggagggacatttacaatactgtgaccaccaatcccatgggtttcccatctctgttgttacccaggaagtcctggtcatgtcatggccacatatgtttagtggaaaaaaacaccaccaatacaactgtcattgtggaggtatggaggtctggagtctctcataagcctggggttttgtgtcatcagggcctgtggccaccttacctgggctgagtttgtggatgaggttctctgtcagcctgcagccctcagccagctgctctcagatatcctgcccctgggagttgtcaggctcatccggagtgaggagggcctggagatgctgattcaatgagcgggaggcatctctcccttcctgtaatctcttccttaaccaggccagctctcgtgcctgagagtgaactaggactttatattgcctaaggtgagacagtagagaaaatttaataatggaaagggatgagtgatcagttctaatattgcaacagagatctctgagacaatgtcctcaaggagacctccaagcagaaggtcagcacatgtttggggaaatgcctgtggccaagacaaaaagaattttttttacaggcttcctctatatcagagagtgcaactgaaatatcctcgacaatgttgcattcatatttctcttctgtaaacaaaagtaggtctttctaaatcagtttcaaaaagacatcctttcaattcctcactttggccatcgacatttccatgtgaaaatacacataaggtattttgtggtgactagatacaaagccaggtacagaaatgaggctaggtgcagatggggcaaattgaaaagacgaaagaagaaaagaatgacagggtcgagaaggcaacactgattgagtgaaagaatgagaagccgcagtccgtcaggaggtgattctgactaagggtaagtggggtgatgatggcacaccattttgagtatactgaatgctgctgggtggtttccactcctttggttaattttgcrttatgcaagtttcacctcaacagttacttgtttgaaaaagagaaaacaaggttctgagaaacaactgcaactcataacttattattatccttgttctctgtttgataaatatttgggtgtcgtgagcctgccatggcaattcctgcccttcccctggcccagcttagctcttatttctcccggctgagctgctgtacttcagagattcacatacctgcccacctgcctgcccccacggggccgcctcacctgagctcctcagcttgcccaagctgctctgcaagcttctcgtccttgaattgcagctcatccctcagcatagattttatgaggtctttgaattcttcatactctgagaaaagacagacgcgcctgcctcagtggaaggctagacatgctgctgtggtcattgc

SEQ ID NO: 15463 - DNA, 1904 bp, Homo sapiens
actaattctttctcttaggagaggacaaacttgtcccacagtcctctgtccatcaggggacttcacaggcccaccaagtggcttctgctgtgttattcagggacattctctccatggagagtactccagtctgaagcactcctaccaccaaatgcccccacatcaagtgccttctccaacaccacacggcaaggagcttcatctcattttgaaaagcagtcgttaagtgttcccacatttgaatgctaaagacacttgcaagagacaatttgccggcctttgcagatggagagagagaaacccaggaaggataaatcaatcactcaccgacagttacgaaggacgttgctgaagatagagcctgggaacctccatgcttagtccagagctcttttcactctaacaagcgccctcctgtcacagcctccttcttgtcctttaaaactggagagatgctgcctcctgttccaaagaccaccttccatcaaggaaggagggacatttacaatactgtgaccaccaatcccatgggtttcccatctctgttgttacccaggaagtcctggtcatgtcatggccacatatgtttagtggaaaaaaacaccaccaatacaactgtcattgtggaggtatggaggtctggagtctctcataagcctggggttttgtgtcatcagggcctgtggccaccttacctgggctgagtttgtggatgaggttctctgtcagcctgcagccctcagccagctgctctcagatatcctgcccctgggagttgtcaggctcatccggagtgaggagggcctggagatgctgattcaatgagcgggaggcatctctcccttcctgtaatctcttccttaaccaggccagctctcgtgcctgagagtgaactaggactttatattgcctaaggtgagacagtagagaaaatttaataatggaaagggatgagtgatcagttctaatattgcaacagagatctctgagacaatgtcctcaaggagacctccaagcagaaggtcagcacatgtttggggaaatgcctgtggccaagacaaaaagaattttttttacaggcttcctctatatcagagagtgcaactgaaatatcctcgacaatgttgcattcatatttctcttctgtaaacaaaagtaggtctttctaaatcagtttcaaaaagacatcctttcaattcctcactttggccatcgacatttccatgtgaaaatacacataaggtattttgtggtgactagatacaaagccaggtacagaaatgaggctaggtgcagatggggcaaattgaaaagacgaaagaagaaaagaatgacagggtcgagaaggcaacactgattgagtgaaagaatgagaagccgcagtccgtcaggaggtgattctgactaagggtaagtggggtgatgatggcacaccattttgagtatactgaatgctgctgggtggtttccactcctttggttaattttgcattatgcaagtttcacctcaacagttacttgtttgaaaaagagaaaacaaggttctgagaaacaactgcaactcataacttattattatccttgttctctgtttgataaatatttgggtgtcgtgagcctgccatggcaattcctgcmcttcccctggcccagcttagctcttatttctcccggctgagctgctgtacttcagagattcacatacctgcccacctgcctgcccccacggggccgcctcacctgagctcctcagcttgcccaagctgctctgcaagcttctcgtccttgaattgcagctcatccctcagcatagattttatgaggtctttgaattcttcatactctgagaaaagacagacgcgcctgcctcagtggaaggctagacatgctgctgtggtcattgc

SEQ ID NO: 15464 - DNA, 521 bp, Homo sapiens
aaagtcagtccacctggagcccaaatcccagctctggcaacttttggcaactaacttcatattctgtgcctcatctccctcaatggttactgtgagcacaaaacaagagtgcctgtaaagtgctcagtaacaggggaacggacacttgggagtacctgatacagggtggctgtcatcgctaacacggtgggtacccggtgaatacacagtgaagatgctactaaaggaatccattgctgtgacagtcacttcctcccaggacagtcactgtctcctgctccacaaaggagtaacctatttctggctttgatttgctggctgataaatactcagtaatgtaaactatgcccagtctaaatgcgctaggaagtcactgcaaaactcractttagcacattgtagatgaacttttcaaaagcctcctctggggcaaacactacgcgtgcatatgtaatggcggcattctttccacatgtctcgaagccatcccctgtgattcggattttcacataacaccctcc

SEQ ID NO: 15465 - DNA, 521 bp, Homo sapiens
aaagtcagtccacctggagcccaaatcccagctctggcaacttttggcaactaacttcatattctgtgcctcatctccctcaatggttactgtgagcacaaaacaagagtgcctgtaaagtgctcagtaacaggggaacggacacttgggagtacctgatacagggtggctgtcatcgctaacacggtgggtacccggtgaatacacagtgaagatgctactaaaggaatccattgctgtgacagtcacttcctcccaggacagtcactgtctcctgctccacaaaggagtaacctatttctggctttgatttgctggctgataaatactcagtaatgtaaactatgcccagtctaaatgcgctaggaagtcactgcaaaactcgactttagcacattgtagatgaacttttcaaaagcctcctctggggcaaacactacgcrtgcatatgtaatggcggcattctttccacatgtctcgaagccatcccctgtgattcggattttcacataacaccctcc

SEQ ID NO: 15466 - DNA, 587 bp, Homo sapiens
gatccatgtattaaaaatacatgtactcccatagtttttgagattggctgtgagataacagatatgttaaatcattatgttgttttctaaaattacaataaagaatagattttaacagtaatataacactccaaataactatacaaatagctcatcataatcacaaatattttctacataaacatgtttatttttgtcaaatgtrtaacatcaattattataagttatattctattctccaacacaataaaatagctacgttcagttatacttaataaaagagattattacactgtcttttaaaaaataaaattattctaatgtagcattagactagctgtctttgaaaagttgcgaattttttggctctgccaaggaaggcatccaaatatatttgtcaaagcttgttccctaagccttctcatccttgtaaatgccaatcagcccattaggctggtgatgaggagggaagagggaacttgaatcacaaagcatattcagccccctaagagattgaacacttgaagattgatatttaccatatttcttcaagtctataatgtacattttctgaaatctggatgtct

SEQ ID NO: 15467 - DNA, 636 bp, Homo sapiens
agtcttgtttgtactatgttacaggtgagaatgctgacatgtagaggggcaagtacttacctgatcacgttgtcttagtatgatgaagcctcacttaaacccatgatctcatgtcttcccttaaactgatgcactgaaatacagtcaggtaaaataaagagttaggggcacattttaaaatacatttaaggtgcatcaaagatttaaaccaatcacttgtaacatctctatttgtcaaactcattggtgatcattagcatttagagagacccaggamaatcgcaagattctaaataattttcaaaccatagtagaggatactttgtttactgttatttatgtattaaatatcttttaatatactatagctttataagaacagataatccatttttggaatttgtgttttaattggccaaagagttaaatccattttttctagatcctctggataattaggaatcggtagtaaaaagcaattgcacttttccaataaaataatatgctcagttgttcaaacccacattcttgataaaaacaactagaaattctgcataagatagaagaaaaagaagattttgaaacaacaaagagcatacaagatggtaaggaattacaagaccaaaatctaagtga

SEQ ID NO: 15468 - DNA, 636 bp, Homo sapiens
agtcttgtttgtactatgttacaggtgagaatgctgacatgtagaggggcaagtacttacctgatcacgttgtcttagtatgatgaagcctcacttaaacccatgatctcatgtcttcccttaaactgatgcactgaaatacagtcaggtaaaataaagagttaggggcacattttaaaatacatttaaggtgcatcaaagatttaaaccaatcacttgtaacatctctatttgtcaaactcattggtgatcattagcatttagagagacccaggaaaatcgcaagattctaaataattttcaaaccatagtagaggatactttgtttactgttatttatgtattaaatatcttttaatatactatagctttataagaacagataatccatttttggaatttgtgttttaattggccaaagagttaaatccattttttctagatcctctggataattaggaatcggtagtaaaaagcaattgcacttttccaataaaataatatgctcagttgttcaaacccacattcttgataaaaacaactagaaattctgcataagatagaagaaaaagaagattttgraacaacaaagagcatacaagatggtaaggaattacaagaccaaaatctaagtga

SEQ ID NO: 15469 - DNA, 636 bp, Homo sapiens
agtcttgtttgtactatgttacaggtgagaatgctgacatgtagaggggcaagtacttacctgatcacgttgtcttagtatgatgaagcctcacttaaacccatgatctcatgtcttcccttaaactgatgcactgaaatacagtcaggtaaaataaagagttaggggcacattttaaaatacatttaaggtgcatcaaagatttaaaccaatcacttgtaacatctctatttgtcaaactcattggtgatcattagcatttagagagacccaggaaaatcgcaagattctaaataattttcaaaccatagtagaggatactttgtttactgttatttatgtattaaatatcttttaatatactatagctttataagaacagataatccatttttggaatttgtgttttaattggccaaagagttaaatccattttttctagatcctctggataattaggaatcggtagtaaaaagcaattgcacttttccaataaaataatatgctcagttgttcaaacccacattcttgataaaaacaactagaaattctgcataagatagaagaaaaagaagattttgaarcaacaaagagcatacaagatggtaaggaattacaagaccaaaatctaagtga

SEQ ID NO: 15470 - DNA, 562 bp, Homo sapiens
tgagaagggctgggaagattttgacaatttgcttgctagcccctattgttaaggagtttagcaacagtgtgtttttttctgtagccataggaattcaggacgttgccatgccagatgagccctgaaccctggacctgtagctaacttttgtttccttaamcttacagtctgtcttagtctataaggggacatgtattttcatctctcagatcacaccacattcctcctggactgggtgcctggccagctctgaagccctcgagtttggactctgagagaaacagttgggcagtagtaagtggggaatcctcctgaaatctggaccttcccactctttggttgaaggcctggactttgcttgagtgtcctttccagctctccctttctagaatggaggttttctgtctttaccctgtgggtaagaggtttgagtctcgggggaaataactgccttttccacctctgcatcaggacagaaagtttgggtcacagtcaggcaaagagctctccagagagcttctgcctttcctgcctctgttcctcagcaggaagttctgggtca

SEQ ID NO: 15471 - DNA, 562 bp, Homo sapiens
tgagaagggctgggaagattttgacaatttgcttgctagcccctattgttaaggagtttagcaacagtgtgtttttttctgtagccataggaattcaggacgttgccatgccagatgagccctgaaccctggacctgtagctaacttttgtttccttaaacttacagtctgtcttagtctataaggggrcatgtattttcatctctcagatcacaccacattcctcctggactgggtgcctggccagctctgaagccctcgagtttggactctgagagaaacagttgggcagtagtaagtggggaatcctcctgaaatctggaccttcccactctttggttgaaggcctggactttgcttgagtgtcctttccagctctccctttctagaatggaggttttctgtctttaccctgtgggtaagaggtttgagtctcgggggaaataactgccttttccacctctgcatcaggacagaaagtttgggtcacagtcaggcaaagagctctccagagagcttctgcctttcctgcctctgttcctcagcaggaagttctgggtca

SEQ ID NO: 15472 - DNA, 575 bp, Homo sapiens
aatggggatattttgaaatgcttaaaataatttattagtgtgcacaattggaaaaatttggttttagaaccaaattaaatgggagacttacttccaataatacctagaaatttctaaaagaactgtgaaaattgcctccagtgaggaagtaagctgaaggaggtaaactgacacgttttctgaattgagaaatattgaggaggctttgtctctttcgcctccaactgctccttctcctcctgcccctgcacctgcatagtctcccttacctgagccctccggtyctgccttgcctcttcttccatcaccatcacctgaggaaagtccccagggctctggcccctcccctgaaacttctgttctgacagcccctttcaaggtaggggcttccacaggaagaagggagcctaccattctgtatactgcttcaccaaaatgtgaattaagaatattataaaagacttccctgggctgggcgcagtggctgatgcctgtaatcccagcacattgggaggactagacaggtggatcacgaggtcgggagttcgagaccagcctggacaacatggtgaaac

SEQ ID NO: 15473 - DNA, 549 bp, Homo sapiens
ttctcgaactcctgaccgcaagtgatccacccgcctcatcctcccaaagtgctggggttacaggtgttagccactgcgcctggcccagtttgggacaattttcaatagagctgccataaacatttgtgttcaggtttttgtgtgaacttaagtttccatttttccagtgtaaatactcaagaatgggattgccaggtcctatggtaagtgtttgactttataacaaactgcccaactgctttccagagtggctacaccattttgtgttcccctcagcaacatgtaagagttccagttggtctgcttgcttgtcagcacttgatgtcagtattttctgtcttagccattccaataggcatatagtggtgtctcattgtggttttaatttgtattttcttaatggctgttgaacatcttttcatgtgcttatttgctatttgtataacctttttggtgaaatgtctgttcaagttctcttttggtttttaaatgggttgttagagcctcaactcatttttgcttgggctttgtaccaacagtaatgtktct

SEQ ID NO: 15474 - DNA, 204 bp, Homo sapiens
gttgctgtacatcccttcaacactgagttaaaaaagcttttttggaatgcttcttccccccaaatgtattaaattataatagagtatttgtggcaattatgcccttgggtcaacaattggaaggctgcttagaaacatcaaattggtcttcactgactacagatcctcataagcaayagctgaccacgctttaaattaaagagg

SEQ ID NO: 15475 - DNA, 1089 bp, Homo sapiens
gtaagtgagaagtagttggattctggatatattttaaaggtagaatcaacacaatgtcttgatagattaaatgtgggtggaagagaaacaagagttgtcaaggatgagtaccatttttgctaacaactggaaggacagaatcccactaactcaaatggggtatgatagagggttgtaggacctatggagctggaagacaataattggaaatcctatttgacatagcaggtttgcttacacaatcttaaaagtcactttctccgagaatggtgtaataacacatttctaaatgaaaaaaaaaagtcaggtataaaataaaacatgcagcataaatcaaatgctatataaaataccaaccatacatttgtaaagtgatttttaagtataaacagttaagagtagttattcctggatggtaaaacaaaatatgggtgatttcatttcttctgatacttataatgagcatatgctacttttacaatatgaatgaatgtaacaaacacctcggatttatgtaacatcagagcatattctaatatgtcaacattcactcatttgttgatcaaggttattttaatgtgcatcgtttgtggggaatgagaaataagtcggagaggagtgttttgaggtactcataatattttattttttgataaacattaattttgataattttagatttacaaaaaggttgcaaagacagtagagttcctgtgtaaccttcaccacacttcccctaatgttaacatttttacataaccatttgtacttttctcaaaagcaaacaattaacattagtacattacaatgaactaaactacagacataattcagatttcaccgtgttttccactaatgtcaccttttttttttggtccaggatgaaagccaggacaccatatttcatttagtcaccattttccttagcttcattccaaattgtgacggttcctcatcttacctaattttttgtgaccttggcagtttttaagacaactgttcaggtattgtgaggtccctccrtttggttttacctcctgtttttctcatgatgagactgcagctatagattttggggaagaatgccac

SEQ ID NO: 15476 - DNA, 550 bp, Homo sapiens
atagattctggcaaggttgtggagaaaaagaaacaccttacatgctgttggcaggtgtgtaaattatttaaaatattgtggatagcagtgtggcaattcctgtaagacctgaaaacagaactaccatgcaacagagcaatctcattaccaggtatatacacaaaggaatttaaaacattctatcataaagacatatgcatgcagatgttcattgtggcatgaatcacamtagcaaaaatgtgagatcaacttaaatgcccatcaatagtagactggataaagaaaatgtggtacatatacaccatggagtactaactaatgagtgctaggtttaataccttgttgaactaatctgtacagaagctttctctggtttgcagacttaattaaacattttagacatttaaaatttaaagctattctaaattttaaaagcttatggaaaatatttagcattatttagcctattcaaccgacccctaaaaagaataaaaataacaatatttttaatatcaaactgcggatatattcttttttttttttttttttt

SEQ ID NO: 15477 - DNA, 585 bp, Homo sapiens
gcttgaacctgggaggtggaggttgcagtgagccatgatagcaccactgccctctagcctgggtgacagagcaagactccctctcaaaaaaaaaaaaaaaaaaaaaatggtaaacataacaataactgaatcaactgataaacttctagaactaaaataaaagttattggatatcaaatacatgtaaaaacacctattctaatagttaaggtttaccaataatgaccagttagtacatttactatgttgaaacaaaacaggtaatgtttactaccattaaaatgaaaatgtaagatacatagaaagaatttttawatgagaaatgcgtgcttgatatagacaaccttaaaacagtttactgtaagacataaaatatctgaagagagaagagtgactagtgtaaatatagcaattctttacaaataggctaatttaattacaatcaaaattccagtaattttgattgtaattaaaatttgtggaagagattaaaatagtgcataaaagtgtcagctggaagaatatgtaagagcatctagttaattagaagagaagagaaataaaggaccttgctttacagatatg

SEQ ID NO: 15478 - DNA, 585 bp, Homo sapiens
gcttgaacctgggaggtggaggttgcagtgagccatgatagcaccactgccctctagcctgggtgacagagcaagactccctctcaaaaaaaaaaaaaaaaaaaaaatggtaaacataacaataactgaatcaactgataaacttctagaactaaaataaaagttattggatatcaaatacatgtaaaaacacctattctaatagttaaggtttaccaataatgaccagttagtacatttactatgttgaaacaaaacaggtaatgtttactaccattaaaatgaaaatgtaagatacatagaaagaatttttaaatgagaaatgcgtgcttgatatagacaaccttaaaacagtttactgtaagacataaaatatctgaagagagaagagtgactagtgtaaatatagcaattctttacaaataggctaatttaattacaatcaaaattccagtaattttgattgtaattaaaatttgtggaagagattaaaatagtgcataaaagtgtcagctggaagaatatgtaagagcrtctagttaattagaagagaagagaaataaaggaccttgctttacagatatg

SEQ ID NO: 15479 - DNA, 543 bp, Homo sapiens
gaaataaccttctcacacagatcctctggcaaaaagcargaaacataaagtcatttaaaaatctgatagatcattagcagactactgaattatactgacccagatgtgacacctagaacacaaacttaaaaataacttaaaacaaaaaccctctgtattagtcaatgttcatgctgctgataaagacatacccaaaactgggaacaaaaagaggtttaatcagacttacagttccacatgactggggaggcctcagaattatggtgggaggtggaaggcacttctctggcagcggcaagagaaaaatgagagagaagcaaaagaggaaacacctgataaacccatcagatcttgtgaggcttattcactatcacaagaatagcatgaaaaagaccagcctccatgattcaattacctccccatggatccctcccacaacttctgggaattctgggagatatgattcaagttgagatttggatggggacacagccaaactatatcattccacccctgacctctacaaaatctcatgtcctcaca

SEQ ID NO: 15480 - DNA, 585 bp, Homo sapiens
tattgattaagaggaagtatgcagggcacaagatgccaaaagtgtcatacaacttgctggagttatgttttattattaagaatgaaattctatagttacagaaatatttttaatagacatacrttaatattttcattaaaatataaagtataaacatggctgtagtagttcacaaacactattgacaaatccttcctaagttaacccagcaggatatcatgtcttcctctggaaaatgcacagaatcacattctgagtaaagagggatgtaacacagtgaaagaatatgtgttgaagtcagataggtctaggttcaaatcttcataccattatttaacagcttggatagttactcaacttctagtcctatttctttgtccataaatggagagagaaatactatatttcacgttgttgtgagaacagggacacagtgtacattgtaaagccagtgttacatacaagttggccatctttataatgttatcatcatgatcatcataaatatagcccctcccttttccccatgtaggtaagaattctattggtaattgttgactctgccttattcatcttgttattctt

SEQ ID NO: 15481 - DNA, 585 bp, Homo sapiens
tattgattaagaggaagtatgcagggcacaagatgccaaaagtgtcatacaacttgctggagttatgttttattattaagaatgaaattctatagttacagaaatatttttaatagacatacattaatattttcattaaaatataaagtataaacatggctgtagtagttcacaaacactattgacaaatccttcctaagttaacccagcaggatatcatgtcttcctctggaaaatgcacagaatcacattctgagtaaagagggatgtaacacagtgaaagaatatgtgttgaagtcagataggtctaggttcaaatcttcataccattatttaacagcttggatagttactcaacttctagtcctatttctttgtccataaatggagagagaaatactatatttcacgttgttgtgagaacagggacacagtgtacattgtaaagccagtgttacatacaagttggccatctttataatgttatcatcatgatcatcataaatatagcccctcccttttccccatgtaggtaagaattctattggtaattgttgactytgccttattcatcttgttattctt

SEQ ID NO: 15482 - DNA, 634 bp, Homo sapiens
ttttgcatgcttgtgtgagtgtcccaataagccttgcscattctttgggagttagaatattgggacagattgggaaggtaccagggatgtattgcaaagtacaactaagtccatctaagggatctaatatgcgccaggagtgagaagagaagctgtccaaaaaaggccagttatcttgggttccatgagattctttgcgtgtctcaaaatctctggctgtgaaagctatccctccttcatagcatttatcttaaataatagcttgctttttttctaaattctctcagaatttttgatgagccatttggaacctgactgatgtatatctctgtgctatatataaagaaaggatttgtccaaaagaaaaaaaaaaaatcacacaaacaggactataaaaacgacactcaagaaaaaaaaaactgcttgaaagagcagttttcaaacaccttaagtactttaaaacatgattttatcaattttccttcatgaaatacattaaagttatgaccaatcatctaaaatgatgtgtctatatgttttctctaattgtgcacaaagataattggaagacatttcctttttaatgtgtaaattataacaagatttagggaagttggctaataatatggcaggc

SEQ ID NO: 15483 - DNA, 634 bp, Homo sapiens
ttttgcatgcttgtgtgagtgtcccaataagccttgcgcattctttgggagttagaatattgggacagattgggaaggtaccagggatgtattgcaaagtacaactaagtccatctaagggatctaatatgcrccaggagtgagaagagaagctgtccaaaaaaggccagttatcttgggttccatgagattctttgcgtgtctcaaaatctctggctgtgaaagctatccctccttcatagcatttatcttaaataatagcttgctttttttctaaattctctcagaatttttgatgagccatttggaacctgactgatgtatatctctgtgctatatataaagaaaggatttgtccaaaagaaaaaaaaaaaatcacacaaacaggactataaaaacgacactcaagaaaaaaaaaactgcttgaaagagcagttttcaaacaccttaagtactttaaaacatgattttatcaattttccttcatgaaatacattaaagttatgaccaatcatctaaaatgatgtgtctatatgttttctctaattgtgcacaaagataattggaagacatttcctttttaatgtgtaaattataacaagatttagggaagttggctaataatatggcaggc

SEQ ID NO: 15484 - DNA, 634 bp, Homo sapiens
ttttgcatgcttgtgtgagtgtcccaataagccttgcgcattctttgggagttagaatattgggacagattgggaaggtaccagggatgtattgcaaagtacaactaagtccatctaagggatctaatatgcgccaggagtgagaagagaagctgtccaaaaaaggccagttatcttgggttccatgagattctttgcgtgtctcaaaatctctggctgtgaaagctatccctccttcatagcatttatcttaaataatagcttgctttttttctaaattctctcagaatttttgatgagccatttggaacctgactgatgtatatctctgtgctatatataaagaaaggatttgtccaaaagaaaaaaaaaaaatcacacaaacaggactataaaaacgacactcaagaaaaaaaaaactgcttgaaagagcagttttcaaacaccttaartactttaaaacatgattttatcaattttccttcatgaaatacattaaagttatgaccaatcatctaaaatgatgtgtctatatgttttctctaattgtgcacaaagataattggaagacatttcctttttaatgtgtaaattataacaagatttagggaagttggctaataatatggcaggc

SEQ ID NO: 15485 - DNA, 565 bp, Homo sapiens
gagcaggcaattggaagagaaatttcccctgcctcccctgtcagctagagaggtagacataagacatagcttgcagtttctggtgtaatttatatgccttcaccacgccttgtactcaagcgactgagaagccaaaagaaggaaaaaataaataaagacagacagagaaaggaaaggaaagaaggaaggaaggaaggaaggaaagaaggaaggaaggaagcaaggaagaaagaaagaaagaaagaaagaaagaaagaaagaaagaaagaaagaragagaaaaagaaagaaagaaaagaaaagaaaactcacttttaaattttaagctaatatttggtctgtcttgaaatcattatctcatagcatttgtgttccattatttatcacacctatttcatttctcttaatggaaatagcggcataagctgtgccttgtctcatgttcaaactcaggaccttcagaatacgagattgacaggtggcctgctgctctaagagagcaactgttcctaagaggtgacatccagattattaaatctcatttcccacgcactgctgctttatca

SEQ ID NO: 15486 - DNA, 565 bp, Homo sapiens
gagcaggcaattggaagagaaatttcccctgcctcccctgtcagctagagaggtagacataagacatagcttgcagtttctggtgtaatttatatgccttcaccacgccttgtactcaagcgactgagaagccaaaagaaggaaaaaataaataaagacagacagagaaaggaaaggaaagaaggaaggaaggaaggaaggaaagaaggaaggaaggaagcaaggaagaaagaaagaaagaaagaaagaaagaaagaaagaaagaaagaaagaaaragaaaaagaaagaaagaaaagaaaagaaaactcacttttaaattttaagctaatatttggtctgtcttgaaatcattatctcatagcatttgtgttccattatttatcacacctatttcatttctcttaatggaaatagcggcataagctgtgccttgtctcatgttcaaactcaggaccttcagaatacgagattgacaggtggcctgctgctctaagagagcaactgttcctaagaggtgacatccagattattaaatctcatttcccacgcactgctgctttatca

SEQ ID NO: 15487 - DNA, 565 bp, Homo sapiens
gagcaggcaattggaagagaaatttcccctgcctcccctgtcagctagagaggtagacataagacatagcttgcagtttctggtgtaatttatatgccttcaccacgccttgtactcaagcgactgagaagccaaaagaaggaaaaaataaataaagacagacagagaaaggaaaggaaagaaggaaggaaggaaggaaggaaagaaggaaggaaggaagcaaggaagaaagaaagaaagaaagaaagaaagaaagaaagaaagaaagaaagaaagagaaaragaaagaaagaaaagaaaagaaaactcacttttaaattttaagctaatatttggtctgtcttgaaatcattatctcatagcatttgtgttccattatttatcacacctatttcatttctcttaatggaaatagcggcataagctgtgccttgtctcatgttcaaactcaggaccttcagaatacgagattgacaggtggcctgctgctctaagagagcaactgttcctaagaggtgacatccagattattaaatctcatttcccacgcactgctgctttatca

SEQ ID NO: 15488 - DNA, 565 bp, Homo sapiens
gagcaggcaattggaagagaaatttcccctgcctcccctgtcagctagagaggtagacataagacatagcttgcagtttctggtgtaatttatatgccttcaccacgccttgtactcaagcgactgagaagccaaaagaaggaaaaaataaataaagacagacagagaaaggaaaggaaagaaggaaggaaggaaggaaggaaagaaggaaggaaggaagcaaggaagaaagaaagaaagaaagaaagaaagaaagaaagaaagaaagaaagaaagagaaaaaraaagaaagaaaagaaaagaaaactcacttttaaattttaagctaatatttggtctgtcttgaaatcattatctcatagcatttgtgttccattatttatcacacctatttcatttctcttaatggaaatagcggcataagctgtgccttgtctcatgttcaaactcaggaccttcagaatacgagattgacaggtggcctgctgctctaagagagcaactgttcctaagaggtgacatccagattattaaatctcatttcccacgcactgctgctttatca

SEQ ID NO: 15489 - DNA, 1125 bp, Homo sapiens
ttagcagctttggcaccttaggaacacttaacttatctgagcctctattacttctaaaaagtgcataaagtgcagactaagacagtttttttggcaaaattcagtcagactacatcaagtaaactccctaagtctcctagtataattcatggcacaaaaaattggggaaaaaacagggaggatatgattataagttcagtttatgttttttgttgagtgaatgtctccagtcatagagatgcaagtgtagatacacagtaagagtagtatgaatgggagacaccttggaaggctatttcttccttccttcattcagttggtcacwcagtgaactatcatgaattgagcaccgcctctgtttcttatcaacaaaggagactgcggaaaagaagagtgactaagatctctgaagaagggaaaagctagatgactgggccacaagaggaaaaaaagcagcaagacagttacaatggtttctggtcccacttttataaacacacacacacacacacacacacacacacacacacacacacacaaaatcatttaatcatttttaagtatttaatcattttttaaaaatctgtgatgctttacctgggcatgtctaggcaggtcctcctttgctaggacgtgcccttttctgtcccggaatactctaaacttggcattttggcagcgtgaagttttcccgttgtgactttctccttgttcccttttctcctccttctttgcagacaatgagtagccactgctgtttgccctggcccatcaatgagaagatctgctcttagagccctgctttcctgctgaaggccctgaaatcacctgtgttccaggccacctgctaacaataaataatgctgccctgatgtggggaattagctcaagtggtagagcgcttgcttagcacgcaagaggtagtgggatcgatgcccacattctccaagctttattatttagacatcgtgtctccaaacactcaggtctccaaacccaagttagtgtctgagaacaggatgctgctttggttcaagacgtaggagcagcaataatagagggctggtgatggctccctcttggcattcagtatagtgtagatctaccatgtaattaattctctgt

SEQ ID NO: 15490 - DNA, 511 bp, Homo sapiens
gtgagtgatccccctgaggaggactcccgagcatgctgctcatgtttatgtttggtgatcacagttactttctcagcaaccaaataagcagaataaaaaccagcaccgaacttgccaatcatagagattctgcaccagcctggaaaacttccatgaatgctttggtcccagactggcgacagtaccaaggttattgatcaagtcagccttggtcattccagtttcagtatccataatagtaagggtttgatcttgtktgcttggcataagattaacgtggagctctttcccagcgtctaatttactgggatccgtcaaggtttcatatcaggttttgtccaaagcatctgatgaatttgaaatgagctctcttgagccaggcactgtggctcactcctgtaatcccagcactttggcaggccaaggtgggtggatcgcttgaggtcaggagttcaagagcagcctgggtaatatggtgaaacccacctgggcaatatggtgaaaccccatc

SEQ ID NO: 15491 - DNA, 553 bp, Homo sapiens
aaacaggattcttataaattttcaaaataaatttcttactaatttagcaagtaaaaaactttttccattatttcagtgtatacattatatcataaatgagactatgaaatattttaatacattctctgcttgcatttcactcttttcatttattcttttataacatttatccatgtgtcttatgcattaaaattgaggtcttattctctttttagtaactytatatagttataaaataaaagtaacaaactataacatatttactacaaactatttttcctctatatttaatatgtcaaaattattgttatgaaaaaatacgttacaaattagtggcttaggagtgttgcaaagacttaagttacatgttttgaacctggtttacaaaagattcatatgcatccaaaattctcttttggtctacctctgtatttttgtttatggaagagagagcttcatgttagcatggcacacaaagaaatggtagtacccatttgttacactgaatctaattttcttttccaatcggtctcctgtattcaccttctctctt

SEQ ID NO: 15492 - DNA, 584 bp, Homo sapiens
tgtcatctgcgtgtcctttatgtttttctgcatcagtgatgcttgtgtcacactgatcattctcaaaggcctggcccgaatctctctaacttggccacagtcaagtagtttttatgtacttcctggcaaggccagagttgatgcctacgcttgtgcttgttttgcctggggccagacatcagaagattagaaacagcacttggcagatgtgggaaatccaggctcggggaagaagcattgacagagtcagcccctaaaggtggtgagagtgtggcagggtactagcacawtccatgagtctacacagttggatttcaaagggtagcatgttgaaggtaaatatagactgtatatggagagagagatagaagacactgctttcctaaatcggattccaaatgtagtcaccagaaacattcatgaatttctcagtcacttagattgagtgactggctggtcttggagccagcctacaggagaacaatttccattcttcttagagatgacaaagcaaacttaatgtctgttccagatctcctagacatgggtgaatgataaagtcagactcctaattttccaaggta

SEQ ID NO: 15493 - DNA, 449 bp, Homo sapiens
ttcagcctcccaaagtgctgggattaaaggtgtgagccactgcrcccagttagaagtaagtttctattgctagtatattatccaattcgtggtattttgttacagcagcacaaacagacgaagacagttggaatgctgtgggacctgagcttcctcatttacacaagctgccaggtgatgcttgtcactgttagtaactggctgctgttcagtgacaggagcacccaatggcgtggctgtaaccctggctgcacattagaatcacataggaagctccaatcacattccatgtcaggtcccacccctgcaaatcttgatttgattggtttagggtggggttgaagcattggaagcttagaaactctcccctagtgattctgttgtgcaaccaggatagaaaaccactggcttggtccatactcctcgtcatctacggctttaggtaaggg

SEQ ID NO: 15494 - DNA, 1434 bp, Homo sapiens
ctgaatgaaatacatttttatttaactggggctccctrtgcatgtccaatgcagactggtgagctctgatatagaacctttttatctgagttgatgcaacacttgtgatctagaaccaaagcagcccatatagacttcctcatcttaccactgcaatgagaggaaagggcagaacccacccatcagtgagcagagagagagagagagagagagagagagagagagagagagagagaatatgtgtgcaaaggtagggtgaggggggttctatgtgggagtagaacaggaatctaaagagacagaaatggctggggtggtcattgcttttcctgctcagccacgtagaagaagggggcaaggagagaccacccccatgtgtgcatagctttttgaattcagtgagtgttctatctgttttggagctgatggcccgtcagagcatttgagttagacccaaacctccatccctgctccatggggtggaatagaaggaggtaatgagctctgcttattcaaaaagctttaaggtcaacaagccagtacggaatatgggtgaggctacatcagcagttccagcgacctggccatcttgtcactccctcagaagggactgcctactctaagactgtcctcgcagggtgtgatggcatatgcctattatcctagctactcaggaggctgaggcgggatgacttgagcccaagaattcaaatccaggctaggagatacaatgagaccctatctctgaacttaaatagagaagtacataaatataaattaaattaaacattaaattttgtttaaaatttaaaaataaaaatacaggcatcagccaccaccagatgcagtggctgacacctgtaatcccaacactttggaatgccaaacagggagtatcactttagctcaggagttcaagaccagcctaggcaacattaccttgtctctacaaaataaataaataaaaaaaaaatcaataaaaatgcttatggtagaaaaaataccacgatttaaaaaaaaaaaaaagactgttgagtggtgactcagccccacctactctttctgtcttccctttctgccacctcggcttgtttccctccactctatgtgtcccccagagggtaagccctaacttggatagttcccatttgtctactgcagggcttctctgtcagtcagagtttttgcaccaggcctcctcattggctgccaggctcccttatgtctacacgtggcagtttggggctagcagatctgaccagactgtggtcagggtgatggtgatgggggtggtcccatgacccaatttatggcaactcaaatgggacaatgtctggcttcttgcctgagagcagaaaagccaaagtaggttccagaacccttgtcttggttcctttttacccagcgccaggttgaaagaatatgtatagtatg

SEQ ID NO: 15495 - DNA, 1434 bp, Homo sapiens
ctgaatgaaatacatttttatttaactggggctccctatgcatgtccaatgcagactggtgagctctgatatagaacctttttatctgagttgatgcaacacttgtgatctagaaccaaagcagcccatatagacttcctcatcttaccactgcaatgagaggaaagggcagaacccacccatcagtgagcagagagagagagagagagagagagagagagagagagagagagagaatatgtgtgcaaaggtagggtgaggggggttctatgtgggagtagaacaggaatctaaagagacagaaatggctggggtggtcattgcttttcctgctcagccacgtagaagaagggggcaaggagagaccacccccatgtgtgcatagctttttgaattcagtgagtgttctatctgttttggagctgatggcccgtcagagcatttgagttagacccaaacctccatccctgctccatggggtggaatagaaggaggtaatgagctctgcttattcaaaaagctttaaggtcaacaagccagtacggaatatgggtgaggctacatcagcagttccagcgacctggccatcttgtcactccctcagaagggactgcctactctaagactgtcctcgcagggtgtgatggcatatgcctattatcctagctactcaggaggctgaggcgggatgacttgagcccaagaattcaaatccaggctaggagatacaatgagaccctatctctraacttaaatagagaagtacataaatataaattaaattaaacattaaattttgtttaaaatttaaaaataaaaatacaggcatcagccaccaccagatgcagtggctgacacctgtaatcccaacactttggaatgccaaacagggagtatcactttagctcaggagttcaagaccagcctaggcaacattaccttgtctctacaaaataaataaataaaaaaaaaatcaataaaaatgcttatggtagaaaaaataccacgatttaaaaaaaaaaaaaagactgttgagtggtgactcagccccacctactctttctgtcttccctttctgccacctcggcttgtttccctccactctatgtgtcccccagagggtaagccctaacttggatagttcccatttgtctactgcagggcttctctgtcagtcagagtttttgcaccaggcctcctcattggctgccaggctcccttatgtctacacgtggcagtttggggctagcagatctgaccagactgtggtcagggtgatggtgatgggggtggtcccatgacccaatttatggcaactcaaatgggacaatgtctggcttcttgcctgagagcagaaaagccaaagtaggttccagaacccttgtcttggttcctttttacccagcgccaggttgaaagaatatgtatagtatg

SEQ ID NO: 15496 - DNA, 637 bp, Homo sapiens
ggcaggctttgggacataggagctatccctggttggctgggtttctagtcctgtgttgatttagggcaggaaatattggcttagtgtgtgagagataaaggaagtggttagggagatggactcactaatgcttggtttacatatgaaaggaatactggacggcaagttatttatcatattaggaattaactagctctgggaaggacagtctctccccagccctcaagcctttctattccatcaaaatatcaaaacatcataaaatacagaatataaaaaacatgattaataaatgcactactctaccacctattgtgggaaggtacgtatctcactatattgtaacacatgtcccaaacttgctatgttgtttcttgagagcagrcatctgtctatcttgttcaccactgtaacccctgtgcccggcatggggtctctggcacttggtatatgctcagtaaatattgactgaatgaaagaatgaatggacagctttctatcttgtatacatagttcgtgtttcacctggaaagcacaacatttttttctaaatttagattttgctctatcaattaattaaaacatattttcatttactttaaatgtgagggtttttttctttcctttcaaagtttaa

SEQ ID NO: 15497 - DNA, 505 bp, Homo sapiens
tcaactcttgttgaatttaatttcttaattcatttctctttttatttgcatttctggttttaggtgtctatttaaaatatctaaatcctcattagaatatatttagttcagattagcatgttctgtttcagtatgcttcatgttaggttcctttgggagaaattttgtttgccaaactgctatgatttatattttcttttttcttcatacggtagctttctgtggtattggtgcattttgttgaaaagtttattggttcaagattgtcttttgtcagtataataacatgaagctatttaatggatgatgtttcgtgacagtggtctgggataaggaaagattttagtgtattttttattttgcaggacgtttacttttattctgtkcttcccttctttcccttcactacacatcaccaaggggctccaagcttttataattaaataaagacaggatctaatcctgcactggtacaactcacctcagccacctcaccttcatcctg

SEQ ID NO: 15498 - DNA, 1384 bp, Homo sapiens
tcatgtttacctgccttccagccaaacagaattactctgtgttcacaaacacgtcccatgcttttttacccaaagctgtgctttccacttggaatcccatgtggtctgttcattgaaagccttctttcctctttcaaagttcagcttaatggctttataacttaaagatttgtgccttatttcccctaatatcttgcaccaatggcaaggactgggttctatttatatttatagtaagtccactcaccwatctgcttacaacttgcaaaggaaccttctcattacagatgcttaataggtattttcttatttttgtcagtaataagtaaatgcttattgctgacaaataattgttgtcagaaatgtttttctagtcatttgcatgtatacattacaatatctctttccaacacgattataaattttttttttttttgaggttgagtctcgctctgttcaccaggatggagtgcagtggtgcgatcttggctgactgcaacctccacttcctgggcttaagcaattctcctgcctcagcctggcaagtaactgggattacaggtgtctgcccccaggccaggctaatttttgtatttttagtagagatgggatttagccatgttgcccaagctggtctcaaactcatgagctcaagcgatctgctgcccgcctcggcctcccagagtgttgggtttacaggcatgagccaccatgcctggactggattataaaatctttaaaagcagaggaaatgttttcttcttttcactttgttttctccatagttcttagcatagaactgtaaatagaggaggaatataaatattagccaaatgaacaagtgataagatatgctttttcacaggaaaatatatattaaatcaaaatccatggctatattcctcagtttaagatattgccatgtttggatcttaggaaaagaaaaacctatagctggtatatagctggtatattaacatccatacatttctttttttttttttttgaaatggagtcttgctgtgctgcccaggctggagtgcagtggtacaatctcggctcactgtaatctctgcctcccaggttcaggaggttctcctgcctcagcctcccgagtagctgggattacaggcacatgccaccacactcggctaatttttgtatttttagtagagacagggtttcaccatattgaccagactggtctcgaactcctgacctcaagtgatccacctgccttggcctcccaaagtgttgggattacaggcatgagccactgtgcccaggatccataaaattctttagctgtgttttggcctttgtagtttcctaagcaaccattgctgttctacaagctatcactttttaactctaccttgttaaa

SEQ ID NO: 15499 - DNA, 1384 bp, Homo sapiens
tcatgtttacctgccttccagccaaacagaattactctgtgttcacaaacacgtcccatgcttttttacccaaagctgtgctttccacttggaatcccatgtggtctgttcattgaaagccttctttcctctttcaaagttcagcttaatggctttataacttaaagatttgtgccttatttcccctaatatcttgcaccaatggcaaggactgggttctatttatatttatagtaagtccactcacctatctgcttacaacttgcaaaggaaccttctcattacagatgcttaataggtattttcttatttttgtcagtaataagtaaatgcttattgctgacaaataattgttgtcagaaatgtttttctagtcatttgcatgtatacattacaatatctctttccaacacgattataaattttttttttttttgaggttgagtctcgctctgttcaccaggatggagtgcagtggtgcgatcttggctgactgcaacctccacttcctgggcttaagcaattctcctgcctcagcctggcaagtaactgggattacaggtgtctgcccccaggccaggctaatttttgtatttttagtagagatgggatttagccatgttgcccaagctggtctcaaactcatgagctcaagcgatctgctgcccgcctcggcctcccagagtgttgggtttacaggcatgagccaccatgcctggactggattataaaatctttaaaagcagaggaaatgttttcttcttttcactttgttttctccatagttcttagcatagaactgtaaatagaggaggaatataaatattagccaaatgaacaagtgataagatatgctttttcacaggaaaatatatattaaatcaaaatccatggctatattcctcagtttaagatattgccatgtttggatcttaggaaaagaaaaacctatagctggtatatagctggtatattaacatccatacatttctttttttttttttttgaaatggagtcttgctgtgctgcccaggctggagtgcagtggtacaatctcggctcactgtaatctctgcctcccaggttcaggaggttctcctgcctcagcctcccgagtagctgggattacaggcacatgccaccacactcggctaatttttgtatttttagtagagacagggtttcaccatattgaccagactggtctcgaactcctgacctcaagtgatccacctgcctyggcctcccaaagtgttgggattacaggcatgagccactgtgcccaggatccataaaattctttagctgtgttttggcctttgtagtttcctaagcaaccattgctgttctacaagctatcactttttaactctaccttgttaaa

SEQ ID NO: 15500 - DNA, 625 bp, Homo sapiens
tgaaactccgtctcaaaaaataaaataaaataaaatggaatgaaaaggacttgcctaatgttccctccctttcctcacacctccaagtgctgctcactctggcttctgtgctccctggaaatgaagattcaaaatgccacaccacttaccctttccggaggtgacatcaaacaccactcccttcactgccaagtagatgggctgatcttcctagaaagcaggggagaagctgtgaagaggargggaagagccagctcttccagtgcaacttagtaaaatcttctcccatcacaagctgagcaaagagcagtgggtcaagtcccaaaggctttctgttaagcctggtccttggcgagcttgccacctgcctgggcagcgtcatgcccgcacacagaaatttggaaaagtcataaagtctcatgacaagaatgtggcaattctctcctttatagagaaaatcaggggccaggcacagtgactcacgcctgtaatcccagcactgtgggaggccaaggcgggcggatcacctgaggtcaggggttcaagaccagcctggccaatatggtgaaaccctatctctactaaaaatacaaaaattagccgggcatggtggcacatgcctgta

SEQ ID NO: 15501 - DNA, 556 bp, Homo sapiens
agcaatgttgcaaccatgaatcaaaagccatgacaaatactaaaatgttcactggccctaccacactgaggcaggagacccaaaggcaacaactgcattcctstagatatctttttaggcaaaaaccaatccctcatttgaggcaaaaagccttcctaatacattccacaaaaatgagggatgttgtgctgaatctgtgccttttaaaatgtcttatgttatgacaaatgttttacagtaaaattctgtcataagcaatggggaaagttgatgtttaagcaaacatacatattcagatttatattttagaaggagccctcagttggctgcatggaagattataggggaccatcttttctctcctttggagaacttttttccttcactccatgtggtcctggtggggctatcaaacacagcctgactgcatggcccaaggaatgagttcagggaattaaatgtgagtcaaatagggtcaatcagaacccatgttttagtcagagctagaagaggaaggctgaccattgattctgggattgtggagctggagttctgt

SEQ ID NO: 15502 - DNA, 567 bp, Homo sapiens
ttttgtgttgttagtggccagatccttcacaaacacctggaaactagtgtggcttctggttctagccattcggtaacagctctgaggctgaataaattggacgtgagaatgtgacagtgaaagacggcttgggaacacccagggtctgaataaagcttagaaaatacaccacacctttatagaaaaagtagatttctgttttataagggaaagattggcaggagwtccaggccagctgcccccaagaaagaggtaactatttaagccaataaggtttccatctacacaagtgctcaagtggaaaccagccaaccagagttagcagttctgtggcagagaatctctgaaatcaccgctgtgttctgaaatcacagaacagaggcctcccaagcttgccgagccactcagcctcacagagcctcatttccacttctctaagatgtagggactagatcatgcaaaatggtctaaccaaagagtagatttctttgaggtttctttctgttccaaaattctgagattcttaattatgtcgaggaagccacttcgaagctgctttagataaaa

SEQ ID NO: 15503 - DNA, 1747 bp, Homo sapiens
cactcgtctttaagtaaaaataaaaataaaaaattaaacaaaatcaggattgagaaaactcaagtcgttaggtatagcattagtgcatacatgcaattgaaataatggtttttaataaataaggtattcgattactctattgtgaggtcttaaaaatggattaaaaattgaatagagtttcacccataataattcatactttccctgcatcacatccccatcttgccaatatatggttctttttctgaactagaggtatagtcagaactggattgaatatatccttgtgtaaaggctaattttttcaacaaccatccttttccatttgtagacatttaaaaaacgtcaaaacgtattttgtgaaatataaatatcatcaatgtaaagctagacatcaattcattggttaagatttcaaaatcactctaagaatatatatcctttttctcattctgacaggggaaccagaggaaaagggggaataattacagtgaaatttttaaagtctgaattaagaaattaaagattaaaagtcactatattttaaaatttatgttgtataagtttacggggagtttatttaatccttacaatgaaacatatctatactgcaaatacatacccgggaaaactgaaactcagatagctcgagtagtacacccaaagtcatggagctggtaagatgagaagaagctccctttttgtgcaggtccagcaggcaccatctatgtcataacctgggcagatggtgctgctgcctttagtgggacagactttgcattcagttctgatgaacttcaagcctttgttctcaagtctctgttctgtgaattaggagaaggtgacctttcacagcagatggagggttttcacagggcacatggcttgccaagaaggttgcaagctgcctttccactctcattcactccctaaactgagactcctgctgcaagggcacaaaccatacagctatatgggatgaccctgcttgcactttacttccatatggctagttttcaaggtcttctatttcacttgtttttttctttaaaataagcaaactacagttgattcccccgtgatcttccctcccctacaagaaaacgaggtgtccattcctaatttcattgtatggctttaagcaagtagcttaagctcagagctgcttccttaccatgaatacaggagacaattcctgacacgccctgtgccatgctttgaggggtaaagagctaaagaatatgaaagggcttggaacactacgtgcttgtaaactgttcctcctcccaaggacagcatggcaaggcagggtggagggtgtccttcagagcctgggagacacacccccttttcatccagttctctggacagtcctacaagtgaccaggacttgagctcctgtggaaccatatcctggtgtcgcccatccccagctgcagcytgagctgcacagtcttttacatccccgacctccaaggctgctgcttatccatcagatttgctttatgaataaaaatctgtttgccattcagaagttaaggtcttcggaggagaattatagtttggaatttaaaaaaagcaattgtgtgtatgatctatattaaaaccaccgagtaaacactataaatatagtttatatattaacagtaaacagttatcataaacactgcatttaagctcaccaattcagcaacttacctaaatgagaattttcatttttgttccctgtttccacttttttttaatg

SEQ ID NO: 15504 - DNA, 645 bp, Homo sapiens
atatcatcattacactttttaatcatatcattaaaatgtcctgtggcttaattgggcagttggactctaaacatgtagttgaacttcacatgtgcatttcaacattgcaggacagctcctgataattggtatgtcctgcatgagttttgttttctgaattaaaggttcatacttattttaagcatattttaagccatagcaaccacctttcaaaaaatgtcctaagagatgatgaatgagaatatgctagaaatcttaaaatacaccaaaaatctaagattgtttagcaagttcaatttctttttcttttggtcagaattagttcagatgcctcagataattcattctaattgaataaaagatttaatatgtaaggaggattcttttcatggacatacacccatataacttttacatggtatgcatttgaattatatgtggattttaagatagtttaaaatgtttagtrtaatgtattcattcatttaaaggtccactgatatttctttttaaacttttgctgactcatttgtaagctgtttgttttaatggcaggttctggaaggtcaaccagtaaatatgttggttacaactgtgtttgcaaaggatcctgatgaaggaaataatgcagaagttacatactca

SEQ ID NO: 15505 - DNA, 522 bp, Homo sapiens
accggaaatgaaaccgaagaaataaaagctggtttctaggagattcatttaaattgtttagttgagttaaacatcgtgggcaaccaagtggtttatccttaacttttaaagagattcagaacagttacgttttctctaatctggcttggaaatgcgaggggtggaggggtagtcaggaggggtggcattcacagtaaagagcggggagtcacttggttaacttttcttgtcacactgctgtggggccagcctgtgtcttaccagaaattctgagtgcctcttcctacgattaagtgaacatttaatgactgactcttaaagaacttttaccaaccaaaagactgatttgaaaatagaaactatacattattttaaacaattgagatgytaagtttaataatgttaatagatgaatgcaatgttaatcaaaagctgaacctgtgggctttccaacaaagaaatgttaaacaaataacaatacactggagttatttgttttaacttttaattttttgttttctt

SEQ ID NO: 15506 - DNA, 556 bp, Homo sapiens
ccgcggtgatataatgatacaaaaataaatacagtcagcatgctttcctatttacccagsatgcaagcaagtgactgtttctaagcatttgcaatttcatcaagatctcttagacccattccctataaagagatgctgagtggagctgctgacctgccaaaacctaattaacttgagtttagtaaaataaagaagtcctttaaaaaaaagagagagaattacaggaagggaattctaaggtgccttttaatttgaaatccccagtgggcaggttgccatagaaggatgtgatttttttttacaaaatggtgactttaggatgctttcttgttgctcttagaaattccttagacactatgaggagtatactccatggcttttgccatttgagaatggagaagcaatttcctcaagatgctattcatctttattcatatctggatgcacatgagttcagaatgtgtgggtgtgggatttgaagagtctgaagtgcttaggtaacagttggcgtgccagttgtgtaatgaagagtatgtattgacaatattaaattgtg

SEQ ID NO: 15507 - DNA, 556 bp, Homo sapiens
ccgcggtgatataatgatacaaaaataaatacagtcagcatgctttcctatttacccaggatgcaagcaagtgactgtttctaagcatttgcaatttcatcaagatctcttagacccattccctataaagagatgctgagtggagctgctgacctgccaaaacctaattaacttgagtttagtaaaataaagaagtcctttaaaaaaaagagagagaattacaggaagggaattctaaggtgccttttaatttgaaatccccagtgggcaggttgccatagaaggatgtgatttttttttacaaaatggtgactttaggatgctttcttgttgctcttagaaattccttagacactatgaggagtatactccatggcttttgccatttgagaatggagaagcaatttcctcaagatgctattcatctttattcatatctggatgcasatgagttcagaatgtgtgggtgtgggatttgaagagtctgaagtgcttaggtaacagttggcgtgccagttgtgtaatgaagagtatgtattgacaatattaaattgtg

SEQ ID NO: 15508 - DNA, 556 bp, Homo sapiens
ccgcggtgatataatgatacaaaaataaatacagtcagcatgctttcctatttacccaggatgcaagcaagtgactgtttctaagcatttgcaatttcatcaagatctcttagacccattccctataaagagatgctgagtggagctgctgacctgccaaaacctaattaacttgagtttagtaaaataaagaagtcctttaaaaaaaagagagagaattacaggaagggaattctaaggtgccttttaatttgaaatccccagtgggcaggttgccatagaaggatgtgatttttttttacaaaatggtgactttaggatgctttcttgttgctcttagaaattccttagacactatgaggagtatactccatggcttttgccatttgagaatggagaagcaatttcctcaagatgctattcatctttattcatatctggatgcacatgagttcagaatgtgtgggtgtgggatttgaagagtctgaagtgcttaggtaacagttggcgtgccagttgtgtaatgaagaktatgtattgacaatattaaattgtg

SEQ ID NO: 15509 - DNA, 597 bp, Homo sapiens
caaatccacctcagaggagaggaaccttggctcctctgggactcctgcagtggctcaggggatagggctccagaaactggcaggaaatgggagctatagaggcatcagacactgcagtcctgaggtccaggtggcttgaggctcagaggagactaaaacacattctgaggctcaggtcagttccagaagcagaggtagtaaaatttctgcagtggagccaaaactcataatgaatgtgcttctgtaagttaggtatccttatttcaaggtctgcctgtatctttgaagcttctcatgatcatgttcgatcaggcaatacaacaaaacaaataaagataacacagatcagacaacgccaacattcaacgtattataatagcctggagtttttgcaaagctgcaattacagagagcttttaaccaggcccaatgaagcaagctgggtacatatccaactctcagcagygtcaaagccaacatccaccaagctcagcccctcaaccagaaataatttgacttttatagggtttgatcatttccttaaaagcctttatgatcaaagccaacctggaatggaaagggatcaaaagatgggaa

SEQ ID NO: 15510 - DNA, 647 bp, Homo sapiens
aaaaaaaaaaaagaaaaaaagaaaagaaatagggcctttgggaggttgttagggttagataaagttgtcagagtggggcccccatgatgtggctggtggctttataagaagaagaagagaggcctgagctgacacagatagtcttkgccactctccatgtgatgccttctacatagcacgaaggccctaccagaggccagcaccatgcttttggacttcccagcctccagaattgtaagaaataaatttcttttatttataagcgacccagtctcaggtattcaatgatagcaacagaaaataaatgaatacaaccttatgaatttttgtaaaattctctaaaaatattaagcccacttactagaatatgccctgtcttctgaccacttcttgccttgttgttgcacagggttgactatataagaggccaattccattttggcttccaattgtcttaggatatatatgtgtctgtgtgtgtgtatatttatattttggcaataagagagttgttttctaatagaaagttcttgcttcatcattatctacaaggtttgcttataaaaatccttgcagattacatgaaaacctccactaatcactgagtatcatattttttttgtagctttcaataaatacttgttgat

SEQ ID NO: 15511 - DNA, 647 bp, Homo sapiens
aaaaaaaaaaaagaaaaaaagaaaagaaatagggcctttgggaggttgttagggttagataaagttgtcagagtggggcccccatgatgtggctggtggctttataagaagaagaagagaggcctgagctgacacagatagtctttgccactctccatgtgatgccttctacatagcacgaaggccctaccagaggccagcaccatgcttttggacttcccagcctccagaattgtaagaaataaatttcttttatttataagygacccagtctcaggtattcaatgatagcaacagaaaataaatgaatacaaccttatgaatttttgtaaaattctctaaaaatattaagcccacttactagaatatgccctgtcttctgaccacttcttgccttgttgttgcacagggttgactatataagaggccaattccattttggcttccaattgtcttaggatatatatgtgtctgtgtgtgtgtatatttatattttggcaataagagagttgttttctaatagaaagttcttgcttcatcattatctacaaggtttgcttataaaaatccttgcagattacatgaaaacctccactaatcactgagtatcatattttttttgtagctttcaataaatacttgttgat

SEQ ID NO: 15512 - DNA, 647 bp, Homo sapiens
aaaaaaaaaaaagaaaaaaagaaaagaaatagggcctttgggaggttgttagggttagataaagttgtcagagtggggcccccatgatgtggctggtggctttataagaagaagaagagaggcctgagctgacacagatagtctttgccactctccatgtgatgccttctacatagcacgaaggccctaccagaggccagcaccatgcttttggacttcccagcctccagaattgtaagaaataaatttcttttatttataagcgacccagtctcaggtattcaatgatagcaacagaaaataaatgaatacaaccttatgaatttttgtaaaattctctaaaaatattaagcccacttactagaatatgccctgtcttctgaccacttcttgccttgttgttgcacagggttgactatataagaggccaattccattttggcttccaattgtcttaggatatatatgtgtctgtgtgtgtgtrtatttatattttggcaataagagagttgttttctaatagaaagttcttgcttcatcattatctacaaggtttgcttataaaaatccttgcagattacatgaaaacctccactaatcactgagtatcatattttttttgtagctttcaataaatacttgttgat

SEQ ID NO: 15513 - DNA, 698 bp, Homo sapiens
ctcctccaggacataggattcttgtccgtcatattgtagtagcatttactgcttattttgttcatctgttactgaaattggtttattgtgtacctactatgttcaaggctctgtgcagatcataattatatatagccttggagttatatattacctggagagggactcagctgtgagctgccagcagccaacattcagcagctgaacggggaagttacggtaggtcaggtcggccccgccagcagcctccacaacagactccgacaactcccttaagatgagtattagcatcgtttatctctgtatgtgttacaccccttgaggyctgggattgcttatggtacgcgcattcttcacattgtccagcatgcagagtggactgctaagtgtccagccgtaagtcaccctaccacctgctagaatgctgggataacatggtagtgagtagagcacataatgataaaagctatatatgcccaatttcaaaagtttggaaatacagacaagtacaaatttacctataatttcaccctccagagatgacatctgctgattttttagtatatttcattttaaccttcttttatctatgcctttatttacctaatttggaatagtctgcttgcaacgttttataccccattttcccataccgttacaaattttgaaaacttaatttaaatgtctatataatattc

SEQ ID NO: 15514 - DNA, 541 bp, Homo sapiens
gatgttccagtttgaggtccgtgcagctggagatctggtggggagctgatgttccagtttgaggggccctgcagctggagacccatggggatctgatgttccagtttgagggtggtgctgctggcgacccaggcgggagctgatgttctagttttagggccctgcagctggagacccggggaggagctgacgttcccattcgagggctgtgcaggtggagacctggggaggagctgatgttgttctaatttgagtgtggtgcagctggagatccagggatgagatggccctgcagttcaaatatgagggtcccggagctggactctacgtgaggaaccaatgctgcctctgatgtcttaggttgtggagctgaaaactcgtggaggagctggtattggtgtttctagttgagggttgtggtatttccagggtttcacaraggccagattttatttcagttactgagaagagaaagaaaatgtcttctgaaagaggtgaactcagtcattaccaatagaaaaagtatccactgtatttatct

SEQ ID NO: 15515 - DNA, 541 bp, Homo sapiens
gatgttccagtttgaggtccgtgcagctggagatctggtggggagctgatgttccagtttgaggggccctgcagctggagacccatggggatctgatgttccagtttgagggtggtgctgctggcgacccaggcgggagctgatgttctagttttagggccctgcagctggagacccggggaggagctgacgttcccattcgagggctgtgcaggtggagacctggggaggagctgatgttgttctaatttgagtgtggtgcagctggagatccagggatgagatggccctgcagttcaaatatgagggtcccggagctggactctacgtgaggaaccaatgctgcctctgatgtcttaggttgtggagctgaaaactcgtggaggagctggtattggtgtttctagttgagggttgtggtatttccagggtttcacaaaggccagattttatttcagttactsagaagagaaagaaaatgtcttctgaaagaggtgaactcagtcattaccaatagaaaaagtatccactgtatttatct

SEQ ID NO: 15516 - DNA, 544 bp, Homo sapiens
tgacaattgtctactgacaatattgcaatgttttaattcaaaattgttttagactaaaaaaaatactatttacacagctaaaaaataaatatagcagtggttgccagttctggaagtgcagagcctagtaaaaaggagatgttcttataaaatcataaacgcttcgcagaactagttaggtagagaggacaattagtcaaaagactgcagactatgaaccaatgtggtgtaacgggggagtttagattctatatttatgaccaatgcctgaaacttaaggtgggtataaggtcagaagcattgtggtaaaccaggtcarcatttgcaattaagactacagcataaagaaaaggctctggaaattttgaattagttgccaaagaaattaaagattaataagtgaataaataaatcaaataacatagattctgaaaagccaaaataaatttatgattgcatgcaacagagggagacatagctatatataaatatatacaaacacactcatactggttagaaatgaaccagtatatatactatatgt

SEQ ID NO: 15517 - DNA, 549 bp, Homo sapiens
tggaccttcccaggacctcaacaaaacaaaaccatgaagaaaaaccttgacatgaaccccaaaaaaacccagtcagcaatattttaagttaaattttgaaacaaatccaaacgggttcctccccataaatctaccagtaaattgtgcagaatcagaactgaagccatgccctttcttaaagtattgaattagaataaatgagaacatctaaatattttccaaattcatattccagttataatattcaagtttcttagtttctctctgttcacattcaacatgaaatagtcccattagtcagtagcaagagctgcaacatttctayaggtactaaaggatgtgatcagagcagggaagatggccaacaagatgatgccactctagcgggtgcccatccaaatcataacccatgaatactgcggctttattatcttggacaacagaaagctgatcttgtaattggatgatcacccctgcttgcatgctttcgagtagttacgtatgacaaaaggagctactggttttgtgatgatgggtttctgggtaaac

SEQ ID NO: 15518 - DNA, 545 bp, Homo sapiens
ggatgctacaaaataaaatacaacaacaacaacaataacagcagcagcaacaacaacaacagcaacaaaaggggaagaaacaaatctggccactgcacattcctccttgccaacaaaaagccgtggatgcaaaaagctgcccttcactgcatagacagaacagggcgcgctcgagctatgaatctcggaaattactcaaaccatcagcctctgcaagaagcaaagtggacggccgggcrcggtggctcactcctggaatcccagcactttgggagcccgaggtgggcggatcacgaggtcaggagatcgagactgttctggctaaaccagtgaaaccccctctctactaaaaaaataacaaaagcgaagtgcatctcccataaacgaggtactgcaggaagaaagcagaaaatgagacccgagtacacacatgcacgcgggcgcgcgcacacacacaccagaagaaatgaaccaagaggaaaggaaacattttcaaataagcatttggagatgggaaaaacaccttgaaacagaaattcataaag

SEQ ID NO: 15519 - DNA, 545 bp, Homo sapiens
ggatgctacaaaataaaatacaacaacaacaacaataacagcagcagcaacaacaacaacagcaacaaaaggggaagaaacaaatctggccactgcacattcctccttgccaacaaaaagccgtggatgcaaaaagctgcccttcactgcatagacagaacagggcgcgctcgagctatgaatctcggaaattactcaaaccatcagcctctgcaagaagcaaagtggacggccgggcgcggtggctcactcctggaatcccagcactttgggagcccgaggtgggcggatcacraggtcaggagatcgagactgttctggctaaaccagtgaaaccccctctctactaaaaaaataacaaaagcgaagtgcatctcccataaacgaggtactgcaggaagaaagcagaaaatgagacccgagtacacacatgcacgcgggcgcgcgcacacacacaccagaagaaatgaaccaagaggaaaggaaacattttcaaataagcatttggagatgggaaaaacaccttgaaacagaaattcataaag

SEQ ID NO: 15520 - DNA, 545 bp, Homo sapiens
ggatgctacaaaataaaatacaacaacaacaacaataacagcagcagcaacaacaacaacagcaacaaaaggggaagaaacaaatctggccactgcacattcctccttgccaacaaaaagccgtggatgcaaaaagctgcccttcactgcatagacagaacagggcgcgctcgagctatgaatctcggaaattactcaaaccatcagcctctgcaagaagcaaagtggacggccgggcgcggtggctcactcctggaatcccagcactttgggagcccgaggtgggcggatcacgaggtcaggagatcgagactgttctggctaaaccagtgaaaccccctctctactaaaaaaataasaaaagcgaagtgcatctcccataaacgaggtactgcaggaagaaagcagaaaatgagacccgagtacacacatgcacgcgggcgcgcgcacacacacaccagaagaaatgaaccaagaggaaaggaaacattttcaaataagcatttggagatgggaaaaacaccttgaaacagaaattcataaag

SEQ ID NO: 15521 - DNA, 545 bp, Homo sapiens
ggatgctacaaaataaaatacaacaacaacaacaataacagcagcagcaacaacaacaacagcaacaaaaggggaagaaacaaatctggccactgcacattcctccttgccaacaaaaagccgtggatgcaaaaagctgcccttcactgcatagacagaacagggcgcgctcgagctatgaatctcggaaattactcaaaccatcagcctctgcaagaagcaaagtggacggccgggcgcggtggctcactcctggaatcccagcactttgggagcccgaggtgggcggatcacgaggtcaggagatcgagactgttctggctaaaccagtgaaaccccctctctactaaaaaaataacaaaagcgaagtgcatctcccataaacgaggtactgcaggaagaaagcagaaaatgagacccgagtacacacatgcacgcgggcgsgcgcacacacacaccagaagaaatgaaccaagaggaaaggaaacattttcaaataagcatttggagatgggaaaaacaccttgaaacagaaattcataaag

SEQ ID NO: 15522 - DNA, 557 bp, Homo sapiens
ataaaatttagaagacacttgcctcacatcagctcccagggtgaagaggaataaaatactttttgtagctggaagaaaagccataaataacacagaattgtgcagtcagctttcacttatcagggtaaatggatgggtgcactagtgcagatacatggcctggggcttctgtgactgccagagcagcatagacacaagagaccagagagacaagcagcyggggagctgggaaggagccccagataagcctgggaagagtggccctgctgagccggccgatttgagcccgatctcttaatatgtgctcttttgaatggaaaaagagcatatgcaagcagtgcacaaatatatggcttttaagtatatgaaaagagagatagtcaagctctctcagtcttgcagaaacacaaaattaaacaataataataagattagcattacaaattcaaattagtagagatcaacatgcaatattggtgagggtgtatagaaacaatgtattcgtgcaaatgtaaattgtgcacatttctccagaggaaaatttggcaatttctact

SEQ ID NO: 15523 - DNA, 520 bp, Homo sapiens
agacataatggcagcaaagaaataactcacttactacaaggtccacttacttatttaatcactgttactgtcatacaaatatgtattccgtacaaagtgatgaaaagttagtagtggcataaaatgcagttgtggaaggacaacttagcaaatgcagacataaacacacatatatatttacatgtgtatatcatttttgttttggaataagttttgatttacatttaagttgcaaagatagtgcagagagttcctgtgtacccttctcccaggttgtcctaatgttaacatgttacataaccaaaagacaaagttatctgatgacctaaagaaaaaaaaattaagaacattgaagaccaattaacaaagtttgtgctgaaattaaggtcattctaagtggagagattgggataaatattttcaacatatgtaacagaaaacgtattaatacccaataatgaaacttctatgaattagttgctgtaaatggcaaacaccyaaataaaaatgtgcagaaaaa

SEQ ID NO: 15524 - DNA, 554 bp, Homo sapiens
ttaaatcccctgtcttccttgaagagaagtggcaaaaggttcatgaagtattctaggccattggttttttaaatgtttcttaggttcattttgaggcttgaatatatctatccatactatgatttacttagtattgttctttgaattacagtagggcctgtggtataagaaggacaaaatagggctatgtttttttgttttattttgtttgtatagcaaagcaccaaccacttatagtatgcacctgcctttcttggacaaatcaggacagtagaagacccaaagaaaatctttcctacttgayagctactattgccatgctcactaatgtctcttttggacacattgctgccacaaaattgtgctaaagcaagcatgattttggattatttttatttctggcatgttagtcatctggcccttttaatcatttctgaagttttggtcaagcacaacacaagaattgccattgttaacaattttatgaacatttttctttaagttctagccaaatctagattcaattatctttgtctccttcaaagaataagaag

SEQ ID NO: 15525 - DNA, 606 bp, Homo sapiens
ggaggggggaggtgaggagcagctggagaaccggcctgacttccaggctgagagatgatgatgagtttgcaccagtggcggtcaaaatacagagattaattacactcaacccaagaagtgggtatttatgggctgtcagtcagaagaaaatattttgaagccaaaatttgaaaactgtcacaactggtgttctgaattcgtagatatcttgggtgccttgtaatgccttctatttttcatttagaaaaaagaaaatacctgtctttgaaaatcacagtggcttatgaagtggtcagactgagtttcagttttgagctctctaggtgccgtgggccgagtggctggcatgtaacacattcaggcagagatgctccatgaggaacttcttaaaatatggtgcagagaacatrggctcaagagcttgacttgaggtcctctcctttccagccctgagacctttggcaaattcatctccatgcacttgttttcttcacctgtaaaatgggatccagatcaacaccctctccaaatggccaaggggattaagtgagattcattcatccactgcccagaacaggactttgactaatgttttagtcctacctg

SEQ ID NO: 15526 - DNA, 470 bp, Homo sapiens
tgaaactagttttatttaccaaagattaccaaagtcttgtgaactaaaaggtatttcagctagcttctatttttcagatattcatatcagaatcagctctttgtaacagctctttcatatattttggtataggaaagacacagacagaggcagatcttaaagacttataagattcttcatttgccagttttcaaagtctctcccctactttggactatcaatctcttgtgtacctgtttcatgccctaaacaattgttagctagtcagctctaaatttgcatctccaaagacatgactcaggtgaaacaaggtagaaaatgtacatctcaaagtcacagacttagatctgracaaaggcaaggtttgtttttagataacactactgccattgtagcaggacgagccacagacaaaactcctcagacaccagattaaagaaggaagaggtttttattcggctgggagcatt

SEQ ID NO: 15527 - DNA, 1720 bp, Homo sapiens
tgggtaataattgaaggagagaaaataaaattttcaaacctgcttctagatcatggaaggttcagagggaatgagatgctgtggaagagcacacattgttaaccttgatgagaatgggtgggtatgctggctaagttcctttctggccacatgaatttgggcagattggttatcttctctgatcacaggtttgtcatttgtaaaataaacktatcattacctccattgcaaggttgttgcgaagatttaaaaatgaacgatgcatataaaatacctagaatagtattctgaactttgcaggcactatctggtagttctccacaattaaatatgagatataaataagagagatatatatctcatatatgtctcatattacataagtaaaagactctaaataattttagatctgaatgaagttcaaagatgacaattatttattttcttgatgggttgtatctgttttggatacttcctcatattttcatatcagtgataaatatataaaaaggtgtacatttaaaaatatttaagtcaatatacagaattttaaaaatggatatttgcttcaagttgactcctgaggagccattaaaacaaaagagagagagaaatgcatagttgctttattatttaataatgcatttggcttcagataaacaaaaacataacctacagcaactttgaaatttgagttttgttatacgtaccataaaatcttgagaggagcagcctcgagctggtaaagaagctcaatgtaccaggaaggatgcaggttctttttatttctgaccaccaccactgccactgaactttcatcccacctttttcatcttttacagctttcattctcatgcttattctccctagttggcaggatagattttacaccctcagggatcacttggctgcccatagctgcaaggatgaatggaagtttaatttttagctttccagaactcatagtagaggagggcaagtgaagagattaagaagcatattgattgaggccaactacaatatcttctacagcaacgaatcaacctatgtacacttaaaggttatcatacacatgtttgaaattaaacaaatttatcagtattctacattatacttcttacttcaattggttttgtattttaacatgaaaaatgtcaatagcaaaaaatgcaccctgttttaatactgtgtgtttaataaacatgtgtcctaagactttcatatatagaaagtttgttgaaagaggtattagctttattttattcaccccaataattcaaattagattttaacttacatgaattacatattgtcattgaacaaggtttgtggcaattataaaatatcttagatttaaacactttaagtaccttttcaagtaagacataacttttgtgaaccagttgtaaacttgtaatatgtagatggtctcttttacttttactcaatattttataataataaattattttgaatagtggcaaataagaatatgttatatgttgtgaaaagaaacggagttactaaatagaatctgacaccactaagtagggaatagatttgtaagatctgaaagatctgtcagtacatcggagagctctataagtaggtgtgtcttttgttttaacatcaaatctttagatgataatttacaatattttattttttatgtacttacaaaagtgatttttgatcatttgtcaaaaactaatttacttta

SEQ ID NO: 15528 - DNA, 624 bp, Homo sapiens
agaggaaacttcagaaaagtgagtttaaaaatctgcatgcaaatttctctcaagaatcggctgatgcctacagagcgagattccaagaaactcagcagaaacagtagataaaagccaaacaggtgaacagagatttcaggaacagttttggggaggcggatgttggcatctgctttcgagagagggtccttgttagaytccaagagcttccagctgtgagataccagatgggtcatggcctaacaacagactctgctgtaggagcacagccatgcaaatgatgatctaggagtaacaacaaactgaaataactgcttagaaatagatttaatggaggaaaatgacttagaaactttaggaaggaggaggttggggtggttcaattgatgggatcagaagaataaattccaaacttgatttttgtagtagtagaaatattcaagattcataaggaaaaatcaacaatatttttggtaatctctgaagtgcacactctgaagttagcttggaatgaaatcttttgactttacaagaattttcttaaagaatgaacctattgtttctaaagaatttgttctatactatttcctggatatgagttatatattagttagggttgtccag

SEQ ID NO: 15529 - DNA, 825 bp, Homo sapiens
ttactgttacagatgcaccattggcctctcagcttctggatttgctccttttcaatgcattttctaccttgttcaacaaagatctttctcaaatacgaaataatcgtgcttcactgttgcttaacactttgaatggctccttactgttatcaagtttaaactcctatgacagcttataagacatttcatcacctggttctagtttatgccccaccttctgtcttcgccattgaagatccagccatgaaactactcatatctccaaattctccagactttcttttaaatctttggatcagagattccaatgagggataggagaagccataaaatcaatgtaacagggctaaacagaaaattagagttttaagctccattaaaatagaaatacaaggatgtcctttgtttgaatattccttatattcaaattataccagatgtttctatttccacttgtctaatgcatgtgcataacagcactgcacataaaccagtagttggcccctcattctccacttggctttcggaactctcatggtcagtctttggccctgtattcacactttgctcactctacacactcttccttgcttgcctttccaatccctgggcttcaaatgttgcctgtatttggaagtcttacagattgacatctccagcccagggatctcttctgagatcagactcctgcccaaagagagatgtccaagaggtctgagcaatctcaagcctgtatctaaggctaaactgtgatcttcagtccatcaaagtctctttttctgctagtctttcccatctcaataaatgtcacctgtatygctccat

SEQ ID NO: 15530 - DNA, 657 bp, Homo sapiens
ctgggggatttatgtgactgacttcagtcgcaaagcacacactctttttggaatctcccttatgtttatgacccatctctggggctcacgctacagaagactcaatttctctgtacaattccttctaaacacatccagtatccttgttaactccaaaatggctactgctctggaaatctttcctcccagatcaaatagcagggaatggtctggattgttgttgtactgtaatgaaattagactgaagtgaatatagcttaaaatatgcattctgagcgatgtggaactgttattcatattgctggcacagtgggagtgaagtgaaaatgtgataatatatgggggatgctctgaaaattgtgaagygcgacgcaaatgtgaagtagatattttccccccaaattgccaagaagcgtttcctttctgaggccaggacttggcgaatgccaggcacacgcgatttgagatgaggaccatggtagtgattctttgctttcttgcctctcactgcatcctctgccaaggccagaatagttaggagacgcctggccagctgctggaagcaagttgaggactctgcttagaaagatgacatcacccctcagcctcagttttctttccaggatgacgtcttcacagagttgtgatggaggtgaa

SEQ ID NO: 15531 - DNA, 2049 bp, Homo sapiens
  misc_feature (1)...(2049): n = A,T,C or G
ttgtattgttaaatgttaatactgttgagtcctatcatagcacaccagaacacactggaaggaatacaatgaccagaggtgactgaagtttattactgccagagactttgccagatttccccatatctttccaaaccatgttcccaaaggtacagccagaattaagaggttaatcgttatgtcagagataataaaaagatagatgttgttatggtaattgaggggagtagtactggaccacttcacatttggtaaagctgttttctctgagccacacatgggaagatatgtgtgatatccctctaagtgtttctcagtttgactaattccacctttactacattataccaatgacaaagtggaccataattgttggatggctatgttgaatattatggcaactttacttatcaagagtttcttgatgacagtatgagagtaattttaataaagtagttggataaaaaggaaaattgaagtgactttggaaagctaggatgtaaaaagtatacatgcaaactgttggtgaaggaaataacaacaagtaggaaactggaaagtgatgcgtgattgagactttttttttagtaatgaaaggacctgtataacagaggaatttcaactctgatgagaaaatataaagagagaaaggaaagataataaaagggagaaagtataatttatacagatttctaggaatgaaactatagattgagatacagattaaaacataagggatgctctcatacaaaataatagtacaggactcaatcatagtaagaaaaagaaaatattgatatagctcttactgtttatggaaagtgtcccaactccagcttagctgtattaatttgctgcttatattaacattatcctatttttattttataaatgaagaaactaaggtgtgtgtgttagggttctctaagggacagaactaatagaatagaatatatatatatatatatatggagggagagagagagagagagtttaagtacacacttttctgcctgctttatattcgctggcagtttattagatggtgctcacccagattaagggtgggtctgcctttcctagtagactgactgaaatgttaatctcttttggcaacatccccacagacacatccaggattaatactttgcatccttcaatccaatcaagttgacactgagtattaaccatcacaatacggaaaaacagtataatggtaaggtagcaggtgtgaggtggagtcactttttatatgtagacagattggttcaaaacttctgccttttgcttgtctgctaggtgataactgtgatgaatataaggagatgaagagtagaagagaacaatatgaatgcatannnnnnnnnnnnnnnnnnnnnnnnnnnnnnnnnnnnnnnnnnnnnnnnnnnnnnnnnnnnnnnnnnnnnnnnnnnnnnnnnnnnnnnnnnnnnnnnnnnnatgaatgtaaaagacagtgtactgactctggtaagatattttctgtagtactttatatgagaatttccaagccagctctgacgaaagaactgtagacagagtgtacaaaaatgagttgacattgcaataaaaagcattaaaatatttccttgttgtccttgctgaacaaatttgttgtacataattaaattacactaggccatcataaaatgattctaaaatgtatatgtggtgccaagaactcattaaggacttttggtgtgaatgtaagttggaagcacttaaaagtattaacattttccatgtttttgttcttggtcttagaggaaaatctgaaatgtgagaataggcaaaaaccataacaaaggggattattgttttctgctattaccttcctagtgtcttttctctgagcacaatatattcatctgttgatgtaaaagaaataggaaaaatgcttatttcagagccttaggtaaggatagcaaggtatcattgaggcaaataaattagtattgcatgttggtgagagytttgtattttattcagaattctgcttttatatggaattcctcaactatttctttccct

SEQ ID NO: 15532 - DNA, 433 bp, Homo sapiens
gtatctgtgcaaattattctcaaatgattaagaaaatgcaacatgaaatatagataaggcaaatgggataaaatgtaaacactcagtaaatctggataaaagatatataggagttctttgtgatattcctgcaacttttctgtaaatctgaaattgtattcaaaattttaaagttaccaataaaacaaaacaaacaacccctgaccaagaatccaacaacaagggatgaatcaaaattatggtacagtcaccctatggatgccttcaaattacacagmtttacagatcaactttgtgaagatatataacaatatagtaaaatgcttataacatgtacaatgttgaatgataaaagcaggatacaaaatactttatgtgtatattattacaactatgtaaaagcaagcatataataaagactggaaggataaaa

SEQ ID NO: 15533 - DNA, 1130 bp, Homo sapiens
aacaacagaagaagcactgtgctactgatgtatctgttgggatgagcttgctgttgtattgagcaatgtcttgcttttcggtttcattcatctgtgctaggcaaatttaaaagtattgaaaaccaagtgtttgtgtatttgagcctatcgcggtagatcaccaaaatatttcctaatccatttcacttctttgcaatgcaatgtgttttgttgttgtttgtttgtttgtttgttttttgagatggagtctcactctgttacccaggctggcatgcagtggcatgatctcagctcactgcaacctccacgtcctggattaaagcagttctcctgcctcagcctcactagtagctggaattaacaggcatgcgccaccacatctggctaatttttgtattcttagaagagacgggatttcaccatgttggctaggctggtctcgaactcctgatctcaggtaatcctcctgcctcagccttctaaactgttgggattacaggcgtgagcgcaatgtaatgttgatgtttctaccatcaataggtggtatctatttgtctattctcctgtataggagcagattttgtgacttgctttggcaaatagagtatggcttttctagtctttatctcaatgcaccagtgtgcatgaacctaggtaagacaacctaggtcaggccagccaaccctaggcagtcatgaaatatcataaatcactattgtttaagctgctaagatttgaggcaagccgtttcactggcataaacaaacaaaactgtatcaaaactaaaatgataattttgaaacataatcagctataacatcaaacttccaaacgtgttatgtttctgttacttatatgggaagtacaagattcatgwttcaagaacttaaacacttggaatttaccatttattagttatgagggctggggagtacaaaatgttttttaaaatgcaaaccattattttcatcagaacaaaacttaaattttagtcaaatcagaaaaaaagaaaaataatgacaaagtaagctaatgttaattgtttgaatttagatgtaattttcggtaatgttttgaggacagtggttcttaaatttggagagttttaaaaaccctaataccttacttcc

SEQ ID NO: 15534 - DNA, 531 bp, Homo sapiens
tgagagatgataaataatatatgaagccaggtactgagccagaggcaagttttctccctgtgaattcygccatttacatctctgttgcgtgtctctcagcagcaccttgccaggtataaggaacattcttggttggattttgcctcttattttgttgggttctcacaggacttctgctttcaaaacccccaccttttgagtgctgcttgctctcctgggctgcaggtctctctgtttttctgaacttcaaaatgcagatttgtaaaataggatctctttttctgtctcagaaggaaaatattgtgctgaaactttaagtagatctgctaaatgtacatattggtagctctggcagtgtgtaactgaccaagggaatcagcttgtggagcagatgtctggtgttgtgaagccccggtattgttcatgtagtgttgtgggttccccagcagaaggcggtcccattgagcctagccaccatagcatggacacaaggctgacactgtgactggatttgctcctcccaagtccttt

SEQ ID NO: 15535 - DNA, 531 bp, Homo sapiens
tgagagatgataaataatatatgaagccaggtactgagccagaggcaagttttctccctgtgaattccgccatttacatctctgytgcgtgtctctcagcagcaccttgccaggtataaggaacattcttggttggattttgcctcttattttgttgggttctcacaggacttctgctttcaaaacccccaccttttgagtgctgcttgctctcctgggctgcaggtctctctgtttttctgaacttcaaaatgcagatttgtaaaataggatctctttttctgtctcagaaggaaaatattgtgctgaaactttaagtagatctgctaaatgtacatattggtagctctggcagtgtgtaactgaccaagggaatcagcttgtggagcagatgtctggtgttgtgaagccccggtattgttcatgtagtgttgtgggttccccagcagaaggcggtcccattgagcctagccaccatagcatggacacaaggctgacactgtgactggatttgctcctcccaagtccttt

SEQ ID NO: 15536 - DNA, 671 bp, Homo sapiens
aatcaggtacaatttattcaagactaggtttctttcttctatttattttggcatcatccataggtgtgggttgttttcgttgtggtccccagtaagtctgggttaaaaccaggcagcccctcacccttcagaaagaaagtttctctctgtcagtattcctaacaaggtctcaaagggccatctgcttggttttcactggtttttgaagtttttcctaaactaatcwctgtgcacaagagatgccacagtctgatggtttagcctgaaggatatttttagccctcgatgtacagaagaatttctattcactaaacacagggattgaaaagaggtcaaagttagagtgtgcaggtgaagatggtaacagtgggaaaacagaatgctttttagctagagaagagaaaggaatgctgggcaggtccaagcaatgcttgtcaattggaggtttaattttcaagagaagcagcgagagaaattggtagggtctgattagaaagggtttgggattctgaatttggaagcttggacttgtttgcattgcagccagtagagcacagttattggagatggcagaggtgggaagatcacactatatgagtgggaggggacacggggataggagaaggagcagcactgggcatttatcaaggcacaagtgctggcacatcttc

SEQ ID NO: 15537 - DNA, 514 bp, Homo sapiens
aattaaataattttaaatgattagtcttcaaataatcaaaacttgcaagataaaaataaattgttattgtataaggaatttaaatatttgcttctatataaggagaaaaagtaactgaaaatttaggacctaagcatstaactggacacttgtaaactattattaaaataatgcctcaaaaatggcagaatgcaaataattttaaaatagggtagaaattaacaaaatatatgcacagacatacgaccatgaaaactgtcagagagaagttaatttttttccttttcaaagagtatacatttaaaacaagtaaaactaacaaaagaaaaattgattgattataaaaatgtcccagatcccatacccttcttttctgtgttcatgcccttgacaacatgacattgtaggtcctttgaaagtgtaggatcttatttcctgaatcttgaatttggaatggctttgtgacttgcttttagaaaatagaatatgaaagaagtgacagtattttatttcc

SEQ ID NO: 15538 - DNA, 514 bp, Homo sapiens
aattaaataattttaaatgattagtcttcaaataatcaaaacttgcaagataaaaataaattgttattgtataaggaatttaaatatttgcttctatataaggagaaaaagtaactgaaaatttaggacctaagcatgtaactggacacttgtaaactattattaaaataatgcctcaaaaatggcagaatgcaaataattttaaaatagggtagaaattaacaaaatatatgcacagacatacgaccatgaaaactgtcagagagaagttaatttttttccttttcaaagagtatacatttaaaacaagtaaaactaacaaaagaaaaattgattgattataaaaatgtcccagatcccatacccttctttyctgtgttcatgcccttgacaacatgacattgtaggtcctttgaaagtgtaggatcttatttcctgaatcttgaatttggaatggctttgtgacttgcttttagaaaatagaatatgaaagaagtgacagtattttatttcc

SEQ ID NO: 15539 - DNA, 514 bp, Homo sapiens
aaaaaacaaaaaaaaactttaatatatgatctaagaatataactgacagtatttatgagtagaatttaaaaacaagctcacaaaggtggtcaagctatcaagcagtgtgttttggtaatgaaccataaactaaagaaataggatatttcaaatgatttttctgtcatctgtgcattttggtagtattgctcttagataagacaggaatctttacrttcacaaatacagggctaggctttatagatcagaagatatctcttctccaccggccttgataaatgctgatatgtgtttatatgccaatctccatttttttctctattgcacaggcttcattgcttcttgtccagtcaacagaaacaaactgaaaataataaaaaggctcttattattgttgcattggttatattccaggaacaattttcttttaagtgtattattcctaggattgaaagtaaaggttgagtacatttctgacatggatcaaatgtatatatttatgtattacgacaca

SEQ ID NO: 15540 - DNA, 566 bp, Homo sapiens
taacaacaacaacaacaaaatcccaaaaacaaacaaacaaacaaagctcccacaaaaactagccaggcatagatagcagtgtcacctgtagtctcagctacgtaggaagcagaggtaggggaggatcatttgtgcccagaagatcaagggtggcaatgaaccatgatcgtgccggttcactgcagcctgggtgacggccagactgtcgcttaaaaaacrtaaaacaaacaccacaatgtagattaggtttcctggaatgttggatggaaacagagatgactgcaaaagggcaaaaacgaatatttgggggtaacgaaaatattttaaaaactgaactgtggtgatggttgcacattgtgaatttaccaaaaatcactgatttgtatccataaaataggtgaataaaagaaccagaagaatatgtataaaaaagccaggataaataaagtttcggttttttaattgaagaaataaaattctatgcacagtatattttttctgtgctgtttatcttgggaaattctttgagcactgactcctgtatcttcaaatgtttgagagcctgc

SEQ ID NO: 15541 - DNA, 566 bp, Homo sapiens
taacaacaacaacaacaaaatcccaaaaacaaacaaacaaacaaagctcccacaaaaactagccaggcatagatagcagtgtcacctgtagtctcagctacgtaggaagcagaggtaggggaggatcatttgtgcccagaagatcaagggtggcaatgaaccatgatcgtgccggttcactgcagcctgggtgacggccagactgtcgcttaaaaaacgtaaaacaaacaccacaatgtagattaggtttcctggaatgttggatggaaacagagatgactgcaaaagggcaaaaacgaatatttgggggtaacgaaaatattttaaaaactgaactgtggtgatggttgcacattgtgaatttaccaaaaatcactgatttgtatccataaaataggtgaataaaagaamcagaagaatatgtataaaaaagccaggataaataaagtttcggttttttaattgaagaaataaaattctatgcacagtatattttttctgtgctgtttatcttgggaaattctttgagcactgactcctgtatcttcaaatgtttgagagcctgc

SEQ ID NO: 15542 - DNA, 566 bp, Homo sapiens
taacaacaacaacaacaaaatcccaaaaacaaacaaacaaacaaagctcccacaaaaactagccaggcatagatagcagtgtcacctgtagtctcagctacgtaggaagcagaggtaggggaggatcatttgtgcccagaagatcaagggtggcaatgaaccatgatcgtgccggttcactgcagcctgggtgacggccagactgtcgcttaaaaaacgtaaaacaaacaccacaatgtagattaggtttcctggaatgttggatggaaacagagatgactgcaaaagggcaaaaacgaatatttgggggtaacgaaaatattttaaaaactgaactgtggtgatggttgcacattgtgaatttaccaaaaatcactgatttgtatccataaaataggtgaataaaagaaccagaagaatatgtataaaaaagccaggataaataaagtttcggttttttaattgaagaaataaaattctatgcacagtatattttttctgtgctgtttatcttgggaaattctttgagcactgactcmtgtatcttcaaatgtttgagagcctgc

SEQ ID NO: 15543 - DNA, 522 bp, Homo sapiens
attccattacctccccctgggtccctcccacaacacatgggaattctgggagatacaatttgagatttgtgtcgggacacagctaaaccatatcagtgaycaaccatccctgtttgccccgaagtgaggctcatctcaagacactggatttccagctaaaaacagacaagtaccaggcaagcctggacagattgatcacacaatagtaaaaccaaggatatatttcttaaaaagatatcggtcaagtcatgtgggtagataatttcttttatcattggagatgagtctgtttactttaggataaaattaataattcttgtgatacagcatgtttgttctggagtaattgcctagagacagacaaagctggttgggagatggatatagatttagaacactcattctctttttccaactcataagaccatcttccatggttctctactttaaaactaacagaaatccaggcaatgaaaatctccaataacactttgctgaaggcttatagtttgaaataacaat

SEQ ID NO: 15544 - DNA, 506 bp, Homo sapiens
tattgaatattgtttmgaagcattctacagttcagcagctctttttggtctttctagctttaggtctattctttgttaggatcagtcaactttggctattacctcagtgatacactatggcccttactctaggaaattatccttactcccaaagtggtttttctgagttctcagggcaacgccagaggtgctcagtgaagtcttctttggaaggctggcagggctagaactctaacaacttgcagcattccagctctatgtggcttgtgttatttcattccattctcagccctgcctgctaagcattgggaagccttggatatcgtgcatatcccagcccttagtcaataacccacatttaatttcacacaaatttcccacccaccagctacctgcagaatacacacgcatacatcaattctctcttaaccctggcctacaaattccagccacttcaggagcctggaactctaatctctgccacttcagctcagtgactatgagct

SEQ ID NO: 15545 - DNA, 510 bp, Homo sapiens
ggtcacaggactggttggcaggtctgggcgaagccattcattgtcagaaatgcaaaaacctgaaaagacatctcaaaaagccaatcttaggttctacagtagtgatgttatctgcaggagtaattggggaagttatgaatctcatgacctcgagaataacggctggtaatagcttatggctacaccttagcagaattcacgctcctctcatcctcctaacctggtgatctttcattagctttacaaaggcagtttagttttggggaagggccattatcatttaaactataagctaaatttctcccaaagttagcttgggaagcaggggagggaggaggtctttcttcttttaggcaagttggagacacaagagggaaagatggccagaggaaggtgtgtttgaactgagttttaaaagcctcatggggctgggcgcagtagctcacgyctgtaatcctggcactttggcaggccaaggtgggtggatcacttgaggtcaggagtttgaaa

SEQ ID NO: 15546 - DNA, 620 bp, Homo sapiens
ctgggtggctatgtttgcagatcctgtcttctaggctaccgtgaggagttgctccattacttatttcctaaatgaatagaactacctcttctcagtcatcacagcctaagcaaatggtttgaaatgataaacctgccaaacagcttgtggtcacacagctgacttgtagaatctttaggagctttgattagtatgacttgtrggggtgttggaaaaagagaagtcacttaggataacatttgttaagaatcagtggtatgtcctatgcagccatgaaaaaagatgagttcatgtcctttgcagggacatggatgaagctggaaaccatcattctcagcaaactaacacaggaacagaaaaccaaacaccacattttctcacgcataagtgggagccgcacaataagaacacatgtacacagggaggggaacatcatacactggggtctgtcgggggtggggggctaggggagggatagcattaggagaaatacctaaggtagatgatgggttcatgggtgcagcaaaccacaatggcacatgtatatctatgtaacaaacctgcacgttctgcacatgtatcccagaacttaaagtataatttaaaaaaaagaaaggaaa

SEQ ID NO: 15547 - DNA, 478 bp, Homo sapiens
gaggcacactcaactcttgtttcctctctcatagataagtatgtcttttactcaacctaataaattcctatttggtcaatcttatcttttctctccattttcacttgytttatttacgaattgcactgccttattcatgcatactgatttcttctacatgctaccttcaattaccacttgcaattcccagcgagataaaaaaaaagcacattctcaaatattcctcctaggagcctaagatacttaaagaaataatgaggaataatctctctttgctgagtaaataccaatcaaatatgtccaatgacatagcccttgaattggaggaaatggcattcaacatcctcatatccaactccgtaaatctttgcatgatcaccccaagctagggtaatttttacttctttagtaatttactgtcaggatccctctattgataccaatcacatattactatacatttttgcttatctctttt

SEQ ID NO: 15548 - DNA, 594 bp, Homo sapiens
gaggatattttaaatttccacatgtacatttaagagtttgatacaaccctattatctatattttctctttcctatacttagtaattttcactgtagaagactcacttataaaagtgtatattattatyatatttggatgataaactaaaattttgaaatatttagaagcattgttatgaactcattaaaattatcagaatcacttcatataaaatgatatttaatattttcttatacataaataaattagtgacattaattgttttatacttttaatttaatttgattatgaaaactttctatgtgtttttgaatttgtgtaaccttagacagattgctaagcccatttcatcatgcattaatagaataggattagataatctctaagggtccttttggctctaagattatatgattgtaattaatggcactgcagatcttgtagagggacattaaaatggacccatacctgaagttacttttcaattgaattagtacttagggagttgagacagtagaaacaaggaaggcaaaacagtctttcataacagatcataataaatttgctaatattatagaaaggtcattggaaag

SEQ ID NO: 15549 - DNA, 594 bp, Homo sapiens
gaggatattttaaatttccacatgtacatttaagagtttgatacaaccctattatctatattttctctttcctatacttagtaattttcactgtagaagactcacttataaaagtgtatattattattatatttggatgataaactaaaattttgaaatatttagaagcattgttatgaactcattaaaattatcagaatcamttcatataaaatgatatttaatattttcttatacataaataaattagtgacattaattgttttatacttttaatttaatttgattatgaaaactttctatgtgtttttgaatttgtgtaaccttagacagattgctaagcccatttcatcatgcattaatagaataggattagataatctctaagggtccttttggctctaagattatatgattgtaattaatggcactgcagatcttgtagagggacattaaaatggacccatacctgaagttacttttcaattgaattagtacttagggagttgagacagtagaaacaaggaaggcaaaacagtctttcataacagatcataataaatttgctaatattatagaaaggtcattggaaag

SEQ ID NO: 15550 - DNA, 594 bp, Homo sapiens
gaggatattttaaatttccacatgtacatttaagagtttgatacaaccctattatctatattttctctttcctatacttagtaattttcactgtagaagactcacttataaaagtgtatattattattatatttggatgataaactaaaattttgaaatatttagaagcattgttatgaactcattaaaattatcagaatcacttcatataaaatgatatttaatattttcttatacataaataaattagtgacattaattgttttatacttttaatttaatttgattatgaaaactttctatgtgtttttgaatttgtgtaaccttagacagattgctaagcccatttcatcatgcattaatagaataggattagataatctctaagggtccttttggctctaagattatatgattgtaattaatggcactgcagatcttgyagagggacattaaaatggacccatacctgaagttacttttcaattgaattagtacttagggagttgagacagtagaaacaaggaaggcaaaacagtctttcataacagatcataataaatttgctaatattatagaaaggtcattggaaag

SEQ ID NO: 15551 - DNA, 1477 bp, Homo sapiens
tctctttaaaataagaattttgtccccctcaaaatgagctagtacttttaacatttattatatgctaaggagctaatataaattagcttaatcaatcttcaaaatagttgcagtaagtaggaacttttgtacatttggaaatatgaaattaagtttttaaagatagcaaattctattgttattaaaagttgttaagaggggccttgaatcaatgctgttgtctctaaaacccacacacttagtgttattttatgtttttccattttcaactatttaacagtaaaagtatgtagttgtttaatcatctaatatctgtactgtactgtattaccagcattatgagagaagagcacatttgtttcttgttcacaaatataatcccagtaccgaaaacactgtgccaaatacttgaatttagatgaatattgaataacttggtctttgaaagattaaacatgtaagagctgctcaatgattccagacaatattacaaaaaccatgggttcacaagtcaccaaatacttgatatgtgttcacccaattatatatttttcaaattctgtttttctaattaatcaaaatatatagtgtattatgattgtatgacttacttaaaattgattatgactccataatttcaatgagtgtattattacctctattaataattacagattgtatcatgtttattgtgtaagcctaggaagaaaagggcagagcagaattaaattatataaattcaacatttgttcaaagtgaaaactaaaggtaaaagtgcttatactgcaaaaggaattttcacattaattgtagtagagaaaaatgatgtaaagtatttagctaccataaggatctcataagttacatattttaaattcaaaactattggtaccacattcattcatatcaaattcatatttaatgtgctcattaggaaagaaacatcaatggtaacattaaaaaagtgttgttaattttaattgtattaatttcttagtttacaatttattataaactactgtctctataatctctaaagatataaacaaaattagttaaaataactttatccagtaaatattttccagagtccacmtgtaactttttaagaaatacttatctaaaatgcaataatttggaagtcaaatgacatatttgccaaacaaaattgatttttcacttcaaactttcccaccttcctcccttcaacctccagaatcacccaaagctcttagattgtaatgacagtctgagctgttggaatcaggaagaggagccccgtgacacatcagtcctgctggaccatttgtgaggctggctgtggccctggtgacctatgcctccagggacagtccacatcccagttgtctccaacacaggctggacagggttgaggtagcttccttttgcttcctgggcaatccttcttaatgccagtgcattccagcctgggctacagagggagactgtctcaaaa

SEQ ID NO: 15552 - DNA, 1477 bp, Homo sapiens
tctctttaaaataagaattttgtccccctcaaaatgagctagtacttttaacatttattatatgctaaggagctaatataaattagcttaatcaatcttcaaaatagttgcagtaagtaggaacttttgtacatttggaaatatgaaattaagtttttaaagatagcaaattctattgttattaaaagttgttaagaggggccttgaatcaatgctgttgtctctaaaacccacacacttagtgttattttatgtttttccattttcaactatttaacagtaaaagtatgtagttgtttaatcatctaatatctgtactgtactgtattaccagcattatgagagaagagcacatttgtttcttgttcacaaatataatcccagtaccgaaaacactgtgccaaatacttgaatttagatgaatattgaataacttggtctttgaaagattaaacatgtaagagctgctcaatgattccagacaatattacaaaaaccatgggttcacaagtcaccaaatacttgatatgtgttcacccaattatatatttttcaaattctgtttttctaattaatcaaaatatatagtgtattatgattgtatgacttacttaaaattgattatgactccataatttcaatgagtgtattattacctctattaataattacagattgtatcatgtttattgtgtaagcctaggaagaaaagggcagagcagaattaaattatataaattcaacatttgttcaaagtgaaaactaaaggtaaaagtgcttatactgcaaaaggaattttcacattaattgtagtagagaaaaatgatgtaaagtatttagctaccataaggatctcataagttacatattttaaattcaaaactattggtaccacattcattcatatcaaattcatatttaatgtgctcattaggaaagaaacatcaatggtaacattaaaaaagtgttgttaattttaattgtattaatttcttagtttacaatttattataaactactgtctctataatctctaaagatataaacaaaattagttaaaataactttatccagtaaatattttccagagtccacctgtaactttttaagaaatacttatctaaaatgcaataatttggaagtcaaatgacatatttgccaaacaaaattgatttttcacttcaaactttcccaccttcctcccttcaacctccagaatcacccaaagctcytagattgtaatgacagtctgagctgttggaatcaggaagaggagccccgtgacacatcagtcctgctggaccatttgtgaggctggctgtggccctggtgacctatgcctccagggacagtccacatcccagttgtctccaacacaggctggacagggttgaggtagcttccttttgcttcctgggcaatccttcttaatgccagtgcattccagcctgggctacagagggagactgtctcaaaa

SEQ ID NO: 15553 - DNA, 543 bp, Homo sapiens
gccagagtgtaagaaatcattagagtcaggtttcatttggtttaaatttatagtcgagaccagtcaaaattttactagagatgcaagagttccctgagatatcaattaccatcagttatggtgtactcagtgtttgttgttccttgaaagagggaaaatgtaattgaagggtaataactcaaatacaaaggagaagtaaaggtgcagaaagtagtgggagggtcagatgytctaaaggctatttttatctacttcaaagcccacctttatagcaattaccgctgctgcatacagctgcaaagattgctcaagaggcttcattccaaatacattcagtgcatatttcattttagtgaaacaaaaataatctagtcttttagtctactgtgttgtgagtccctgaggacaagaagagaattttcgtcatctttgtatccacagcctataacagtttccccacaatttggaggtgttcaataaaatgtttgggcataaacaaaatctcacaaattattaggtggagccaaacctgtaccaaacaat

SEQ ID NO: 15554 - DNA, 543 bp, Homo sapiens
gccagagtgtaagaaatcattagagtcaggtttcatttggtttaaatttatagtcgagaccagtcaaaattttactagagatgcaagagttccctgagatatcaattaccatcagttatggtgtactcagtgtttgttgttccttgaaagagggaaaatgtaattgaagggtaataactcaaatacaaaggagaagtaaaggtgcagaaagtagtgggagggtcagatgctctaaaggctatttttatstacttcaaagcccacctttatagcaattaccgctgctgcatacagctgcaaagattgctcaagaggcttcattccaaatacattcagtgcatatttcattttagtgaaacaaaaataatctagtcttttagtctactgtgttgtgagtccctgaggacaagaagagaattttcgtcatctttgtatccacagcctataacagtttccccacaatttggaggtgttcaataaaatgtttgggcataaacaaaatctcacaaattattaggtggagccaaacctgtaccaaacaat

SEQ ID NO: 15555 - DNA, 543 bp, Homo sapiens
gccagagtgtaagaaatcattagagtcaggtttcatttggtttaaatttatagtcgagaccagtcaaaattttactagagatgcaagagttccctgagatatcaattaccatcagttatggtgtactcagtgtttgttgttccttgaaagagggaaaatgtaattgaagggtaataactcaaatacaaaggagaagtaaaggtgcagaaagtagtgggagggtcagatgctctaaaggctatttttatctacttcaaagcccacctttatagcaattaccgctgctgcatacagctgcaaagattgctcaagaggcttcattccaaatacattcagtgcatatttcattttagtgaaacaaaaataatctagtcttttagtctactrtgttgtgagtccctgaggacaagaagagaattttcgtcatctttgtatccacagcctataacagtttccccacaatttggaggtgttcaataaaatgtttgggcataaacaaaatctcacaaattattaggtggagccaaacctgtaccaaacaat

SEQ ID NO: 15556 - DNA, 1939 bp, Homo sapiens
acactttggggataaacttgcccttgtgggtcttatgctttaaagttcatagtctagacaaaaagagagtattactcgtaaagtgactggcctacaaacacacccttatgtagaagaagaattggatacaagtgttacaatccatgcttccatatggcacatataacacctttaatatctttaaaccactgtcattttttaaagtttctttaaacatcttggattggatagtactaagtaaggtgatacctttcctcccttggtaaattataattaaacagatacctgaaatattccctttcccatggtgttttcccctagtggcactcctgtgtcctttccactgaatgcctggagcggtcattaaccttatagcttgcctgagcattttgagaatagggatcacgttttaattctttatgtacctttagcttttagaaaaatgcctcaaattcagtggactatcaacaaatgtattctaaaggaatgattcaaggaattaataaaaaacatacaaatatataaaaacaattattatatagatttagctgtatgacccttgaaaaatagccaataattcacaatactcagtacccaaaggcccacaataaatactcattcttgggaatgacttattttatattatttttgatattatatttatataatacataaataatatataataatatgtaagtaatatattatatttacattattatccaataagcttgcattccttatttttaagagaagaacaaaaacctttcaaataatattctgattattctttcttcactgggctctggaatgtcttcaccttagtagaaatacaagaatgagcattttctttccatctttctctgcattcccttttcctttctttacctgagaaatcttgaggaaatggaaattatagttgtactataatctcgtttgctttgataatgaatgagtgcttttaaatataaacacctgctgtctactttgttttctaattgagaaagaattataaacagctgaagaaaatttggaatatctaataaagcgtaaagaaggccaaatttgccaatattttcaatacccagaaataatcattgataatattttattgcatttatattcagtgctaaaatgaaagttatactgaatacacattttctcatcatgtttctcctatattgacattatagtataactattttctatatcatccaatactcttgtgcaacattaacatttttaacgttttattccaggttactttatttcaacatctgtgcaataataatagtgagagctaatatttattatttgtgatttctctgtgttccagactttatcaaatgattttacatggacttcacttaatcattacagaaagaatatgaggtaggtattgccatccctatcctcatattctagatgaggatgacatgcataaagacatttaagtacctggtcacagggataacaagttgcagaacaaccttttctctttagtattaaactctgtgttcatctcaatagtttccttcattgtcttcttaactgggaaataatttcacaatgtagatattgtattattattttaattttaattgttgaattaataataaattattaggctgatttctcatctcaggatctgccaaatytggtgatagcttttttctctgggataaatggccctcagtttttgttttttttattaatcacaattatggctaaatttcaaggtatgccaagtgagaaatttgtccaagataccacaagctctttttttattaattgggcaacctgaaaacataaaatgatattaactatgctgcttccagccctttgtcccaagacggggatctttcttagtctaagacagtgactcccaggactggagttgcttcatctgtcatttggaaaggggtgttggtggcacact

SEQ ID NO: 15557 - DNA, 501 bp, Homo sapiens
tgtatatatgtatgcgtgtatatatataygtacagagagagagagagagaaacttgtggaattaaacgaaaatctaaatcactggcaaatttgtactttatttaaaaactgcagttattccagaagaaaaataaagactgtttttgcactttcaattcccaccattctttttgtgtgccatcactcatggttaggcaggcctcctaaagagttgctccggaactgcgtaggaggagtttcaatcccctgccagtagcgctaacttacttaagatttctctccaggtatttatgcagagcctgatctccaacagtgtgtcagagaatagtgcactgagagactacaattttaactttgcaattaaaaaattaaaccttggaaatgcaaaagtaaggtgcaaagtgaagcatgaggcttctaaatgaaatgagcaagtccctaaacctctcctttctctctggcagaagactttgtgatgaatcccatccagccatgctggct

SEQ ID NO: 15558 - DNA, 322 bp, Homo sapiens
aagttgcctttatttttaaaaagttaaaaatgaaagtacatgttatatatctttgctgaaaaatggtgggaaatggatttgtcaaaaccatatggaaaggaagagggaatcaattaaaaacagaaatmtaataaatctaaaatatttccaaatgaaatgcttgtggtaagctaacttcttgtaaacaccgcactcaagtcacttgaacagtcccagatggtgaactaactttgtggtcttaaaacaaaagtcagccaaaaaaaccaagactacaactttattatcaatgcagtgggaaacatgagatccataatcaaccaac

SEQ ID NO: 15559 - DNA, 526 bp, Homo sapiens
tttttaaagtacatttaaatgtattaaattactctcttgactgaaaaattataggtacgcttcagcctagttttatttcccacacacttagatgcagctacaactgctttaaatgtgcagaaaactttttgttatatggttgaagtaatcaatcactctaaggtaaaaacttattttctaaattaagttgaagtactattgaaattctatgaactgatgggagactccygcattcactggatgctgtaacaaattaccacatacttggtgcttaaaaccacagaaacctattctctcatagttctggaagccagaagttcaaaatcaaggtgtcagtagggccatgcactccagaggctctaaaatctgttccttgcctcttccagcttctagcagctgcaggcattccatggcctgtagccatctcatgccaatctctacctacgctgtcgcactgcctcctctttcttttgtttgtcaaatctctctctgcctctgtcttgtaaggatacttgtgatgacattt

SEQ ID NO: 15560 - DNA, 466 bp, Homo sapiens
gaattctcaatgcaaaacattccaaaaacacagagcaagtgtcttctataaccttccctttttttgagacttctcttcacagtgtatgtgctagtgtcttccagacttttgtgtgacatgctatacagaacatcagatcaaacgggcacatccctaataagtggtgacttgccagatctggactcactttgcagggtgctgggacctctctgagaatcaagcagtagctccaggagccagggctttgggtctcttctgtgcatcttcaggagttttattgacttttctcaccacaacccccttctcaattaccaacttccaatccaaaaatgacatccaactggatcctgaacttccacccagttaacggtgattgagtyttcaactttcttcttattaagtgattaaattagatatggatttatgaaagtgaaagaattaataatagggtgaaggactaaaactc

SEQ ID NO: 15561 - DNA, 1081 bp, Homo sapiens
atctgaaggaatgctgtagggtgggtggrgtgacaggtttaaactgctccagaatacagaatcaggatcaatgaataaaggttatgagaaggctgatttaccctcactacaaagaagaacctttcaataattaaagcacagcctgggaggaatcttaattgacaaagagaaagtgcagctttgaaagcaaatgcagagagagcttcacagaaaagagagcatggaaaaatcaagccctgaataatgtaatatcatgtgttggtattcagaagccaaaggaagatggtaaaatggtagcagtgacagtggtcctgggagagagatgttctttggataatttcataattgggtaattatgccaagaacacatgtgtacccccaagaggtagacaacagcaccagtgaagacagatggagctgacttagagtgagcttttcccttccttcctcaccctgcctcattctctctctttccttccctttattacttttcccccactttcacgatataaatatctactttgtgtcagacactatgctcagacctaaggctatagtagtgaatagaaactgtttttaccttcaagaaacttacaagttagtaagagaaacaaaacaaatatatgacaacaaatcataataatttgcaagggagattttcaaggaagaaacttacaagggacaaccaaattagattgaaagactagaaaagcttccctgaagaagtgatatttaagctgagatgtaattccaagtaagaattttccaggtatagaaagaagggattgctatggaaaatatgataggaaagaccttctcacaataagaaactgccagaaggccaatgtggttggaaaaaagcgcctgtggataaatgatctgagaagagactggagacttaagcaggatcctaaagcagaactgggcttctgcttagaggactgattggtgatgaggaggtgtatagagggctgaccctccaggaggctgttgccacagtccaggtgtggtatgtaccaaatacctggatgtggaggaggagagacatgggtggatgcttttccacaccaataagtaaaac

SEQ ID NO: 15562 - DNA, 501 bp, Homo sapiens
gaggaagaatcaacgaaaaggcccragaaggaaacaaggggaaaaccaggaaactatgccttcctggaagccaatggaggtatttttgggtgaggaacaggatcaattttgtcaaacagtacagctggctagcgtaagaaatatatgttgctcattagatttaacaacatgaaggtgaccttgacagagaaatttcgatggaaggttaggggagatacagggaatgaaaattagaaatggaaagaggggaattgtagaccggaaatattaaaaatatattttaagatatttattgatgaatgaaaacaaataaatagaataagtcgataaagggtgcacgtgtgtatatatgtgtgtttattaatgaccaaaatcaaccatgttgaactctcagaaagctgtgttgaagtatgccattactttatatagagaatacaattcagagagcaaagtgaagaaaatggggtttaagcagggaagggaagaaatttgggatgggtt

SEQ ID NO: 15563 - DNA, 501 bp, Homo sapiens
gaggaagaatcaacgaaaaggcccgagaaggaaacaaggggaaaaccaggaaactatgccttcctggaagccaatggaggtatttttgggtgaggaacaggatcaattttgtcaaacagtacagctggctagygtaagaaatatatgttgctcattagatttaacaacatgaaggtgaccttgacagagaaatttcgatggaaggttaggggagatacagggaatgaaaattagaaatggaaagaggggaattgtagaccggaaatattaaaaatatattttaagatatttattgatgaatgaaaacaaataaatagaataagtcgataaagggtgcacgtgtgtatatatgtgtgtttattaatgaccaaaatcaaccatgttgaactctcagaaagctgtgttgaagtatgccattactttatatagagaatacaattcagagagcaaagtgaagaaaatggggtttaagcagggaagggaagaaatttgggatgggtt

SEQ ID NO: 15564 - DNA, 586 bp, Homo sapiens
tgaagacgggtatttcataaacaaagctcttcatcagaaggcaaaggaggagacaaatagaactgtttttagaacatgaaatgcagtaattatatacaatccatagatgtgtcttatacttatagaagcccaggtttgactggggtcatggagatggatgaccccagactttcgcagaatgcttatctttcaccctgttgttttgcacactgttacttgttatctatggaactcaaaagacaatcaattcagcaattccacatctgagtatataccccaaataattcaaagcagggacttcaagagatatttgtatacactcatgttcacagcgcattgtttacaatagccaaatggtggcagcaacccaagtgtctatcaacagatcaaaggatatacaaagtatggtatatacatacatcagaatattattcagcccttaaaaggaaggaaattctgacacatgcttcaagaatgaaccttggggacattatgctacatgaaataarccagtcacaaaaggacaacattttatgatcccacttacatgaggttcatagagcagtcaaacttgtagagacagaaa

SEQ ID NO: 15565 - DNA, 541 bp, Homo sapiens
agagaggcaagccctctcctgtataaagagacttctgaaatatcttatacaatatttctccttgtatcttgttaattaaatcttaaatatttgactaccctggttgcaagagcagtatggaaacgtrctattttaactggatggaaataaacccactaaggtaaagtggtacccacccactcagtgggtagagtaagcccacccactaagtaggtgtggggtaggcaggtggcagactttgctacaagaaaggagagaatgagagaggtgagaagagaggcaagaataaaagctaccagatcaaattctttattaccccagggattaatttctaacagtccttcaagatttccataaataatacttgaaaatttgactttatgataatttggaaaattagctgagtgatgtggtaacacaataaaacattgatgatggcatttggggagtagtagtagcagcagcagtaatattaaaagcagtagaactaatagtaggctttttgtcactcaatatgtattcccaaaaatatgtaaaaata

SEQ ID NO: 15566 - DNA, 516 bp, Homo sapiens
cataaattgtcacattttgttttaaactgtgttcacttacaaaatttgcattatgaatagcttgacttcttttggagcccaaatgaaactgtgactaggtttcaacagaaactctatttttctctatagatatgmcatgcttactgggtcccaaagttaattctataccaaaaaagaggaacagacacaggttttagactcagaattatgtttaatggaaacagaacttaacaaattgtctgggtcggtccagttccccggtgagttagggtgaagactcactccctgggtgagttgcagtcttctcctaggtatgactcagcagtctccactctcactttgttcctttgttcctgtttgctgtgaacaggatggacagagatggagccttgatcatctatagaagagtagctttcaaaactttattcatgtgtttatttctatatttattaatttactccgaaaacttttgttcaaacacaacgtgagttgaatatataaaactaatgaaggctg

SEQ ID NO: 15567 - DNA, 547 bp, Homo sapiens
tgaggaacactacaatctgtaaatagtcaggtattgcttcaaagaggaaatgacacttgagctaraagatgaaaaattaattgaagtttatcatgtgaaaaaggaggtggtgatatatccaggcagagggaagagtctctatgcaaaggcaacaagaatgtacaatgttgacaaagaggaatatctcactttcattggcgttgtcaggaggcctcttgggggaacaaaatcttgatgtttgaagatcagttagttaggcaaagaaggggaacaccgagaaaaaaagaggaacataaaaaatgcagaagtgtaaagcaataggtgggaaccagaagtgagaatttttatatcattggagcatttattgagcacctaccatacacttaggcatttccgctctaagggaggaaacagttaacctaacagatttccctaaggtcatgtacttaaacactaaagaagggatcggatccatggttttgtatgtcttccttctgcatcatcacacctcctaagtataattctaagtttccaggatgcacatata

SEQ ID NO: 15568 - DNA, 547 bp, Homo sapiens
tgaggaacactacaatctgtaaatagtcaggtattgcttcaaagaggaaatgacacttgagctagaagatgaaaaattaattgaagtttatcatgtgaaaaaggaggtggtgatatatccaggcagagggaagagtctctatgcaaaggcaacaagaatgtacaatgttgacaaagaggaatatctcactytcattggcgttgtcaggaggcctcttgggggaacaaaatcttgatgtttgaagatcagttagttaggcaaagaaggggaacaccgagaaaaaaagaggaacataaaaaatgcagaagtgtaaagcaataggtgggaaccagaagtgagaatttttatatcattggagcatttattgagcacctaccatacacttaggcatttccgctctaagggaggaaacagttaacctaacagatttccctaaggtcatgtacttaaacactaaagaagggatcggatccatggttttgtatgtcttccttctgcatcatcacacctcctaagtataattctaagtttccaggatgcacatata

SEQ ID NO: 15569 - DNA, 528 bp, Homo sapiens
ttagtggtgatctgtgagatttgggtgcacgcatcaccgaagcagtgtacactgtacccaatgtatagccttttattcctcatgccccacccacccttttcccagagtccccaaagaccattgtatcattcctttgttgttgcatcctcacagcttatctcccaattatgagtgagaacatatgatgtttggttttccattcctgagttacttcacttagcctaatggtctccaattctatccaactctccagagtctttgacctaactttatattttatctgtatttcctttctttacatggagaaytggagaattataattctcaaagacatagcaattggtagaagtagatgattccacaattactttgttccacattacacacatagtggtcttaggagaacattatttttttattcgaggctttttaaaaaattatacttgttagtattctcctgctttgattttcttcataaggagtttctgttaaccatatattaaatcttcttggcctactttcaatatt

SEQ ID NO: 15570 - DNA, 561 bp, Homo sapiens
attctaagtatatttagaacggggtggtagtcaaatcatttagcatagtaatattggcaccaacctgttagaacagacttcagctaaaaccaaccagtaacctatgcccccatccaccaggtgaaaattagtgaagacagaggcatgacaccctagggtgtttcggggcatactggagtcatgctatccccattaacagaggacaatgtgatttttgtggggagatattgaaactacaagaaatgtaggacctatctgatattaacctatcataccacaaactcatgwtatataggaaaatatttatataagatagtattaagcaataatatacaataggagagaacaaaaatctggcttcattgtatggcaaatgattatggagagcagcttgtacataattaccgccctagatctcagatattccacagattatttggacagtacctaacaccacaattcattgggaggcaattgggttgggaaatactgtctataacactaagtaatttcaatcaaatgtcagttgatggttgatatattctctacccacaatgaaca

SEQ ID NO: 15571 - DNA, 539 bp, Homo sapiens
gcatgcagcccaggatgtctttgaatgaagcccaacacaaatttgtaaagtttcttaaaacatgagatttttttgcaattttttatttttacttttttagttcatcagctgtcattagtgttagtgtattttatatgtgacccaagacaattcttcttcttccattgttgcccagggaagctgttataagtagtcagagaggtgtgagcagggcaggagagggctctccttcacccaccaggaatgttgggtgatggtttggcagttatcacactgcctctctaaaagtgataagttgacagtcagtgccagggtgaggccatgtcctgatggtccatacctgttgcactaaagtgttaattaaatgcagatgccagggaggagaagcaacttcccaggcaagcacattaagagacaaaatggtgaagtatgaccttctaggggcactccactgctaaaggaaaggaagtctcagacaaacatgcttacagcttcctaaacacatgrcatgtgctcatgttaagcataagaaaggcact

SEQ ID NO: 15572 - DNA, 637 bp, Homo sapiens
ttgatgaataacagagcaccccaaaacttagtggcttaaaaagataataatttattattattcacagtacttacattaggaatgctagtagagcttatctgggcagttcttctgttccatatggggtgggctgggctgggarctacaagaagatgctacttacttgtcccacattgcatctctgaacttcaccatgtgtccttctttctccatgtggtgtttcatcatttagtattctggcccaagcttttttagagcgtggcatctggctttctacattcaaagtggaagctcttaaaggcctcttgaagaccttgaccagaactggcagagtgtcacccccaccatattccaccagccaaagcaggtcacaggcaggaccagattcagaaaaaggggcagagcatttacctcttgatggttggaatgacatgcaggtacagggtgggaaggaatggagggaagtcgtctttggatactattcaccactctcccttagcacgtacttggtatttcttttctgaagaccagaacacattgcttctttcaaacttgtttttattttaaagcataaattagaacatgagttgcacatatgcttacccacttggtcctttccttattgactaaagataga

SEQ ID NO: 15573 - DNA, 598 bp, Homo sapiens
gagaggtctctgaagtcacattgtgtgtgagcgtcttgattctcttcccttatgttgagttctttcccaggtattttaatgatccctcatgtaaatatgttctcaatggttctgtctcactagttcttcagaaacatagagttatacagatccaaggctataccctactatacccataacataactttgacaactgaaaaaggccaatgggctgttactcccacatttctgctgctgggtgtaaactattaagttccactcattctctaagtgataatgatttggtccctgcagtcagaggtcacaggactgtcacccagtggtatcttaccataaataaatccaaacattgatattaattaaagttgcaatattattttgtggcaggatgctatgggaggaatcagtttctgataccacctgaagagaataataaataaatggttctttttaaatatatgtcagataatgtcatacttctgcacaaaaccagccatttcccaattcactcagagacagactacaatgacctatatgatctcctgcctctgtccttatccctacctcactcagtgtaccagctgctrtgttcacagtg

SEQ ID NO: 15574 - DNA, 828 bp, Homo sapiens
tatatgaatatgaaaacttgttccaaatgggtaatccttagaaaaaggaagccatcagaacagagcatccatttacccatgtgatccagaggtttctcatctgagaggcaattctcaatcctgaagctactggatctattagcttctaagactgtcttcaggggccaaggccatgaattcatcttagagcagttctagtcatgtaggatttgaatgaaattgcactatccataaatcaacacacagccttggtgactactgtggtcgatttgactcagctgttccttaaatatatcgagtaggctcttaactgagggtctctgcacttgctatttcttcctcctggaatgctccatctcccagatatctgcattgttcacactttcacattctgcaaatatcgccttagcagtggcttctcttgctattcaaagagaaataggacccacccccacttttcacccccagcgctgtattccttgccccactctgattttctccatagcaatgattaccacctggtatactacaattcattatttgtgccccttcaacagaatgtaagctccatggaggtaagggctagatgagcaagactttggatattttattcactgctagacagggtccagaaaactgacaggcacaaataagatgctcaataatcgtacggattttagatggacgaataaagggacactgcttattgggagtcagccagtctgggaaaggtccttcaaagctrgggttcaattccccgacttcctctttcccacatcgggaaagcaaggaggaaggacgtgcgcccacaggtttgctgagcgcagg

SEQ ID NO: 15575 - DNA, 481 bp, Homo sapiens
taatagaaaacatcagaaaaaaacagcccatgaagaggaaattcctaaatataaaaggccaaaaacatttgaaaagatgctcaagatttaaattactttaaaagttacttttcaactatttaattaatacagatcaaaaagattgtagatgtccaatgagggtgttaaagtgcaggtccctagactgctgctgggaatataaataatctatctggaaggcaatttaaccatatttggccaaattaaaaccttggcttattaattcaatgtttagaaaattatctaacaaaaatgagcagaataatcacaatgtgattcagacatacaacagagtgctrtatttctgttctgagctcagatcatagactaggataggtggtaggctttagttctaaattcatcattttcttgtgagatattaagcaaggtgcattatctccctaaggctcacattcctcacctgtagagtgaggcccctcaa

SEQ ID NO: 15576 - DNA, 554 bp, Homo sapiens
atgaatgtagtaaatttaatttttctcctatcatcttcttttagttttaaataactagcaatagaaacagtgttctattatttattttatttctatctataatttacttgtatttatgtatgttctgataacaaatagcatacaacatacacatatcttaagacagtcaacatcaatattatggtcataaaatattaatctgtaatctccagtatccacactgcagtctagaaataccatttcccactaaatgaaacccagattctctctgtaaatggctaattccatgtctgtgataggcaatatctgagcccaaaggtcaaagtttattaggaccatgtcaaaatgactcagaagccatcttggagaggctcccwctggccaagaataaaacaattggagcattgataaaactaataactgcaaaagattgaagctcatcgactatgcataagttcttgaacttaaaatgatacttaaaaaacaaacagatttggaggtttatttactattctttctactttaacattttctattaacatttacagttcaag

SEQ ID NO: 15577 - DNA, 518 bp, Homo sapiens
tgtacgcatacaagtattcttttatgtgagttttggtgttactaatttagccacacagtatgacctaagcagcataggaattaagccttaaatatttcctaatcatctgtaaaatatttttctccattcccaatatattgtcttagttcaggccttcatcatctwtttttttttttttacctgaaactggtttcctgaggagtctccgtgcttctcacctgcctctaacctcttctttccccatatgtcacactactaccactgtaatctaccaaaaatgcaagtatgactgttagtgaatcccctgattaaatgtcttagcatctgtaggacagaatttaagatgcctagcatgatattcccgatttcctcgggagttgtctcctgctctaccccaagctgcgcttcaggtgacaggaactatatacacatgatagtgtttcttgtccactccatgctgagcctctacttctcctgggtcctcctcctagaatggcattctgtaggttctttcctgc

SEQ ID NO: 15578 - DNA, 518 bp, Homo sapiens
tgtacgcatacaagtattcttttatgtgagttttggtgttactaatttagccacacagtatgacctaagcagcataggaattaagccttaaatatttcctaatcatctgtaaaatatttttctccattcccaatatattgtcttagttcaggccttcatcatctatttttttttttttacctgaaactggtttcctgaggagtctccgtgcttctcacctgcctctaacctcttctttccccatatgtcacactactaccrctgtaatctaccaaaaatgcaagtatgactgttagtgaatcccctgattaaatgtcttagcatctgtaggacagaatttaagatgcctagcatgatattcccgatttcctcgggagttgtctcctgctctaccccaagctgcgcttcaggtgacaggaactatatacacatgatagtgtttcttgtccactccatgctgagcctctacttctcctgggtcctcctcctagaatggcattctgtaggttctttcctgc

SEQ ID NO: 15579 - DNA, 528 bp, Homo sapiens
gggttgttatatcttgcttgtctccttcattctgtttttttacacttctttttatatttttttctatgactttaacacttttaaagactgctggccagttatttttgagaaagttcctcaatttgggtctgtctggtgttttctcatgattggattgaggatgtacctgtttggccagaataccagtgaagtgctctgtcctcctcagtgcaccatatcaggaggtaactgatgtgtcttctcagcagtgatggttaagttkgtgtctgccccgtttctccactgtaaagttgctgtttccccctttgtagttggtaataataacacctgggaagattgtttgagattacacatttatcttgttttgcatcatccttttgcttataacttttggcatccattgacgattcttgtctcaaatgcagtaatttctaagtgaatgacttagaagtgaatattgtagaagaatcttggctcttcctgatcacttcttatttgaatttattttgtgaggcaaaggagcaaaca

SEQ ID NO: 15580 - DNA, 602 bp, Homo sapiens
agcaaaaatgcacaaatcttaagctgccttctttttcccctccaggatgaaggacaaccacatatttagctgacagtgattcaaactctcatctcgtccaaaactgacttaaatggcataactttaattaactctgatcttaaattatctgttgacagttttcacctagaatagagaaaattaaccttgttttggatattctcttatctctgaagactccatctgcctgggttgctgaatcaatttttgtaactggaactcacaatccagcctgaggcaaaaagtgaagagcatataagagagagaacatttatgtagatagtagacaagcactagaaattgtgcatgattctggaatgaagggctcttaggttcattttcgactcttagctgcaagtatagaaattamaaaggaagttaatgttttatctgactccttaagaaattataagttaatttaaacatatctactccagtgaaatagaaatgaaatctaaagttaattctcaggcatattgctttgcaagaaatgcttctcttcatagaaagctgcccaagtaaacaaaatactcccttactgtaaacatttattcctctttatg

SEQ ID NO: 15581 - DNA, 575 bp, Homo sapiens
aggacattacaattcaatgtaaataataaaaaaaaatctttcaccaaacaaaataagcccccaggatgaacctgctttgcagtcctcagatttgtaaacttctgcctcataacaagatacagctctctgcatgtactcttttgaaattttcacgaagtcaaagcttattagcaatgttttcacagtgatattatccaatatgtcacactgacataatcagaaatcatgtgttaggcctatttggcagaaatattcaggagttatttagtatgctcctataagaaaatattctacttctggctgagatgaattgacagaaacaagatatacactcttctaaccttaaagagtaaaatatggggaatcaaacaattttgataacattaaagatagaaaccaaataagttaatccttacgactgccctaattttttgctaagagcgattttccagkatgcagagaaaaatgaggaaaacaggtgaagcctggcacactctaaatttaggagatttgagaccccaaagagcctgtagttcacaggagaaaatactggtgtaacacaaacagagaactcc

SEQ ID NO: 15582 - DNA, 586 bp, Homo sapiens
ttgggacttagaactctatcatttcctgtttgcttgaaatgtaccaaattaaaaaggtgagtattcatttgacagaaagagtagtgctgggccttgctgcacatcagaatcaccatgggaacatgaacatattgagatccatcaaccctacgctatgcaatcctatcaggatttttgagatatggtaaaacttagaattaaaaaaaatgagatttctgctggatctaawctttggcactaatgacatatttgtgataggcttattttggccttatcctgtgttctttccttcagctcaatatcctacttgatatttggcatgctgtttaagaaacacaaaagatcatagaaacagccaaaggataatgcatatatataaaatccctttctcatattagaaattttatccccaattctgatggctttatctttgtccactttactttcgccatgtaattgcaaatgtatcattaacagtaaatagaacagatattgatattttatttttattgatgggtatgtgagacaaataaagattaaaattttatacattaattcaataactaattgttgaacacttattgta

SEQ ID NO: 15583 - DNA, 586 bp, Homo sapiens
ttgggacttagaactctatcatttcctgtttgcttgaaatgtaccaaattaaaaaggtgagtattcatttgacagaaagagtagtgctgggccttgctgcacatcagaatcaccatgggaacatgaacatattgagatccatcaaccctacgctatgcaatcctatcaggatttttgagatatggtaaaacttagaattaaaaaaaatgagatttctgctggatctaatctttggcactaatgacatatttgtgataggcttattttggccttatcctgtgttctttccttcagctcaatatcctacttgatatttggcatgctgtttaagaaacacaaaagatcatagaaacagccaaaggataatgcatatatataaaatccctttctcatattagaaattttatccccaattctgatggctttatctttgtccactttactttygccatgtaattgcaaatgtatcattaacagtaaatagaacagatattgatattttatttttattgatgggtatgtgagacaaataaagattaaaattttatacattaattcaataactaattgttgaacacttattgta

SEQ ID NO: 15584 - DNA, 586 bp, Homo sapiens
ttgggacttagaactctatcatttcctgtttgcttgaaatgtaccaaattaaaaaggtgagtattcatttgacagaaagagtagtgctgggccttgctgcacatcagaatcaccatgggaacatgaacatattgagatccatcaaccctacgctatgcaatcctatcaggatttttgagatatggtaaaacttagaattaaaaaaaatgagatttctgctggatctaatctttggcactaatgacatatttgtgataggcttattttggccttatcctgtgttctttccttcagctcaatatcctacttgatatttggcatgctgtttaagaaacacaaaagatcatagaaacagccaaaggataatgcatatatataaaatccctttctcatattagaaattttatccccaattctgatggctttatctttgtccactttactttcgccatgtaattgcaaatgtatcattaacagtaaatagaacagatattgatattttatttttattgaygggtatgtgagacaaataaagattaaaattttatacattaattcaataactaattgttgaacacttattgta

SEQ ID NO: 15585 - DNA, 1847 bp, Homo sapiens
ctgtaaaaatgaaaatatttcagaattgattaacaaatggtggaagttaaagttgtctcttcccgacctgcactttgttttctgtctcttgccttttctcacattttatttttccttcctatctcaacaatataccccacctgcagtgtgcccaatgtggacacatacctgcttttttcaggcactgttttggacaacatttccctactgagcattaaatcactttttcttaaatatgtactaaagatttccatggctgaaaagctagttccacatacattaataatccttgaagaattaaatcagatacaacctctacatcagcacaatatttcaaggtggtaagggagtgctactgctgggtttgtcttcacttaataactttattaatgatgtggatgagtgaacaaatatgaaaagaaaatttataggtattacatatgtagattctgcagaaacaaataggctggaaggtaatgactgtagaatgacctagagaggttaaaaaaagaaaatagtagtccaatattattccacttttaagtaaatgagaccattaagctctttaaaataaccagtagataaaaactcaaagcaatgatagctacatcaaaaagtgagggaagaggggaaattatatgttgcaatgttacagagtacattaaagcattcagtatatttcctgaaaatttcgtaagcacagttcttaatgtttattcataaataaacaaaaccaaaccaaaagccatagttcatttgtttctaactaagagtacaaattatttatgcggaaaagtacatataagctcacataaataacatgaataatgttttcattgtgaagatattcataacgttaaaatgacaaggtcttaggaactctgcaccttcattaattttaatcaatatttaacatcaagattgttttcaataaatcatgatctaataatgaaagggggaaactatttgttttaactttcatttcggttttaccctttactcacaagttgaaattcattctcactctttgcaaactattttgaaacatttccaggtaaaattcatataaatattttatttttcctaatttttggaaaaattttagactattacaatctgagttaatagcctagttcctttgttgatccagtgtaaataaatatttctcttttcttgctgtattaaaaaactcagtctctataaccaagtctatatctgtatcgatatctatctgtatctgtatctatctatgtgtatctctatcgatgtatgcatacacaaataatatctgtggaagaattttttttcgtgtagtgtaatatccacagctcttctactttaaccataactcaggttaataacattttattgtcttttgttagttttacctggaaaagaaagcacatcatatacaatattataaaatagaaataaaactaaatatagtgttttagaaggtaacaaagttttatgtttaaggatattaaataaaatctatttcttccagtatattttttcacaatctgtcttaaatggaatctgcagttatcttaacaagttgactactagattttgtagtgtattccaatcagttatctatctgaggccactctttttttaataatctaggcttctgtagacaatgtggaaacatttttaaaatgatgacgccctccttttccttmgtagctaaatcagtacacaaaattctaattatttccttagttttaataataataaagcaatataagattcaccctctgtattcaattctttgttaccaattctgctataattagaatttttgaaattcttagttataacctttatttttgataattgcattt

SEQ ID NO: 15586 - DNA, 549 bp, Homo sapiens
tgaaaagttgagagaagcaaacctaaatactcttctcttggtattcagaaatacttatgagtatgggtgtctataaccccaaagttttttggttttgtcttttgattgtttgtttgtttgttctgttaagtacctaagtaatgtgtttttaggaaaagaaacctagcaagaacattgtagacaaggctaggcaaagatgatctatccttcaggtgatgtgtctgtcctcaagatcacttacaaagaagaggattggactggaagttactacttcacaattttagttttgttttcacatctgttacttcaatmctgatgacaattctgaaatggatacaactactactatgtatccttctttcactagtgaggaaattgagatttggaattgagaagtgaagagctttgctggagtcacacaggtgggaagttgagagccaggacttcaacccagcaaatctcctaactccaggtagaaggttcttcatgctctaccactttaataagaatgctctagactttgttaatacattagattagtaagatagc

SEQ ID NO: 15587 - DNA, 539 bp, Homo sapiens
atttcctgaaaagaaaaaaaataaaactgacattactaattacagcaaacatcaaatagattaaaaagttaaataaaaataacttcaaaaataaaatataaattaatagttatataatcttgaaaaaggaaacataaaaacaaaaaagaaatcacataagggtagtatatgtgactccatcaaatttaaattttctgcagtcaaagaaaaaatacccaataatgaaactagaagtcaaacggcaaacaggaagaaaaaatttgaaatacatatgatgaaatacaatttgccttcaactttcaaaagttcttacaaatcactgggaggagkgtattacgccacagatagaccagaaaaaaaaataataaactaaggttttgaaaaggaaattcattttgaatgaccaataagtattttttaatgtcatcattataaaaaaaatgtgttcctaaacatgagtgatgcacaagcataaagtgcaattgtgtgtgtgtgtgtgtatgatgacaatgaaagggaaaccttgaaaataaattaac

SEQ ID NO: 15588 - DNA, 539 bp, Homo sapiens
atttcctgaaaagaaaaaaaataaaactgacattactaattacagcaaacatcaaatagattaaaaagttaaataaaaataacttcaaaaataaaatataaattaatagttatataatcttgaaaaaggaaacataaaaacaaaaaagaaatcacataagggtagtatatgtgactccatcaaatttaaattttctgcagtcaaagaaaaaatacccaataatgaaactagaagtcaaacggcaaacaggaagaaaaaatttgaaatacatatgatgaaatacaatttgccttcaactttcaaaagttcttacaaatcactgggaggagggtattacgccacagatagaccagraaaaaaaataataaactaaggttttgaaaaggaaattcattttgaatgaccaataagtattttttaatgtcatcattataaaaaaaatgtgttcctaaacatgagtgatgcacaagcataaagtgcaattgtgtgtgtgtgtgtgtatgatgacaatgaaagggaaaccttgaaaataaattaac

SEQ ID NO: 15589 - DNA, 492 bp, Homo sapiens
actttttcatttgaatccttttttatccattctcctctttgtttttcctctcctgctttccagttgggaaccaaattatctwttaaaggtcatattcacttccttaattcatttaggagctactccccctgtggataaatgccccgcaagataaatgtttggaatttacttcaaaaatgaaggcattaaggttctcctggcgttgaatttttttcaccctggttgctgagcaggggaggtacaattggcaagtttttggcagagggaagctatttggaatgtgctctgtattattagaaagcacttttgagggaaagtggggggctgtgacttaaatctcactagtaatttttctaagacacaccgctgatgcttttttaatgtttcgtttcataattcagttttttgtttcccttagggtgctgttgaagtatttcttccctatggctggggcttgatgaaagcgctttaaacctggggctgctgctgatc

SEQ ID NO: 15590 - DNA, 573 bp, Homo sapiens
ttttttttaaaacactaacatctatgaaaaaaaaacttaatatcttgatgtaacttggtttctcagctgaaaattgtatccttaattaaggctgccttgagatttaggccactaggtcattgaaaagggtaagcttcataactaaaagtgaaggaagagcctggatatgtggtcaacgatgtgcctcaagataaataacctatttcttatttttttctcaatttctgagactcttcttactgttggcaaagtcactgtagccccagaagcaaaagctgttgttgctccatctttcctggaatcaatgcttgcctttaattcccctttacagattcacctctaagaattttctttgaatgttcctgggatggatgaaatgaggggagtgaaraagatttgtactacttctaaagcagagtttacaattcaagctctgaagaagaaaaaataaataaacttaagtaaatgtaaacacaagttgaggcacattcaataatgaactctaactttgcatttaaaggaagaaagatctgcagataaatgaggtcaaaaatccctggggctgatggtaaa

SEQ ID NO: 15591 - DNA, 573 bp, Homo sapiens
ttttttttaaaacactaacatctatgaaaaaaaaacttaatatcttgatgtaacttggtttctcagctgaaaattgtatccttaattaaggctgccttgagatttaggccactaggtcattgaaaagggtaagcttcataactaaaagtgaaggaagagcctggatatgtggtcaacgatgtgcctcaagataaataacctatttcttatttttttctcaatttctgagactcttcttactgttggcaaagtcactgtagccccagaagcaaaagctgttgttgctccatctttcctggaatcaatgcttgcctttaattcccctttacagattcacctctaagaattttctttgaatgttcctgggatggatgaaatgaggggagtgaagaaratttgtactacttctaaagcagagtttacaattcaagctctgaagaagaaaaaataaataaacttaagtaaatgtaaacacaagttgaggcacattcaataatgaactctaactttgcatttaaaggaagaaagatctgcagataaatgaggtcaaaaatccctggggctgatggtaaa

SEQ ID NO: 15592 - DNA, 523 bp, Homo sapiens
gtgagtgaagggagaggggcaagatcctgaagcccttctggatggttgtggactgcaggttccaggctggattcctgctttccttctgcgtgtgttggctgctgtaccagcactcagctaagggggctgtcagagagtttggcatgcctgtgtgagcaggattcatgattttgctagaaggagaggctcttgctcatatttttccttctctggttagtcagggagtatgcactgagtattcactggttgctgaactagcgggtatgaagagagacaactaaatatgagcagaataaattctgctctcagagatcaagatgtgttgtgagcacagatgggcctcagccccattccagttctaatacrttatcggctttgtgtgtgaccatgggcaaataatcactctgtgcttcagtttgttttactataaaatgggacattacgagaaatgtgtgaaagttatatgtgagaaacatttagcacagaatctgatataaagtaagcactcaataaatattggtta

SEQ ID NO: 15593 - DNA, 549 bp, Homo sapiens
ccataagagatgcttctccctttgactgatgcctttagtacttaacagttagttgttctggcagtaaaatgtcaaattatgagcagtacctcatttattatttatgaatcatcatgaaaaaatggcaaaaaggtcaacacaagracaaatctcccaaactaaagtctgcatagcataacccttctgctcaaaatacaacaaactggtttcaaaaaaaaaaaaagaagaaaagaaaagaaactggcttcaaatgctaaatcaatggggaagtataaaatagcacagagagagtcaaaactaaatgaaggattgtttgtaaatctgcaaattcttaaaagattaggccattattaagttggctaattgttattcaaacaccttccccaggactagctacttttccgtaacatacttaatccacccaaagcagaatgtaaaaaaaaaaaaaattaaaattgtaggtgtctgtttttgtatggttaggaagcagataggaaaatacaaaaaatataattttgatacccaactcttgatttttaagttaaacac

SEQ ID NO: 15594 - DNA, 539 bp, Homo sapiens
aatccaaaatttaattggcaggaaggctgcaaatacatgttttctagatagcaataggaggctggaaaaaaaaaatgacctaaaaattggatctgatgagttagtaggccccaacccgagacttcatcccccactccttaagcagacttctggcagtctaagctccagccctctgtgtttccttcaggtgaatcaccatctgattcctgcaggttcaggaaatactcttccccagtcgacaaatctcacctactcttagttatgagtcatttacattagcaagagagcaagttgttccagtagtygcctggcaggagaatttgaaagggtgccccaaaggacaatctctaaaggggtaagggagatacctaccttgtctggtaggggagatgtttcgttttcatgctttaccagaaaatccacttccctgccgaccttagtttcaaagcttattcttaattagagacaagaaacctgtttcaacttgaagacaccgtatgaggtgaatggacagccagccaccacaatgaaaggtaaac

SEQ ID NO: 15595 - DNA, 570 bp, Homo sapiens
gactatgggtggaaacctgcttttatgagaactaagtaatagaagctcctccagccatttgctctttcttcaggtgtggaatggtactggcttggggtgagagactttgcttgagtttcatggtgtttttttttgttttgtttttttgtttgtttttgttgttgttgttttttgagacagagtctcgctctttgcccaggctggagtgcagtggcgcgatctcggctcactgcaagctccgcctcctgggttcacgccattttcctgcctcagyctcccaagtagctgggactacaggcacccgccaccacacctggcttattttttttgtatttttagtagagacggggtttcaccgtgttagccaggatggtctcgatctcctgacctcgtgatccacccgcctcagcctcccaaagtgctgggattacaggcgtgagccactgcgcccggccgtctttgtttttttgagacaggtcttgctctgtcacccaggccaaggtgcggtggcgcaatcatagctcactgcagccttgacttccccaggctcaagcaggcttcccacctcag

SEQ ID NO: 15596 - DNA, 570 bp, Homo sapiens
gactatgggtggaaacctgcttttatgagaactaagtaatagaagctcctccagccatttgctctttcttcaggtgtggaatggtactggcttggggtgagagactttgcttgagtttcatggtgtttttttttgttttgtttttttgtttgtttttgttgttgttgttttttgagacagagtctcgctctttgcccaggctggagtgcagtggcgcgatctcggctcactgcaagctccgcctcctgggttcacgccattttcctgcctcagcctcccaagtagctgggactacaggcacccgccaccacacctggctwattttttttgtatttttagtagagacggggtttcaccgtgttagccaggatggtctcgatctcctgacctcgtgatccacccgcctcagcctcccaaagtgctgggattacaggcgtgagccactgcgcccggccgtctttgtttttttgagacaggtcttgctctgtcacccaggccaaggtgcggtggcgcaatcatagctcactgcagccttgacttccccaggctcaagcaggcttcccacctcag

SEQ ID NO: 15597 - DNA, 532 bp, Homo sapiens
caggaaggcctccctgaggaagagaattgtattcagaaaatcaagtatcacccaaatttattttaccaatgttcagcattcaatcaaaaattacctatcacaccagacaataagaacagaatactaaaaagtaaagaaaaaatagataatagataaatgcccacaaatgaatcttatattaaaattatcaaatatggaatttaaaatatctgttattaatatagctaggaaaattaaatataagttgggcaaagcagcagaattttagaatctatataaaagaatcaaatgaaaattataaaaytaaattaacacatattagccatagctgaaacaaagattagcaaacttacagaatagttgaaaatatctccattaatgtataaagagaaaaagatagaatatgcaaaaagaacataatagaaatatgaggtatggcttaaaagctctaacatctgtgcagttagaacacaaagagctatatttgaaagattaaatattttcaaaaaattacaaaaagtactaaccttta

SEQ ID NO: 15598 - DNA, 661 bp, Homo sapiens
catctatattttaatcttttagctcatatctgttctkagttttagaagttttgatctgaggttttattttaaaatatctgcttgtttaagctgttcaattttagtttgtgtcctgtgttacaattatccctgctccatggatgttttcaggaggaacaatattcctaagcagaaaaaaatgtattgggtttttattttatattttatttttttcttttaacacttaccatgggtgttctcagttgctttctggcaatttaaaacgtaaaattgttcaggatcatcaattacatttatagatagacaggtatgagtggtttggatagttaactaaattttgtctgtttttgttttattttggttttggtttaccacatatttcttctatagtgaaatgaaagtttcaaattttggggacctttcttggagaaaattttaaagtgtcttctgattttgattgtcttttgtttctttgggatatttaatttcctttttttttcttttactcccaagcctaagaagggtttctccctcttctgtgttcccccttccacagaggttgagctttcagagagactgcttgttttactcctgcatactcccatgtctctttcttctgatagctcatagcctttgctctttcctatcaagttttctgtat

SEQ ID NO: 15599 - DNA, 534 bp, Homo sapiens
catagagctagaaacagatccatatgattaactgatcttccacagggtgacacaaacacataatggggaaagaacggtctgttyaatgagtagtattagaaaaactggatatccaccaacagaatgaaattagacctttatcacacatcttacacaaaataaactcaaaatggattacatatttaaacataagaccccaaatcataaagctcttagaagaaaacataggggaaaatcttgacattggtcttggcaaagatttttgtatatgaccccaaaggcaaaggcaatgaaagcaaaaatggacaagtgggattgcatcaaactaaaaacctctgtacagtgaagaaaacaatcaacagagtaaaaaggcaacctactgaatgggaggaaatattttcaaaccatacatatgataaagttggaggttaatgtccaaaatatgtagggaactcacacaactcagtaacaacagaacaaataacccagtcaacagtcaattatcctcaatcaaattgggaactccactgccaa

SEQ ID NO: 15600 - DNA, 534 bp, Homo sapiens
catagagctagaaacagatccatatgattaactgatcttccacagggtgacacaaacacataatggggaaagaacggtctgtttaatgagtagtattagaaaaactggatatccaccaacagaatgaaattagacctttatcacacatcttacacaaaataaactcaaaatggattacatatttaaacataagaccccaaatcataaagctcttagaagaaaacataggggaaaatcttgacattggtcttggcaaagatttttgtatatgaccccaaaggcaaaggcaatgaaagcaaaaatggacaagtgggattgcatcaaactaaaaacctctgtacagtgaagaaaacaatcaacagagtaaaaaggcaacctactgaatgggaggaaatattttcaaaccatacatatgataaagttggaggttaatgtccaaaatatgtagggaactcacacaactcagtaacaacagaacaaataacccagtcarcagtcaattatcctcaatcaaattgggaactccactgccaa

SEQ ID NO: 15601 - DNA, 494 bp, Homo sapiens
gactggtctgtctcagactggccctcttgttgttaggagtttaggcggtgtcaacaagatgtaggtgctgagaaaactgcctgactgctgttgatcttttacagataagatakccccaatctatgatgtctcttaatgaaatacaatgggtttagcactggaatttatagctcctttctgatgttctccatgtaatatacgtttctggggtataagttgtttaagcttctcatccataaaaaaaggtaagtatgctatttcatttatgagaaagaatatttttcccatgatcatcttgaagattttgtgcttgtggcaggagaaatgaggtttttaaaaatgtcaattttatgattcttcaaatagcatatttctctgaggtttccatttttagagtggaatgtgccatttaaacagaatagtctattttatggtgaaaaaattctgatgtcacagtgaaaaaaaaaagagcaataattcaatagtgtagtgtg

SEQ ID NO: 15602 - DNA, 494 bp, Homo sapiens
gactggtctgtctcagactggccctcttgttgttaggagtttaggcggtgtcaacaagatgtaggtgctgagaaaactgcctgactgctgttgatcttttacagataagatatccccaatctatgatgtctcttaatgaaatacaatgggtttagcactggaatttatagctcctttctgatgttctccatgtaatatacgtttctggsgtataagttgtttaagcttctcatccataaaaaaaggtaagtatgctatttcatttatgagaaagaatatttttcccatgatcatcttgaagattttgtgcttgtggcaggagaaatgaggtttttaaaaatgtcaattttatgattcttcaaatagcatatttctctgaggtttccatttttagagtggaatgtgccatttaaacagaatagtctattttatggtgaaaaaattctgatgtcacagtgaaaaaaaaaagagcaataattcaatagtgtagtgtg

SEQ ID NO: 15603 - DNA, 567 bp, Homo sapiens
tgccttggcctcccaaagtgctggrattacaggcgtgagccactgcctctgggcctcatccttcatttttgaggactgttcaggggaaataaccctccagcactcccaactcttcaaaggtgggccagcatccccagagagctcccacaggtggggagatacaggaagcgctgcttgcagggaaatgtctacaggtgatctcggggttagcctaaagagagaagcagggtgcccaccgcatgtgctgaagccccatggccacacttttcacattcaacaaatccttgtaggagtccctctgtgccaggccctgtcttgggcactgaagctgcagagacaagagaccaacacaagcctggccctcgtgacattacacttgggctgacccctctttctgcaccccattgagaaagaagaacggatcatgatgttctcacaatggcaacccatgttggttgagtgaagtgacatgaagcatttggaagctgaaagactcattttttttttagatgagactaacatggacctatgcctggcattttatttaacagatatgtgtataaggtt

SEQ ID NO: 15604 - DNA, 567 bp, Homo sapiens
tgccttggcctcccaaagtgctgggattacargcgtgagccactgcctctgggcctcatccttcatttttgaggactgttcaggggaaataaccctccagcactcccaactcttcaaaggtgggccagcatccccagagagctcccacaggtggggagatacaggaagcgctgcttgcagggaaatgtctacaggtgatctcggggttagcctaaagagagaagcagggtgcccaccgcatgtgctgaagccccatggccacacttttcacattcaacaaatccttgtaggagtccctctgtgccaggccctgtcttgggcactgaagctgcagagacaagagaccaacacaagcctggccctcgtgacattacacttgggctgacccctctttctgcaccccattgagaaagaagaacggatcatgatgttctcacaatggcaacccatgttggttgagtgaagtgacatgaagcatttggaagctgaaagactcattttttttttagatgagactaacatggacctatgcctggcattttatttaacagatatgtgtataaggtt

SEQ ID NO: 15605 - DNA, 567 bp, Homo sapiens
tgccttggcctcccaaagtgctgggattacaggcrtgagccactgcctctgggcctcatccttcatttttgaggactgttcaggggaaataaccctccagcactcccaactcttcaaaggtgggccagcatccccagagagctcccacaggtggggagatacaggaagcgctgcttgcagggaaatgtctacaggtgatctcggggttagcctaaagagagaagcagggtgcccaccgcatgtgctgaagccccatggccacacttttcacattcaacaaatccttgtaggagtccctctgtgccaggccctgtcttgggcactgaagctgcagagacaagagaccaacacaagcctggccctcgtgacattacacttgggctgacccctctttctgcaccccattgagaaagaagaacggatcatgatgttctcacaatggcaacccatgttggttgagtgaagtgacatgaagcatttggaagctgaaagactcattttttttttagatgagactaacatggacctatgcctggcattttatttaacagatatgtgtataaggtt

SEQ ID NO: 15606 - DNA, 567 bp, Homo sapiens
tgccttggcctcccaaagtgctgggattacaggcgtgagccactgcctctgggcctcatccttcatttttgaggactgttcaggggaaataaccctccagcactcccaactcttcaaaggtgggccagcatccccagagagctcccacaggtggggagatacaggaagcgctgcttgcagggaaatgtctacaggtgatctcggggttagcctaaagagagaagcagggtgcccaccgcatgtgctgaagccccatggccacacttttcacattcaacaaatccttgtaggagtccctctgtgccaggccctgtcttgggcactgaagctgcagagacaagagaccaacacaagcctggccctcgtgacattacacttgggctgacccctctttctgcaccccattgagaaagaagaayggatcatgatgttctcacaatggcaacccatgttggttgagtgaagtgacatgaagcatttggaagctgaaagactcattttttttttagatgagactaacatggacctatgcctggcattttatttaacagatatgtgtataaggtt

SEQ ID NO: 15607 - DNA, 516 bp, Homo sapiens
agcctcttaccattcacacttctatcttccatccttcttattcatctacccttccatccacccactcattcatgcttccctctcctaccacccatccaggcatgtatccagtccattcatttattcaattactcaaaatagtcttggaacccagtctgtgcaagacactgttggattctggagacccagaggtgactcagttaagatccctgtcctctaagagctgacagtctggtgggggagagagacatagtcaagaatgactccaagagaaaatgcaaatcatgaggaccttcaaagagatgyaaaccatagacagtagaagcaaaggagaggagtaaggcggaggagaaagaagaggaggaggagaaagggaggaagaaaaagaacaaggagaagggaggaagaaggagaaggagggggaggaaagggaggaagaggaggaagaggggaggaagaaggagaaagagaggaagaaggagaatgatcacacatatatatcacactcttagagga

SEQ ID NO: 15608 - DNA, 543 bp, Homo sapiens
acattaagtcacctaagcagtttgtgatcgagagcaaagattttggaaactggtttcctgggcacgtaaaagttctcagagtaccttaggaactgctgcagagaagggtggaacatggtgaggaggtgtcggccgcaggactctgagcccaatctctgcttttaaccaatcagtgtcagatgttgtgaccttacatctccagcttctacttgagttttcatgtggaagaggaagaggaggaagaagaagaagaagaaggggrggggaggagaagaaatgtgctgctaccaaaaaaagtccttaaaaattcaaatctaaacaaattgaagttgatgattaaggatgttttcatcacttcatgtgcgtgttcatgaagtgagacgcagctctgggtaattcagttttaactagaatattaaatacgttaataattaagatttggggcatgagttaaactatgctgtatgcttttcagcttaacctacatgtgcagatagatgcgtaccagctatggcagagcttaaacacttgttggatgtagtg

SEQ ID NO: 15609 - DNA, 542 bp, Homo sapiens
agctgcaagtgaggctctgagaagtttccagaagaatgatctgcagaatagaatggactgcatgactgtgtcccaggacagagccgtggacgatgcatgaaacattcagcaccatggagggaagatgagtatggaaatcaggagacagtctcacaatggaaacgaatgatgtgagcctgctaacgttgattgagaaattccaytgattgggcgagacaaggacggatgcctgaataaaggagctggcataatcggaggagcagaatgtactaggaaggtattagaaaagaaatctccagctctgtcagaaaacgtgctaagtcattctctctccatggccctttcatcaaattagcagacagcaaagaggtaatgaagccagaaaacatcaaaagctgcctgaaggaattgctggtgagtgtcaggaagccgctagagacaccaagaatgctccccaagattttacatctggaattaagtcattagttatttaactatgtcaaaggggctgaaggaaaaatctttgcttaagtataataata

SEQ ID NO: 15610 - DNA, 542 bp, Homo sapiens
agctgcaagtgaggctctgagaagtttccagaagaatgatctgcagaatagaatggactgcatgactgtgtcccaggacagagccgtggacgatgcatgaaacattcagcaccatggagggaagatgagtatggaaatcaggagacagtctcacaatggaaacgaatgatgtgagcctgctaacgttgattgagaaattccattgattgggcgagacaaggacggatgcctgaataaaggagctggcataatcggaggagcagaatgtactaggaaggtattagaaaagaaatctccagctctgtcagaaaacgtgctaagtcattctctctccatggccctttcatcaaatyagcagacagcaaagaggtaatgaagccagaaaacatcaaaagctgcctgaaggaattgctggtgagtgtcaggaagccgctagagacaccaagaatgctccccaagattttacatctggaattaagtcattagttatttaactatgtcaaaggggctgaaggaaaaatctttgcttaagtataataata

SEQ ID NO: 15611 - DNA, 542 bp, Homo sapiens
agctgcaagtgaggctctgagaagtttccagaagaatgatctgcagaatagaatggactgcatgactgtgtcccaggacagagccgtggacgatgcatgaaacattcagcaccatggagggaagatgagtatggaaatcaggagacagtctcacaatggaaacgaatgatgtgagcctgctaacgttgattgagaaattccattgattgggcgagacaaggacggatgcctgaataaaggagctggcataatcggaggagcagaatgtactaggaaggtattagaaaagaaatctccagctctgtcagaaaacgtgctaagtcattctctctccatggccctttcatcaaattagcagayagcaaagaggtaatgaagccagaaaacatcaaaagctgcctgaaggaattgctggtgagtgtcaggaagccgctagagacaccaagaatgctccccaagattttacatctggaattaagtcattagttatttaactatgtcaaaggggctgaaggaaaaatctttgcttaagtataataata

SEQ ID NO: 15612 - DNA, 542 bp, Homo sapiens
agctgcaagtgaggctctgagaagtttccagaagaatgatctgcagaatagaatggactgcatgactgtgtcccaggacagagccgtggacgatgcatgaaacattcagcaccatggagggaagatgagtatggaaatcaggagacagtctcacaatggaaacgaatgatgtgagcctgctaacgttgattgagaaattccattgattgggcgagacaaggacggatgcctgaataaaggagctggcataatcggaggagcagaatgtactaggaaggtattagaaaagaaatctccagctctgtcagaaaacgtgctaagtcattctctctccatggccctttcatcaaattagcagacagcaaagaggtaatgaagccagaaaacatcaaaagcygcctgaaggaattgctggtgagtgtcaggaagccgctagagacaccaagaatgctccccaagattttacatctggaattaagtcattagttatttaactatgtcaaaggggctgaaggaaaaatctttgcttaagtataataata

SEQ ID NO: 15613 - DNA, 610 bp, Homo sapiens
tccactgagacaatcaagcattgtatcataattttatcaatagatttgatattaagaataggatagcacagaatatttaattatcaagaccactttagatacatcaaaacagtaaaatctggctagctaaattcagtgaatttgaattagtaaatgtctatgtaacaggttcttttaaaaaaagttttgcttctttaatattttcaagaaagagaaagaatatttwaaaatgtatctactaaataaatgatcattactatactaagtattgatggtacaaatttgaatcaaatatggaaacttatttcctgggccttctagagtagaagagaagatgagtgaaatacaatgaatgaaataaaaatgacaaaggataaaagtgacatcagagaaagatagaaccagagaacttcatagaacactgttaaagtattaaacattaaaaaaggaaagaagtagtagtgaacatcaaagatactgattcaatcacagtatcattattaaggaagccaggagcaaaaaccattctgagatacaagaaagtgtatttaaattgtacccatttgagttgtgtcctgtatgtatatatgcatacatgtgtttgcatttg

SEQ ID NO: 15614 - DNA, 572 bp, Homo sapiens
tgccactgacttcacctggtgacagagcgagactccatcttaaaaaaaataaataaataaataaatawatatatatatatatatatatatatatatatatataaaggcttatactgttaatgatccatattttaattccagaatgaatctctttctattactgttatccaccctaaaatttagggtataaaccaactaatgttataataatattaacctaagaaaaatattttaaaggaaaatttgctataaaatatattacgtattaatacaatataggttatacatattgtacccaaagcaaaatgaaattgattttttaaaaattattatgagctgactatatccataccactcctataagacactaacacagataatcaaaacatgtcaaaattgctttggaggtaagagatttttcatttcccaatatcttctggtccttaggttattacttattattctaaactgcaaaaacagaaaccatcttattcatatgttttcactttcctttggcagatacattttattcttagagccagatatgtgacccatacatgatattcattctg

SEQ ID NO: 15615 - DNA, 478 bp, Homo sapiens
gtgtatttattttggtatgaccacagcagcaaacacaatgtctgcatcacaataggacaaggtgagagctaaaatttaatatgtatctgcatatgttagacttttatgtatatgccatcgtgcatctctacactcatcctctattagtattctcatttctgtcaatggggaaactgagtaagtcacctaagatcaagcagctggtaaataacagagccaagatttgaattcatgtctgtctgacttttttttttttaccatgtgatttaccaaccacactcagtacccaaaatattacttgtggaatgccattttcacagggttgtttatcacacctctaattaaacctacccttgagagggaaaaaactgyaactcagcaaaactgtaattcacaactagcctaatggccaagtggaatggtacatgccatggtcaatcacttagcacgtaagtagtgtgtgatgaagaggtaaaaa

SEQ ID NO: 15616 - DNA, 625 bp, Homo sapiens
agggtggaggaatctaggcctagaagggatttgtctaactcgctagagtgtgaatttgaaactaaatgcctaagcgtcactgtatgatttgccaaactaggaaactttgaagawtgagagttggtgctactaataattactctgggagaaaaggtataaactgagagtgtccaggccaaccgggatttatatttactttcagaattagagacacattggctgggcacggtggctcacacctgtaatcccagcactttgggaggccaaggtgggtggatcacgaagtcaggagatcgagaccatcctggctaacatggtgaaacactgtctctaataaaaatacaaaaaattagccaggtgtggtggggggcgcctgtagtcccagcagctcaggaggctgaggcaggagaatggcatgaacccgggaggtggagcttgcagtgggccgagatggtgccactgcactccagctgggcgacagagcgagcctccgtctcaaaaaaaaaaaaaaaaaaaagttagagacccattacagtattttaaggagagatgtggcacgatacgaattgccctttaggggaaacaaatttgaatcctattagaataatcaactggacagatacgg

SEQ ID NO: 15617 - DNA, 1007 bp, Homo sapiens
tgcaaggatgataaacattttaaaatccattattgagactgaaaaatgtagatcaaaaacaattaacttaagacatacagtaaatgtatttaattaaatacaataaacattcaaaataaagcttttttttaactataaagagcaaaactttttcttattgtaataaaaagtaaaaacttatgacaaactcaatatttaattatagaaagataaagtaatttttttaaagtaagtggcaagaacaaaatgttttctctcactatatgtttttagttcttttctgggtgtctaagacagcactgtgaagtaagaataaagaagaaaatattaaggacctgaacagtcgatatgtttgtatgcatggaaagccctagagaaactagagctaaatttctgaagttaataaaaatattagaatgttgatagttgtaaaatcaatatataaaaatggattgcattctaataaaccatcaacaaacagaaaacctaattatagaaagtgccatttamggccgggtgtggcggatcatgcctataatcccagcactttgggaggccgtggcgggcagatcatgaggtcaggagttcgagaccagcctggccaacaaggagaaaccccatctctactaaaaatacaaaaactagctgggcatggtggtgggagcctgtaatcccagctactcagggggctgaggcaggagaattgcttaaagctgggaggcggaggttgcagtgagctgagactgagccactgcactccagcctggactacacagcgagactccgtctcaaaaaaaaaaaaaaaattagaaaaaacagcaaagcgcacaccgttaaggattaaatttaacaatagtagtgcagtaactttatgggtaaatatatgaagcattattaatagtcatagaaaacaagctaactaaataaagagagacagcaggccataggtggaaagataggcaagtctgcaaatcagtagggaaatgctgacatacttaataaagagc

SEQ ID NO: 15618 - DNA, 2551 bp, Homo sapiens
tcacatggatcgtaatagacaacttcatcctgtttttctaaaaaggtattaatgattgtttaaaacatattttattatttgtaaaaatacattgaatttttttaaatgtaaggaaaataaagatcacttgtaatcccaccactgagaatcactattaacatataaaaaatctgtgtataaatgtaatatacatatacacatgtgtatatatacatgactatacacatgtatgtaagtagcatgtgtgtatatacatgtaagtagtatatgcatgtatatatacctgtatagacatatgtatatatacacatgcacacacacacacatactacttacatagctacacgtatcaatggagttctaaaagaacactttccatgggatggaaataaatttttaggccaggtgcggtggctcacgcctgtaatcccagcactttgggaggccaaggcaggctgcacacctgaggtcaggagttcaagaccagcctggccaacatggcaaaaccccatctctactaaaaatacaaaactagttgggcacagtggcgtgtgcctgtaatcccagctactcaggaggctgaggcaggagaacagcatgaacctgggaggcagaagttgcagtgagccgagatcgtgccactgcactccagcctgggcaacagagcaagactccatctccaaaaacaaaaaaaaaattaaaaaagataaattttaatggcagcatagtattctctaatttaagcaatccatgttgttaggctgttccaatgttccattattattcatttcactgtgatgaacatctctgtataaatctttgtgtatgctttttatcacttccttagcagataagtgtttaaggatcttgatacccattgccacactgccctccagaaaggcaacttatattctaccagcaatatattattaagatgccttagtgatatttaatcttgattacatattgattttttaaaagtcatgcttactgtaacaaattcaaacccacccgaagtacatcaaataaacagtgaaattctattgctccttccccaaaccttctgagtcattctcagaggaaaaacattatgaacaatttggcatgcatccttccagattaacttcttttttaatgtaatttttttcctaaatatgtaaaatgcttataacctgaaactactgaaaaaaattctgaatactcaggattaaactaaaagttcaggatctatgtgaagaaatttattaaacttggaggaactttaggaaaaaagatttaaataaatggagagagacataccatgttcttgggtaggaagattcaaaattgcaaagaccactattctccccaaagtaatctctaattttaagcaaaatcacaatcaaaattccaaagagttttttgttttgaacttgattctaaatttcatctgaaagaataaaggagtgaaaatagtcagaaaacttgtgaagtaatgtggggggtacttgccttaccagaccctaaaatgtgcctccaagacagttgtgggaacagtatggagccagtagcagaagccactcacgaaccaatggaggagaacaactcagaaacagaccaaagtcaatctaatgtttaactggagaaatgttaaacatttagggaaaatgtttttaaaatcagtgattgggactgtttaacaatttgagggaaaggttcaattcctaccacaatcaaaataaattccacctggactaaagaattaaatgttttmaaaaataacatcataaacatactgaaagaaaacataagtatatattgacataattttgggataggagactattgccagacataatactaaaagcagaagccataggggaaaaaaatcgataaacacgacttcataaaacttaaatatttctgaaaggcaagaaaacgcaaatgacaaggagagattatttgcaacatatgacagacaatagaggacattattcttaatgttgaaaggaaatattccaaagaaaaatggacaaagactatgaataggcatttcataaaataagtacaaatggcttgtaaacatacaaaattttgttcaataatcactcataattaaataaatgaaaattggaagactgccattttctctgtcaagtaagcaaaaatacaaaagaatggcatgagtctgggaaacatacacactcatattctgctgatgggagcgtcttttttcttttcttttttttttgagacagagtcttactctgtcgcccaggctggagtgcagtggtgccatctcagctcactgcaatctcaacctcccaggttcaagcgattctcccgcctcagtctcccaggtagctgggattgcaggcacccaccaccacgcccggctaatttttgtatttttagtagagacagggtttcaccacgttggccaagctggtcttgaactcctgacctcaagtgatctgcccccactcagcctcccaaagtgctgagattacaggcgtgacgaccacgcccagcctgggagcgtcattttaaatgtacgacctatctagagggc

SEQ ID NO: 15619 - DNA, 2551 bp, Homo sapiens
tcacatggatcgtaatagacaacttcatcctgtttttctaaaaaggtattaatgattgtttaaaacatattttattatttgtaaaaatacattgaatttttttaaatgtaaggaaaataaagatcacttgtaatcccaccactgagaatcactattaacatataaaaaatctgtgtataaatgtaatatacatatacacatgtgtatatatacatgactatacacatgtatgtaagtagcatgtgtgtatatacatgtaagtagtatatgcatgtatatatacctgtatagacatatgtatatatacacatgcacacacacacacatactacttacatagctacacgtatcaatggagttctaaaagaacactttccatgggatggaaataaatttttaggccaggtgcggtggctcacgcctgtaatcccagcactttgggaggccaaggcaggctgcacacctgaggtcaggagttcaagaccagcctggccaacatggcaaaaccccatctctactaaaaatacaaaactagttgggcacagtggcgtgtgcctgtaatcccagctactcaggaggctgaggcaggagaacagcatgaacctgggaggcagaagttgcagtgagccgagatcgtgccactgcactccagcctgggcaacagagcaagactccatctccaaaaacaaaaaaaaaattaaaaaagataaattttaatggcagcatagtattctctaatttaagcaatccatgttgttaggctgttccaatgttccattattattcatttcactgtgatgaacatctctgtataaatctttgtgtatgctttttatcacttccttagcagataagtgtttaaggatcttgatacccattgccacactgccctccagaaaggcaacttatattctaccagcaatatattattaagatgccttagtgatatttaatcttgattacatattgattttttaaaagtcatgcttactgtaacaaattcaaacccacccgaagtacatcaaataaacagtgaaattctattgctccttccccaaaccttctgagtcattctcagaggaaaaacattatgaacaatttggcatgcatccttccagattaacttcttttttaatgtaatttttttcctaaatatgtaaaatgcttataacctgaaactactgaaaaaaattctgaatactcaggattaaactaaaagttcaggatctatgtgaagaaatttattaaacttggaggaactttaggaaaaaagatttaaataaatggagagagacataccatgttcttgggtaggaagattcaaaattgcaaagaccactattctccccaaagtaatctctaattttaagcaaaatcacaatcaaaattccaaagagttttttgttttgaacttgattctaaatttcatctgaaagaataaaggagtgaaaatagtcagaaaacttgtgaagtaatgtggggggtacttgccttaccagaccctaaaatgtgcctccaagacagttgtgggaacagtatggagccagtagcagaagccactcacgaaccaatggaggagaacaactcagaaacagaccaaagtcaatctaatgtttaactggagaaatgttaaacatttagggaaaatgtttttaaaatcagtgattgggactgtttaacaatttgagggaaaggttcaattcctaccacaatcaaaataaattccacctggactaaagaattaaatgttttcaaaaataacatcataaacatactgaaagaaaacataagtatatattgacataattttgggataggagactattgccagacataatactaaaagcagaagccataggggaaaaaaatcgataaacacgacttcataaaacttaaatatttctgaaaggcaagaaaacgcaaatgacaaggagagattatttgcaacatatgacagacaatagaggacattattcttaatgttgaaaggaaatattccaaagaaaaatggacaaagactatgaataggcatttcataaaataagtacaaatggcttgtaaacatacaaaattttgttcaataatcactcayaattaaataaatgaaaattggaagactgccattttctctgtcaagtaagcaaaaatacaaaagaatggcatgagtctgggaaacatacacactcatattctgctgatgggagcgtcttttttcttttcttttttttttgagacagagtcttactctgtcgcccaggctggagtgcagtggtgccatctcagctcactgcaatctcaacctcccaggttcaagcgattctcccgcctcagtctcccaggtagctgggattgcaggcacccaccaccacgcccggctaatttttgtatttttagtagagacagggtttcaccacgttggccaagctggtcttgaactcctgacctcaagtgatctgcccccactcagcctcccaaagtgctgagattacaggcgtgacgaccacgcccagcctgggagcgtcattttaaatgtacgacctatctagagggc

SEQ ID NO: 15620 - DNA, 2551 bp, Homo sapiens
tcacatggatcgtaatagacaacttcatcctgtttttctaaaaaggtattaatgattgtttaaaacatattttattatttgtaaaaatacattgaatttttttaaatgtaaggaaaataaagatcacttgtaatcccaccactgagaatcactattaacatataaaaaatctgtgtataaatgtaatatacatatacacatgtgtatatatacatgactatacacatgtatgtaagtagcatgtgtgtatatacatgtaagtagtatatgcatgtatatatacctgtatagacatatgtatatatacacatgcacacacacacacatactacttacatagctacacgtatcaatggagttctaaaagaacactttccatgggatggaaataaatttttaggccaggtgcggtggctcacgcctgtaatcccagcactttgggaggccaaggcaggctgcacacctgaggtcaggagttcaagaccagcctggccaacatggcaaaaccccatctctactaaaaatacaaaactagttgggcacagtggcgtgtgcctgtaatcccagctactcaggaggctgaggcaggagaacagcatgaacctgggaggcagaagttgcagtgagccgagatcgtgccactgcactccagcctgggcaacagagcaagactccatctccaaaaacaaaaaaaaaattaaaaaagataaattttaatggcagcatagtattctctaatttaagcaatccatgttgttaggctgttccaatgttccattattattcatttcactgtgatgaacatctctgtataaatctttgtgtatgctttttatcacttccttagcagataagtgtttaaggatcttgatacccattgccacactgccctccagaaaggcaacttatattctaccagcaatatattattaagatgccttagtgatatttaatcttgattacatattgattttttaaaagtcatgcttactgtaacaaattcaaacccacccgaagtacatcaaataaacagtgaaattctattgctccttccccaaaccttctgagtcattctcagaggaaaaacattatgaacaatttggcatgcatccttccagattaacttcttttttaatgtaatttttttcctaaatatgtaaaatgcttataacctgaaactactgaaaaaaattctgaatactcaggattaaactaaaagttcaggatctatgtgaagaaatttattaaacttggaggaactttaggaaaaaagatttaaataaatggagagagacataccatgttcttgggtaggaagattcaaaattgcaaagaccactattctccccaaagtaatctctaattttaagcaaaatcacaatcaaaattccaaagagttttttgttttgaacttgattctaaatttcatctgaaagaataaaggagtgaaaatagtcagaaaacttgtgaagtaatgtggggggtacttgccttaccagaccctaaaatgtgcctccaagacagttgtgggaacagtatggagccagtagcagaagccactcacgaaccaatggaggagaacaactcagaaacagaccaaagtcaatctaatgtttaactggagaaatgttaaacatttagggaaaatgtttttaaaatcagtgattgggactgtttaacaatttgagggaaaggttcaattcctaccacaatcaaaataaattccacctggactaaagaattaaatgttttcaaaaataacatcataaacatactgaaagaaaacataagtatatattgacataattttgggataggagactattgccagacataatactaaaagcagaagccataggggaaaaaaatcgataaacacgacttcataaaacttaaatatttctgaaaggcaagaaaacgcaaatgacaaggagagattatttgcaacatatgacagacaatagaggacattattcttaatgttgaaaggaaatattccaaagaaaaatggacaaagactatgaataggcatttcataaaataagtacaaatggcttgtaaacatacaaaattttgttcaataatcactcataattaaataaatgaaaattggaagactgccattttctctgtcaagtaagcaaaaatrcaaaagaatggcatgagtctgggaaacatacacactcatattctgctgatgggagcgtcttttttcttttcttttttttttgagacagagtcttactctgtcgcccaggctggagtgcagtggtgccatctcagctcactgcaatctcaacctcccaggttcaagcgattctcccgcctcagtctcccaggtagctgggattgcaggcacccaccaccacgcccggctaatttttgtatttttagtagagacagggtttcaccacgttggccaagctggtcttgaactcctgacctcaagtgatctgcccccactcagcctcccaaagtgctgagattacaggcgtgacgaccacgcccagcctgggagcgtcattttaaatgtacgacctatctagagggc

SEQ ID NO: 15621 - DNA, 630 bp, Homo sapiens
aaagctgtatcatggaaccagtaaaataaccaaggagaggttgattaaagttctgtttataaccctagaagattcctgccctagggatatgggatggctgaacgtaggacaccgacactggacagatgaaatagcagtttattagtcacgcatgctcacagccctggggtgggggacaccgcatgccacacgggggctgcacttgggaacagagygaaccacgaggggctgtgggaggcacattttgtagtaacaggagggtgagatgaccttgcttccatgggaagatgtgactggcttgtttgaataactctgggccggcagggatgagcaggctggggtcgggtttccgcgataaggaggttgtttggctttgggatcttatccgtgagagcagagctcaggggagaccttgtggttaggctatttgaggccttcttgattttaccaatgtcaaggcagcacgtaatatttagtcttaatttcaggccacacgagaaattcttctgtatctactttccgtggcacttttcaaaaggttttgtccttagtgtttagcagttgattatgatgtgcctcgtcatggcttcctttggatttatcttgtgtgggctttgtgcagattcttca

SEQ ID NO: 15622 - DNA, 630 bp, Homo sapiens
aaagctgtatcatggaaccagtaaaataaccaaggagaggttgattaaagttctgtttataaccctagaagattcctgccctagggatatgggatggctgaacgtaggacaccgacactggacagatgaaatagcagtttattagtcacgcatgctcacagccctggggtgggggacaccgcatgccacacgggggctgcacttgggaacagagcgaaccacgaggggctgtgggaggcacattttgtagtaacaggagggtgagatgaccttgcttccatgggaagatgtgactggcttgtttgaataactctgggccggcagggatgagcaggctggggtcgggtttccrcgataaggaggttgtttggctttgggatcttatccgtgagagcagagctcaggggagaccttgtggttaggctatttgaggccttcttgattttaccaatgtcaaggcagcacgtaatatttagtcttaatttcaggccacacgagaaattcttctgtatctactttccgtggcacttttcaaaaggttttgtccttagtgtttagcagttgattatgatgtgcctcgtcatggcttcctttggatttatcttgtgtgggctttgtgcagattcttca

SEQ ID NO: 15623 - DNA, 627 bp, Homo sapiens
agtttctcagttaagaaatgtactaggaagtagatggaatatcattttggaagacatcctttaaataatttgttgtattggtttcttttttttttttttttgagatggagtctcgctctgtcacccaggctggagtgcagtggcatgatctcagcacactgcaagctctgcctcccaggttcacaccattctcctgcctcagcctcccgagtagctgggaatacaggcgcctgccatcakgctcagctaattttttgtatttttagtagagacgaggtttcaccgtgttagccaggatggtgtcgatatcctgacctcctgatccacccgccatggcttcccaaagtgctgggattacaggcatgagccaccacgcccggccaatatattggtttctttatgaaaattatactggatctgttacaggtatgattgatgtattttatttttaagttgtcaagcattcagttaatcatgtgtgttgtaacttttcggggagggacatttgcagaggctaacggtatgacattctgaaaagcggtgacagattaaaaaatttttaattctgcagatgatagtgtcgaaccaagtgggacaaagaaagatctgaatgacaaagagaaaaaa

SEQ ID NO: 15624 - DNA, 545 bp, Homo sapiens
gcgcacctgtaatcccagctactgggaaggctgaggcaagaaaatcgcttgaacccaagaggcagaggttgcagtgagccgagatcatgccattgcactccagcctgggtgacaagaacaaaacacactgtctcaaaacatwaaattaaattaaattaaattaaaatgcatttaatacacctaagctaacatcatagcttagcctagcttaccttaaacattctcagaaaatttacattcaccttccattgggcaaaaattatctctcacaaacccactttaaagtgttgaatatctcatgtaatttattgaatactgaagtatggtttctgctgaatgcatatcactttcacaccatcataaagtcaaaaaattataagtcaaaccattgtatgtcagggatcatctgtccattagaaatagtacttctgagtaaaacgaggacaaactcctttggtcttcatgtcctcagaatcactttcataatcatctcttggtttacaaggtgcatcttttattggttaaaaaaattaatacaatttatt

SEQ ID NO: 15625 - DNA, 285 bp, Homo sapiens
agttcaacatatttagccacacatccagtttagtgggccaatcagtgcacacatgtaatgggattgtttgatcactcaaaaattgcattggtcatttttataattattccttatttttttaattctgcctctatttattgccattatatcactgaaacaggagcttggcmtcagttctaacactgcttgacaaaaaagtaatgttttaacataaatctacatccagggaggtaagaaaactggcttgcaggacctggaagaattttctggtgtagagtagccccc

SEQ ID NO: 15626 - DNA, 562 bp, Homo sapiens
tgagagtttagctgcccctttctctagggaaccttcccgaagacccagaaaacagagtcgaccacacccttttctgtgtcatgccctattaaagtcttccttaccccagattgtaaatgcatgtttggattaacgtctccccaacttgtctttgagccttttgagagtagttactgagtttgtttggtttttctggtgttctcatgttagcaccccaacacaaggtctggtacagagtaggtgctgagaagatgcttgtattttgttttgtggggtttttcggtgggcgggggttgcctactacaactgctagcagcagatgcttgttgaatgaataaatggatggatggatgggtggatgggtggatggatggatggatgaaygatggatgatgaatgaatgaatgattaaataaataaataaatcccaactaactaagaggattttaatgaacctgggtagaaaggacactccgttaccaatcaagcgagctggatgtcagccaaagtgacttcctggaggaggagcaaatgtcccctgaatgatggatgcgtttttgcc

SEQ ID NO: 15627 - DNA, 562 bp, Homo sapiens
tgagagtttagctgcccctttctctagggaaccttcccgaagacccagaaaacagagtcgaccacacccttttctgtgtcatgccctattaaagtcttccttaccccagattgtaaatgcatgtttggattaacgtctccccaacttgtctttgagccttttgagagtagttactgagtttgtttggtttttctggtgttctcatgttagcaccccaacacaaggtctggtacagagtaggtgctgagaagatgcttgtattttgttttgtggggtttttcggtgggcgggggttgcctactacaactgctagcagcagatgcttgttgaatgaataaatggatggatggatgggtggatgggtggatggatggatggatgaatgatggatgatgaatgaatgaatgattaaataaataaataaatcccaactaactaagaggattttaatgaacctgggtagaaaggacactccgttaccaatcaagcgagctggatgtcagccaaagtgacttcctggaggaggagcaaatgkcccctgaatgatggatgcgtttttgcc

SEQ ID NO: 15628 - DNA, 546 bp, Homo sapiens
atggtattagaaagataaatgagattcagattctgaagatccatgatagccagttaaaggagtctggactttatcctgtaggctctggggaaccatttaagaatgttaagtagggtaatcttcatgctccattactgatacatcatcacatgtcagttacttttcctgttagaggaaatgttaagawtatcagcctgatttctgtatgaggtgaatgaaagcaaaagttttgaccacatagtcaagtagcagccagcagcagactaaattgagttggagatccactgaactgtcttccaagaaaaatggagtttgtggttgcccaacacttagaggcaaatgttggactgattgcaaaagcattgaccaaccacaatgtgctgtacacttcatgtgactaccttctaaacattttaaatttgataaatttactccatgggagtttgatgtagaattccagatgcagaggatgctaacttttgtttacctgaaagtgtaaaaatccagattattagtaatgtgtttgacttgtgttaattttacctt

SEQ ID NO: 15629 - DNA, 525 bp, Homo sapiens
tggataatgattataataagaaacaggctcagggaaacaggtaatttctaatattataatggaagttaaaatggataagaagatgctttgtaacataatcttatgaaatattaagttattaaatgaggtacacctctagtcaatttaaaaggttcttgaaaacaaaaaataaacatgaatcaattttctaagaatataataaaataaagtagatttaatgttaaattgccaccaacttaatcttccattaattattcagaatgagtttgcagggccacatgtttattatgaaaatcattctttctgtaaacattatacaggttttaggagactagcctgttccaactcaraaacgtgatcagaaattttgttttattccagcctggccaacatggtgtaaccctgtctctactaaaaatacaaaaaaaaaaaaaaatgatccgggcatggtggcgcatgcctgtaatcccagctacttgggagactgaggcacaagaatcacttgaacttgggaggcagaggttg

SEQ ID NO: 15630 - DNA, 522 bp, Homo sapiens
tcagcttcccaaagtgcgaggattacaggtgtgagccaccgcacctggctgcctatttcttattattactagctaaagacatgtgaccytttatagcactttctcatttcatcaggctgagtaaagtgagcccaattagccagaacaaaatgtggtgggttcctccctgctctgtgagtatcatgcctcacactcacacttaacgctgtctgtccctctctggggcagacagcataacataggaaagccaccttctgtcacatacccttttaattcttgctcatagcaggcacaaaatgaaaaggcaagaccagccaccacaaaaggaatcttacctgagctaggttttcaatcccacccaagctatggagtatttcctaataaaataaaagcaacaaaacacatgtaaatgatgagggtggagggggaagtatattttacatgcaatttctttactaagttgtcatatttataattatattgtgaaggtctacattctaatataaatacggaaaacttaca

SEQ ID NO: 15631 - DNA, 598 bp, Homo sapiens
agtagtagctaatacactactactattcttggctaacaagccagctcaaagctttgatggttttccattacctgatgatggtgatgatggtttccacttcctgaacactcacacccctgggctaggcacttaacccaaatccaaggtcagcgttattgtttggrggtgggggagacacctcctgctctgactcgtgtgtttgggttcccgtattttcaccagagggtgttagtcctgcccaagttcagctggtcctcaaagcgtatatagctctttaaccctcagcaagtgtcagtcagaacataatcttgatttcagctgctactaaatatctaccaggagcctgcttgagagagagaattgcctgacaggtgctgagtccaccattcctgagatactttgaaatcagtgtctggcttaacccaagctgtgtatggggaccctctcaccgtggtcccaatggagtcgcttttgttaggcgcccccctttaccttgggctctgagcttcctctgcctttcatctctgcaggatgaagccccacccgccgtacaggatgcaaagccctcctctataaagtgcatgcggggccagatgca

SEQ ID NO: 15632 - DNA, 598 bp, Homo sapiens
agtagtagctaatacactactactattcttggctaacaagccagctcaaagctttgatggttttccattacctgatgatggtgatgatggtttccacttcctgaacactcacacccctgggctaggcacttaacccaaatccaaggtcagcgttattgtttgggggtgggggagacacctcctgctctgactcgtgtgtttgggttcccgtattttcaccagagggtgttagtcctgcccaagttcagctggtcctcaaagcgtatatagctctttaaccctcagcaagtgtcagtcagaacataatcttgatttcagctgctactaaatatctaccaggagcctgcttgagagagagaattgcctgacaggtgctgagtccaccattcctgagatactttgaaatcagtgtctggcttaacccaagctgtgtatggggaccctctcaccgtggtcccaatggagtcgcttttgttaggcgcccccctttaccttgggctctgagcttcctctgcctttcatctctgcaggatgaagccccacccgccstacaggatgcaaagccctcctctataaagtgcatgcggggccagatgca

SEQ ID NO: 15633 - DNA, 555 bp, Homo sapiens
tcccttttggttggaaacataaaaaattcttgaagtaaaatttgtccttctcccatgataacttgggtcactttaccagacagcttagagawtggcagataacagcctcccaggtcagggactacctaatacaccaggcagcaggaaccagtctcagccagcagccctgggctggactgtttgggggaaacaggtgagtggtttattcctgagacttggtacaggggccctggagaaggggtgaggaataaaataggaggctggtatccttaattccagtcaccaggacccctggtggattaaaagcatgcctgcacccacactctgacctaaggcaggcagtgagggcttgagtgcaaggtcttagcagaaggctctcacagtcccgacatttctgcctactgtgctcaagactacaaggaaattccgaggccgcctgaggagacctgccaagagtgtgtacctggcttaccggaggcagaaagggttgagattgggttcaaattctagctctgcctctgccgactcgtaactttagtgtgtgccttaccctct

SEQ ID NO: 15634 - DNA, 555 bp, Homo sapiens
tcccttttggttggaaacataaaaaattcttgaagtaaaatttgtccttctcccatgataacttgggtcactttaccagacagcttagagaatggcagataacagcctcccaggtcagggactacctaatacaccaggcagcaggaaccagtctcagccagcagccctgggctggactgtttgggggaaacaggtgagtggtttattcctgagacttggtacaggggccctggagaaggggtgaggaataaaataggaggctggtatccttaattccagtcaccaggacccctggtggattaaaagcatgcctgcacccacactctgacctaaggcaggcagtgagggcttgagtgcaaggtcttagcagaaggctctcacagtcccgacatttctgcctactgtgctcaagactacaaggaaattccgaggccgcctgaggagacctgccaagagtgtgtacctggcttaccggaggcagaaagggttgrgattgggttcaaattctagctctgcctctgccgactcgtaactttagtgtgtgccttaccctct

SEQ ID NO: 15635 - DNA, 534 bp, Homo sapiens
tgcttttatatccatgtatttttatgtaaatatttctaaaaattctgagaaaaaatgtacttctgaggtggggagtgagatgacatctttgatttaataatcatatagcaatatggcaatatattattcagttttttttttcttggagtcttgctgttgcacaggctggagtacagtggcacgatatcagctcactgtaacctccgtctcccgggtgcaggcaattctcctgtctcggcctcccgagtagctgggacaacaggcacccactaccatgcctggctaattttttgtatttttagtagagacggggtttcaccatatcagtcaggcttgtctcgaactcctgacctcaggtgatccacctgcctcggcttcccaaagtgcagggattataggcgtgagccgccgcccctggccgaattcagggttttttgttgttgttgttgtttttgttttttactgcattattttttatttttgagacacagtctccctytgtcacccaagctggagtgcagtggtgtgatcttg

SEQ ID NO: 15636 - DNA, 540 bp, Homo sapiens
cttttgtgttttctcctgtattgtttcctaagaaatcttcacctaattgtagttcaaaaagattttctcatgttttaccagaaattttatagtttttggttttaaatttaggtctaatgttacatgtgaggttaatttttgtttaaattgctctgtaaggatcaacrttcactttttaaaaaaatacaagcatctcttctcaaattttaaagagtaaaatatagaactgagacctttcctttcttgccacaaggtgagttacaattatttcgatcatagatttgatggaattttgtggtatattcacttaaaaatatattctgattattttcctgtatctataatcacatggatacttacatctttgtcttttgtaaatcatggataattttcatacttaatcatttagaaaaaatataaacaaaccaaaggaaaaaataaaacagaaaaaggcagctgtaagaagaggattaagaaggaatgtcctccaaatatactgtaattcattccagaatcacggagattcagaatacactgtgt

SEQ ID NO: 15637 - DNA, 569 bp, Homo sapiens
caacccaccgtctctgctttcatctctttttgtatatttgttcattgtctatcttcttttcaggaatatgagcttcatgaggatttactttgtttgtttctgtttacagcatttagaacagcctggcattgagtaatttgtcagttttgttgattatgttgctgctctgttaaatgaaatagatgtataccttatgacccagtaggtgtcccacagaacccaagcaccacacaaggaaaaaatgttraataaacaaaagaggtgacactcagtgtataagtgatagaggagtggcatagtaaataatgtcccacccaaaagggaaaggaccctatgctgtccttgagtagttaactcaaaattaagcatcttaagagatggacttccatgaaccaagttttagtcaccttcactcttcttaactgtaccaggttttaagagaaataaaactggaaaagcaagtctcaaaggaaagcaggatagaatcaagatttatctaatctgttcacagactgagaaagatagcttctcaaagtaaaaccaggtggataaagctacatagaggaaaa

SEQ ID NO: 15638 - DNA, 533 bp, Homo sapiens
tgacaacactccacgatagacaaccaggagtaaaattgggaatgatgaagtgttactttgcagtgcttgccactttgaactttttatttggtctcctacagcctactcttctgtctctttcccttcccatctcatcttttatcctcttgtatcactttttaacagttcatcacaaagggaaagtaagaattggatggcctccctctcattttgtaacacattggactaaaagtggatctttgagagtaatcatttccagaaaggacttgcattgtgtgccagtaaattgactattacctccaaatacatgagcatgtaggggcattgtgtgttgggttgggargggtgttatttttttttttctcttgccaagacacagtgctgttttcctgtgctcctggtctttattttgggagaaccacatcttctatctgatgaaacattttaataaaatcagaagccaacatgccttctattctaagttctctctctcactttcctcttaagctccaggtcattatgtaaaaatcaaa

SEQ ID NO: 15639 - DNA, 1130 bp, Homo sapiens
  misc_feature (1)...(1130): n = A,T,C or G
agaaggcagctcttggtgaggccagcactggtactcatcccctgaattgggcggggtttaaaataggtttcgtagggtgaggccttgggcctggcttgggggtaggcacagacctaccccaagccggagcatgatcagatgctggggacttgcagggactctgatcttgctgtggtttcatcaaggccaccagcaccatcatgcaggtctcctctgctccccaatgctgctgggtctcagcagatgtcagctnnnnnnnnnnnnnnnnnnnnnnnnnnnnnnnnnnnnnnnnnnnnnnnnnnnnnnnnnnnnnnnnnnnnnnnnnnnnnnnnnnnnnnnnnnnnnnnnnnnnacttccttgttcttacaaacctaaggaagagtgggctcctgggattaactcggcgtcacgaaaccctggccctgagggacggacctctcagcctgggtcaggccaaggacatctgagtggccccaccgcgaactcctgtgagcccctggagcgagcagtggcctcgagtctgtgcccacctcctttcacgcccctcttccctggctggccatcttggcatccctcctcccctgccactctatcttggcctcctgggccggctcccaccccccggttcccatgcttcctccccgcagagagggacccagaggtgccaccaccttggggtgaccaagtcccagtgctatgttcggccccagggctccttcacttcactcacrggcgcctttccctgcagctcacacaggcacaaagtaacacacgtgcccgcacactcgtgtatacacgcacacaggcacacactactgctcacatgcacataagtgcaatgtgtcctcacatgaacatgagtgcaatgggaacactcttacacaccagttcacagacacccacatgcacacactccaccacacatgcatacacacagacaggtacacactcctccagggctcttgggaatagtcctctgttttgtcaccaagctcccaggaaagctgcccctccctgctggctccagggcctgtcaccagccatccagctcttgcctggagtgagtcctccctcctcagggtgagtccttcctccttggggtgagttcccctcctggggtgagtcctcc

SEQ ID NO: 15640 - DNA, 758 bp, Homo sapiens
agtttgaaagggagggttccctatgaataagaagcacacttgaaagaacagccatctggtctaacctctcactggtgcttcagaggaggaaaaaaggtcacaggtgaagatcccagttttccttgctcaggaaatattaactgtactccctagaatgcacaagatttgcaaagactaggtgatagtagaaggtttggacgaactttcagaaggttgaggtgaattcagctgagaagaacaggcaaggacttaggaaatattccttatttgaaggggcctgaaagtgtggtctggggtacaggagtgacctgtcatacttgagaggattaaaatactctccaaacacagtcccattccttcaatcttagctcgttttttcgcgtctaagatatattaaacctagtcyatccccaaatttagcattagattgcgaagttctattgattgtatttgatttgtaatttatgattttctccccctacataattttgttaaaaacacagaagtgaattctgttcacttaggtgtaacagttaatacttgctgtttaaggaactaattaaaccttactggcttataaaaaacaatcaccattttatttgtatgaagttctatggatctgcattttggtgtggtggattcatctgggtagttgatatatttgtgttgcctggattacaaaaaggccttaggcacctggtgcgttgactgagcctggttggtttaagatagtttccttcacaatctggtggtttgtg

SEQ ID NO: 15641 - DNA, 1322 bp, Homo sapiens
actgtaagtgtaatatgaagatacacagcccttttaagcatttcattatattacatctagcttacctctaagggatttattcagatgtgactgaagaaagtctaaagggaaaaaaagcaatttaatttgataaattaaattatcaattatagccaaattatttggctataacaaattaaacattttaagcagacagaagatgcaaacattttaagttgacagaagatataaaatgttcactatcaaaatgtcgcaactgataaaaatgttctcaaatatttctgtctcaaacttgcattgttcattaaggaagcaaaataggtgggacatacacagcaacaacatccctcaaaaaacaccttggctcattcctataagccaggcagcaaatacatcatccttacatatgttaattaccttccaatttcaaattctcaactgtgaaataaaggrccattttatttggctgcttctagttcaatatgactgtttttattaaaacatctctaacttgaaaaatatttggtgttttctaaaaaactgcaaattgccacaaatggccagataatttggaataaacaccctacagaaaaaaatatatattcaagttgcataagtcactttgagcaatcctttgaggatatttcatttatatctaaatgaaccacaggtttagctggcttttccggaaaaccagaagcaaataatgtatgattataatgaaaaccatctcaagtaattttgaaatgaagtaccacatgtcttatgctgtcccttccatgcacttgacaaaacagcctataacaaattgtttactttgagatttaacgggaaaattccatgaggtttaaaagagatgactactaataagccatctacctttgactctattccaattaaaaatgggttaggaaagtgctttgaaaatcaagtgtgttcatcagggaatcatttacctaagtcttcttaacactgcttagtgaatattcagcctgatatagtaaatacacgctaaccactgaattgaaggggaaagagggagaacaaagagacatgtaaagtacacttactttttctagtaggaaaaagccaattaaaactatcacctattagttttattggaatcagtcttacaggagttcaaacttcctactgttgctacctattctcaatatttttcttatttcttcctaagcttctagagccgtgctgtccaataaatatgtgagccatatatgtaattttaaatgtactagtaagccccattaaaaggtgaaattaattttaaatatacttaactcagtatgtcccaaatagtaatc

SEQ ID NO: 15642 - DNA, 1322 bp, Homo sapiens
actgtaagtgtaatatgaagatacacagcccttttaagcatttcattatattacatctagcttacctctaagggatttattcagatgtgactgaagaaagtctaaagggaaaaaaagcaatttaatttgataaattaaattatcaattatagccaaattatttggctataacaaattaaacattttaagcagacagaagatgcaaacattttaagttgacagaagatataaaatgttcactatcaaaatgtcgcaactgataaaaatgttctcaaatatttctgtctcaaacttgcattgttcattaaggaagcaaaataggtgggacatacacagcaacaacatccctcaaaaaacaccttggctcattcctataagccaggcagcaaatacatcatccttacatatgttaattaccttccaatttcaaattctcaactgtgaaataaagggccattttatttggctgcttcyagttcaatatgactgtttttattaaaacatctctaacttgaaaaatatttggtgttttctaaaaaactgcaaattgccacaaatggccagataatttggaataaacaccctacagaaaaaaatatatattcaagttgcataagtcactttgagcaatcctttgaggatatttcatttatatctaaatgaaccacaggtttagctggcttttccggaaaaccagaagcaaataatgtatgattataatgaaaaccatctcaagtaattttgaaatgaagtaccacatgtcttatgctgtcccttccatgcacttgacaaaacagcctataacaaattgtttactttgagatttaacgggaaaattccatgaggtttaaaagagatgactactaataagccatctacctttgactctattccaattaaaaatgggttaggaaagtgctttgaaaatcaagtgtgttcatcagggaatcatttacctaagtcttcttaacactgcttagtgaatattcagcctgatatagtaaatacacgctaaccactgaattgaaggggaaagagggagaacaaagagacatgtaaagtacacttactttttctagtaggaaaaagccaattaaaactatcacctattagttttattggaatcagtcttacaggagttcaaacttcctactgttgctacctattctcaatatttttcttatttcttcctaagcttctagagccgtgctgtccaataaatatgtgagccatatatgtaattttaaatgtactagtaagccccattaaaaggtgaaattaattttaaatatacttaactcagtatgtcccaaatagtaatc

SEQ ID NO: 15643 - DNA, 515 bp, Homo sapiens
  misc_feature (1)...(515): n = A,T,C or G
aataaaaattaataaaatataattatcccggcatagtggtattttcctgtagaacctgttacttaggttgttgaggtgggcagattttttgagggcgggagtttgaggccagcttgggcaacaaagcaaggttcctttttttccaaaaaaaaaaaaaaaaaaaaaaaaaaaaaaaaaaannattagctgggtgttttggtgttcatctgtagccgtagctatggtgagggtgaggcaggaggatccccggagcccaggaggtcacrgctgcagttagctatgagtgcacccctgcattgcagccagagtgacagagtgagacccggtctcagaatacagatacaagtaaagaaatctcagctcagagcagtctgtttgtcactatgcagcctttgcaaccccatagctgcgcgattgggtttgtgttgctggaggtgaggagacccgtgcccaggtgttgttgcctgtctaatcagtttattttaaaatatattaatgaaatttatttcatcata

SEQ ID NO: 15644 - DNA, 527 bp, Homo sapiens
tttagttgagatggggtttcattattctatgtttcttttagaaacytgaattggaaagaacatatggaatggaaagcatacagtaagaagacaagattataaaaagcaaacagggctgggcgcagtagctcccactttgggaggctgaggcaggtggatcacttgaggccatcattgttccttcccctatctgaacctcagccccctcattttgggcttggaaccttgctaggaagatcagataatatagacacagtgtccatcagggcctggcactgggagacattcaatgaatgtgcgttcttatttcagtctttacttttgcattttcattgcctttttctattgagtttggccaggctaagggttttcaggtagttctgtgtttgtgtttggcttggctttatttaaagatacaagctagtgcaaggatattctatttctttctgtaactaatgtttgctggctgtcagtctaccatctctagctctttagtaaaggtaggaaaaacggaaagaaattagggc

SEQ ID NO: 15645 - DNA, 527 bp, Homo sapiens
tttagttgagatggggtttcattattctatgtttcttttagaaacctgaattggaaagaacatatggaatggaaagcatacagtaagaagacaagattataaaaagcaaacagggctgggcrcagtagctcccactttgggaggctgaggcaggtggatcacttgaggccatcattgttccttcccctatctgaacctcagccccctcattttgggcttggaaccttgctaggaagatcagataatatagacacagtgtccatcagggcctggcactgggagacattcaatgaatgtgcgttcttatttcagtctttacttttgcattttcattgcctttttctattgagtttggccaggctaagggttttcaggtagttctgtgtttgtgtttggcttggctttatttaaagatacaagctagtgcaaggatattctatttctttctgtaactaatgtttgctggctgtcagtctaccatctctagctctttagtaaaggtaggaaaaacggaaagaaattagggc

SEQ ID NO: 15646 - DNA, 527 bp, Homo sapiens
tttagttgagatggggtttcattattctatgtttcttttagaaacctgaattggaaagaacatatggaatggaaagcatacagtaagaagacaagattataaaaagcaaacagggctgggcgcagtagctcccactttgggaggctgaggcaggtggatcacttgaggccatcattgttccttcccctatctgaacctcagccccctcattttgggcttggaaccttgctaggaagatcagataatatagacacagtgtccatcagkgcctggcactgggagacattcaatgaatgtgcgttcttatttcagtctttacttttgcattttcattgcctttttctattgagtttggccaggctaagggttttcaggtagttctgtgtttgtgtttggcttggctttatttaaagatacaagctagtgcaaggatattctatttctttctgtaactaatgtttgctggctgtcagtctaccatctctagctctttagtaaaggtaggaaaaacggaaagaaattagggc

SEQ ID NO: 15647 - DNA, 526 bp, Homo sapiens
attttttcacagccaattccaccgaatgcagtggaatgacatcacaycccattttttcaccatctcttttcaaaccaagtggtgagtagaaacagagtagaaaccactttggggcagagggacctctctgaaccctggtgagacctactggccgtgtggccctgaacaggctgtcacctctctgaacttgcttcctcacagtaaagtgggcataaaattatccactttgcaggccactgttaagaattagggatcatggatgcagggagcccagcacagagctggccctgggtccatgacagcagtgctgctgggaggaggagcatggaaaagggacacttgaagagtggtgggtcgctcaagttcttgctcaagttcacctgcttagtgcccaacataatgctgctttaatgcttggttaagaagtttcctttcctactaaacaaaccctagcattcatgtgagagtgtttcagtcaccacctttgctgattcatatttaattctggagaactcgaccggcctcc

SEQ ID NO: 15648 - DNA, 1056 bp, Homo sapiens
tgaagctattgcaatagtccyttttttaatgttgtaaggctatttaatttacatacaagaatgtttatgacattatttagaattacagaaacttgagaacaactataaagggagtatggttaaatgtatctgcacagaggaatcttttagtcaataaaatatgtctaaataatatttcagctattataatatcctcaactctatgttgagcacgtcccaattacataaatgtgtatgtacaaataaaccccctccttgaccacatacttcagcctgtttaatcaacttctcccactgctaataatttttcacctcactggtacttatgatcatttgacctgtttatttccctctatccttaagtttcttgctacactcacttcactatcaaatttggattcaaaatcccagtgatgcaaattataaatagaaacatttgctttctacatgccgtcagaacacagctgaggaaaactgaatagccatcagaataacatcaacgaaaacacattactattaaccctaagagggtccttaccgcatacaagatatcctaatatttttctggccacttttttccagtttatggaaatttacatcatttctgcctttatcaatttctatcatttctgcctttctcattctcagctaattttaaatcatgaaggaaatatagcttctctttatagaaggccatttttccaagttcccttgaaaacccatccctcccagattcttactctgtcatccttttttttctaatgaatcttctgcttccccctctccactgaaagcttttctgtagaattagatttactctcctttcacctttcattcacttcttaacctatttcaatcatctggccaaaccccaaactttcccataaaactgattttgatatatttaccaacaatttataacagaaattctcttgttgccttaattgattttcaactgcctctagcagagttgactatacaccttatttcgaaagttttctattttgtcctcaaagatgttaaattctactagttttatttccgcacctctcagag

SEQ ID NO: 15649 - DNA, 540 bp, Homo sapiens
taaatgaaagaataactagttcttactgtgattagtaagctcttaaaagctcttaagacatgtatgtttattcacaagtcattaacgtatgataagtttgtctcagcacttaaaagatatctgaagggggagaccgctttttcttgtgtttaaaaatttartaagttaatactttttcattataaatgtaaaacaagtttcttgtagaaaatatgaaaaataaaaataaatataaaaacagaattcttcttagtcatgtcacccaaagataaacgcaatttttattttcatgtaattaaaaatacatccatatggtcatgggagcagataattgtgataaagtataatatgtatgaaaacacagacaaccatatgctaatattgtctctgtctcacacacatacacagacacacacacagacacacacacacacacccacacacattgtagtcatatagtctttattagttaaggtcacacaagttgctataaagcccagcccccaaaagtacaatggcttaaacaccatagagatttag

SEQ ID NO: 15650 - DNA, 540 bp, Homo sapiens
taaatgaaagaataactagttcttactgtgattagtaagctcttaaaagctcttaagacatgtatgtttattcacaagtcattaacgtatgataagtttgtctcagcacttaaaagatatctgaagggggagaccgctttttcttgtgtttaaaaatttaataagttaatactttttcattataaatgtaaaacaagtttcttgtagaaaatatgaaaaataaaaataaatataaaaacagaattcttcttagtcatgtcacccaaagataaacgcaatttttattttcatgtaattaaaaatacatccatatggtcatgggagcagawaattgtgataaagtataatatgtatgaaaacacagacaaccatatgctaatattgtctctgtctcacacacatacacagacacacacacagacacacacacacacacccacacacattgtagtcatatagtctttattagttaaggtcacacaagttgctataaagcccagcccccaaaagtacaatggcttaaacaccatagagatttag

SEQ ID NO: 15651 - DNA, 425 bp, Homo sapiens
acaaatccctgacagttatatcttcattgtgaattttgctgttaaccaacatactatgactctacttaccaatacctgagggaaattcaggttccattttgctttaaataaatgtcatctttcatgcctccctagggtttgcatttgcctggccatgttcttaacattcctgaatcactttgttttgtttgtatcccttgtagattgtagaccaaatctcagaatctttgtaccttaaaataaagacttttaactctttttatatttgcttgtcaattaaactattagctaataacatgttatgttttatcattctgaaagtcattgttcttacatacagactttgttacacattwtatatttatgttgtcaatcaacatgctagtttatacttttattttatattttatgatttacttcactaa

SEQ ID NO: 15652 - DNA, 425 bp, Homo sapiens
acaaatccctgacagttatatcttcattgtgaattttgctgttaaccaacatactatgactctacttaccaatacctgagggaaattcaggttccattttgctttaaataaatgtcatctttcatgcctccctagggtttgcatttgcctggccatgttcttaacattcctgaatcactttgttttgtttgtatcccttgtagattgtagaccaaatctcagaatctttgtaccttaaaataaagacttttaactctttttatatttgcttgtcaattaaactattagctaataacatgttatgttttatcattctgaaagtcattgttcttacatacagactttgttacacatttyatatttatgttgtcaatcaacatgctagtttatacttttattttatattttatgatttacttcactaa

SEQ ID NO: 15653 - DNA, 574 bp, Homo sapiens
aagaaaattatcaggaaagagcattctttgatacacaaacttctctggtagcctattcttatactccaaaacttcagccatttaagccaatagaagcccccaatgcacacagccaggcttcatcttgtcccttccctgcatttccttcaattcctccatatacatgtgtttgattccccatcatgggcagagggcggctccatcacatgcctcagttcatggtgcactctcatgacttgtgcctgaagtcttcttggattttttctctttttttttttttctttttctttcgttttttgagatgaagtctcaccctgtcacccaggctggagtgcagtggcgtgatctcagctgactgcaacctccgcctcccgggttcaagcaattctctgcctcagcctcccaagtagcagggattacaggcgcccaccaccacggctggctatttatttatttatttagtagagacagggtttcaccatyttggccaggccggtcttgaactcctgacctcgtgatccactcacctcagcctcccaaagtgctgggattacagacgtatgccaccgcaccc

SEQ ID NO: 15654 - DNA, 1335 bp, Homo sapiens
tctccctaatgttggacttatatatctggccttggcctatattgggggctagatggatcatttctggcatgtgtgtcactcctctcatcctgatctattctcaagttcattgaaaaacaacaggacaggtcgggccttttggctcatattgtaattccagcactttgggaggccgggagttcaagacyagcctggccagcattttttttatttttagtagagacagtcaatcccgtctctactcgggaggctgaggcatgaaaatctcttaaacccgggaggcagaggttgcagtgagctgagatcatgccacttcactccagcctgggttacagagtgagactttgtctcaaaaaataaataaataaataaataaataaatataaaaagacaattttatagcaaatcttaatattttaatttttataagacactatcctccaattctttccttatattacattgttgtgttattctttagcaaataaacgtacaagtttctcatttaaggcttttatttgccttataaatctcctcttttggtttacatcttgaagaatgttcatttttattttacaaaaagaaaatgtgatacgtgagcattctctctacgcccattagaggatctatactctttttgtaatgctaattcttatccagcagacttcctaaaaacaaaatcatttgctctattaatctaaacggtaacatggtaaattgggtgattaaatagtcttagtgtttttggatttttttgagacaatcatattgccatcaataaaggttaaatttagactaaaatctaaacaaaaactgaaatttcagtgataaaaagacaattaggtacttctatttaaaatgctcaataacttactaaatcattgtcagcaggcatttgctctacatttttacattgaaattattttaggaaatttttcaaaattattagaatgacctgaaatgacagtcatcttaactttgggattataacagcaaacagtattagatagtttccacattgctgaaatgtaactttaagttcataaattgagctgggtctgctagattttcagtttgggaaatataattttctttagaatattaagagatatttatttatttatttattttatttatttatttttaatttttatttccttttttaaaattttttattttattttattattattatactctaagtgttagggtacatgtgcacaatgtgcacgttacttacatatgtatacatgtgccatgctggtgtgctgcacccattaactcgtcatttagtattaggtatatctcctaatgctctctttgtataaataaacc

SEQ ID NO: 15655 - DNA, 1335 bp, Homo sapiens
tctccctaatgttggacttatatatctggccttggcctatattgggggctagatggatcatttctggcatgtgtgtcactcctctcatcctgatctattctcaagttcattgaaaaacaacaggacaggtcgggccttttggctcatattgtaattccagcactttgggaggccgggagttcaagaccagcctggccagcattttttttatttttagtagagacagtcaatcccgtctctactcgggaggctgaggcatgaaaatctcttaaacccgggaggcagaggttgcagtgagctgagatcatgccacttcactccagcctgggttacagagtgagactttgtctcaaaaaataaataaataaataaataaataaatataaaaagacaattttatagcaaatcttaatattttaatttttataagacactatcctccaattctttccttatattacattgttgtgttattctttagcaaataaacgtacaagtttctcatttaaggcttttatttgccttataaatctcctcttttggtttacatcttgaagaatgttcatttttattttacaaaaagaaaatgtgatacgtgagcattctctctacgcccattagaggatctatactctttttgtaatgctaattcttatccagcagacttcctaaaaacaaaatcatttgctctattaatctaaacggtaacatggtaaattgggtgattaaatagtcttagtgtttttggatttttttgagacaatcatattgccatcaataaaggttaaatttagactaaaatctaaacaaaaactgaaatttcagtgataaaaagacaattaggtacttctatttaaaatgctcaataacttactaaatcattgtcagcaggcatttgctctacatttttacattgaaattattttaggaaatttttcaaaattattagaatgacctgaaatgacagtcatcttaactttgggattataacagcaaacagtattagatagtttccacattgctgaaatgtaactttaagttcataaattgagctgggtctgctagattttcagtttgggaaatataattttctttagaatattaagagatatttatttatttatttattttatttatttatttttaatttttatttccttttttaaaattttttattttattttattattattatactytaagtgttagggtacatgtgcacaatgtgcacgttacttacatatgtatacatgtgccatgctggtgtgctgcacccattaactcgtcatttagtattaggtatatctcctaatgctctctttgtataaataaacc

SEQ ID NO: 15656 - DNA, 568 bp, Homo sapiens
gattacaggtgtgagccactgcaccaagcctactctgatatcttaagacaccaaagcagtgccagcaactgtgtacctccagtcttcttgttatgttctgaaaattaacccttggagtttaagaccacacagtggaaggtctgtcactcttagccaaatgcaattcctcaggggtacacctaagatcctgaaaagaccctacatagacaattaagttatgaataaatgttactggataatgatgacgatgatcacaaggataatgatgatgacaatgttaatatctatgcagcgcatcctacatgtcacgtactgaagcccagaaagtttaagtaatttacccaagatcttgtggctaataagtggtaagactcgactttcaatccactcaatctggttccagaatccatgcttttaaccactacaagatgataatatcaagtasaacaaactaatatacactgcacaaatgaataaacacagatatactcatcttaaagcagctttgttgattcattaatgaaaattcttattatatgccatccccaaattgctcctttatttgaga

SEQ ID NO: 15657 - DNA, 535 bp, Homo sapiens
ggatgtaattaaccaaatccccagctcagagggggtcagggagaggctcatttctcctgtgacaatagctaccccttaaagagctccagtagttattgccagacaactaataattttgacttagctactcactgacaggggatgtactgcttttggaaaaatcctgcagtgggaggccagggagccagaagtccataagaggcaatgcaccaatctggagatgcaccaggctgcagctctcctctgagctttttagcagaagccatccagctggtgcagcacagctgagcctctgacccagccttggacccctcaagaaatggtcacttatatccccctgcatcctggatccccaaccgcttctgttcagctgacctccaacttcatttctgacttgttccaacttccatgagacctgagttcttgacttcttsttaaaatagcttctcccttaccccttgtacccaaaccttattctacaccataggtacctctcttgggctccaagctgccatttgcctcctggccatcctct

SEQ ID NO: 15658 - DNA, 501 bp, Homo sapiens
aattgtgacagaagcgaaacaagaaaccttaaatgaattacttacctttgcaaacattattataagcgctaagtttacctgaatcctctgttccagattattgcgactactagaatgatctactctgaaagcaatgcagtcaataatgataatattaataacaaccaacagttatatattgatatggttkggttctatgcccccaccgaaatctcatgtcaaattataatccccacatatggaaggaggggccttgtgggaggtgactgaatcatagcggcagacttcccccttgctgttctcgtgatagagttctcatgagatctggttgtttgcaagtgtgtagcacttcccccttggctctctctctcctgttgccatgtgaagatgtgcttgcctctccttcactttctgccatgattgtaagtttcctgaggcctccccagccatgccccctgtgcaacctttggaactgtgagtcaactgaacctcttttcttca

SEQ ID NO: 15659 - DNA, 501 bp, Homo sapiens
aattgtgacagaagcgaaacaagaaaccttaaatgaattacttacctttgcaaacattattataagcgctaagtttacctgaatcctctgttccagattattgcgactactagaatgatctactctgaaagcaatgcagtcaataatgataatattaataacaaccaacagttatatattgatatggttgggttctatgcccccaccsaaatctcatgtcaaattataatccccacatatggaaggaggggccttgtgggaggtgactgaatcatagcggcagacttcccccttgctgttctcgtgatagagttctcatgagatctggttgtttgcaagtgtgtagcacttcccccttggctctctctctcctgttgccatgtgaagatgtgcttgcctctccttcactttctgccatgattgtaagtttcctgaggcctccccagccatgccccctgtgcaacctttggaactgtgagtcaactgaacctcttttcttca

SEQ ID NO: 15660 - DNA, 592 bp, Homo sapiens
cacgcttgggtgttcaaactataaaagaagttattttatacaagtcaggtagtggttacttgttgggggaaggagggagataaagatgagcatataggggctttgtgggagacaaacttctctttctccacctgggaagtaattacaaagatgtttgctttagaataattcactaagctatgttttcattttgtttggtcatctatatccatgttttacaacaaaaacattatttctaaaacatcataagattaaaaggcacactataaaaagtccatctatgttagcaaatgattaatattcttatttaataatctttaaaaaattaataagaaaaaacttagctcactttaaaaatgagcgaagatatttcatagaagacctayattgagcaataaacatattttttaatgttcaaacttgcttattgtcaaggaaatgcaagttcaagtaaaaaataagagtgtgattgatgatattggaaaagataaaaataaaatggcaatacctaatgtcgttgagcatggagagaagtagcattctcctacaatgctgataggaatctagtttgtcataacttgtttggagagta

SEQ ID NO: 15661 - DNA, 542 bp, Homo sapiens
taaaaggtaaatgctggcggataggctgatttatttttatttatttatttatctttttttttctatttttggagacatagtctcgctctgtcrcccaggctggagtgcaatggcactatctcggctcactgcaagctccgcctctcagggtcaagcaattctcctgcctcagcctcctgagtagctgggactacatgtcacactgccatgcccagctaattttttgtattttactagagacagggtttcaccatgttgcccactctggtctcgaactcctgtgctcaggcaatccgccctcctcggcctcccaaagtgctaagattacaggcatgagccaccgcgcccgccagataggctgatttttatcattatagttatcttttctttgttgaacctgagataatggcattttaactttagaatgcctgatctttcataatactattatcactatcaattatatcagataaacctaatgttccttccactcaaccctttctacaccttggtcttattaatatttccagatatttggtcat

SEQ ID NO: 15662 - DNA, 544 bp, Homo sapiens
ctgtatgggaattgtttcaaaggaaatcaatgatctctgcattctaacaatattttaaggagaaaaagagaaggagaccagcaaggagtcttgcttcagaggagcagtatatgtgcagccatttctctgcccagcagcgtgtgccccatatccatgtgggctaggccctcacctctgcccacttcctctcatgggctggagaacagcagtgagatccccagtaggaggccaggggaaatctgggcagctgcatgttttctgagcatcttctccatccttgctccttttctaccctaaattttaacttcattgatcaaatcaacccagcccagaagtggtctcttccttctctgaattctggtatcatttcstttttacctgtctcaatgcctatatcttcattcattcaacaaatatttactgaactctgtgtgtcaggcattgttcccattagtcaaccaaagaggcaatatacttttgcccccttggattttacattctatcaggtgaagacagataaaaggtgaaaatataataaaggagt

SEQ ID NO: 15663 - DNA, 712 bp, Homo sapiens
aacaaaaaccagcttgtccctccttttctacctccccaaaattataatagtcttgaaggcagggacaatatgtatgttgttcattgctgtatctctggcatcataaccaccagtaaaacctcaaattttattcttgagtatgaactcttaaaaaacttctctaaagaatattagggtttcgactatttcataattagaattttaaatataaagatcatacaaatgatacatatttataactgtacagaaagcaaacaaattcattagtagaaactcagagaagtagaaacaattctaacatttctaaaatcaraaattcataactgtataataagtttatgtagggcagtccagctgttctaggcaagcaattctattttacctttcctgggatgaagcaacagagattggaatccacatatttcatgaaagtcatatttaatagtgacagccttgtttcaacagcagcaagaatgtctgcatgacgagctaatgaatggtttctcctttctgactctctcctataataataataataataaaagcaaggcaaccattaaagcagtattgtggactaaaatattaagcaatcaagatggcttaatgaaacagtcttttacatgttaatttagaaatctacagttgggtcataatttaactgtaatgatgaatgaatcactatgcctagaaatcgttaccaaagactggtact

SEQ ID NO: 15664 - DNA, 619 bp, Homo sapiens
ccccaaaggcagaggccatcatcaattcaagtcctccacatccctgaactatcctgagtcctgagtcttgtcgttttggaagtctggtccttctatttctattttttgaatctctcatagcctttcaattaaaaatgcttttgctttcataagccatggttgttttctgttgctagccaccaaaatagaaacaaaagcaaaaacaaccgagagatccacagggctagagaatacactcctaattctgagaatgctttggtgcagtggaraagcttacccctggagaactgcctgttgtttgctctatgctttgggaaataatctggcagcagtaaagaaatggataaaaatagagaaaactgaaaagtcaatgtcagtccattgcaaaaccaacttgaactgtgactatgtgccaggccctgagttagccacagagaattcagaaatagagcagggccctcccaccctttacttcccctttccctaaagaactcacttattttgtagggaatataattaaaggactactctctgactcacccaggcagagctagcactgctatgcttagcttcaaagatctttctaagtcactttcctatgtagttaatcccattgtcc

SEQ ID NO: 15665 - DNA, 530 bp, Homo sapiens
gacagccatgtaaatattgaggttggaaagcatacacaacagarggcacgatacctgcaaaagctctaagacaggaatatacttggaactttaaaaaaaaaatggccaggcgtggtggctcatgcctgtaatcccagcactgtgggaggccgaggtgggcagatcacaaggtcaggagatcgagaccatcctggctaacacggtgaaaccccgtctctactaaaaatacaaaaagttagccaggcgtggttgtgggcgcctgtagtcccagctactcgggagactgaggcaggcaaatggcgtgaacctgggaggtggagcttgcagtgagctgaggtcgcaccactacactccagcctgggcaacagagtgagactccatctcaaaaaaaaaaaattgcggttgtattttattatgccagccccagtaaaaacagaaaagaataaagttattaatattttttaaaattttttaaaaagaagtcaatgtggctgaagcagagcattgataggtgatagtattaggagata

SEQ ID NO: 15666 - DNA, 530 bp, Homo sapiens
gacagccatgtaaatattgaggttggaaagcatacacaacagagggcacgatacctgcaaaagctctaagacaggaatatacttggaactttaaaaaaaaaatggccaggcgtggtggctcatgcctgtaatcccagcactgtgggaggccgaggtgggcagatcacaaggtcaggagatcgagaccatcctggctaacacggtgaaaccccgtctctactaaaaatacaaaaagttagccaggcgtggttgtgggcgcctgtagtcccagctactcgggagactgaggcaggcaaatggcgtgaacctgggaggtggagcttgcagtgagctgaggtcgcaccactacactccagcctgggcaacagagtgagactccatctcaaaaaamaaaaattgcggttgtattttattatgccagccccagtaaaaacagaaaagaataaagttattaatattttttaaaattttttaaaaagaagtcaatgtggctgaagcagagcattgataggtgatagtattaggagata

SEQ ID NO: 15667 - DNA, 530 bp, Homo sapiens
gacagccatgtaaatattgaggttggaaagcatacacaacagagggcacgatacctgcaaaagctctaagacaggaatatacttggaactttaaaaaaaaaatggccaggcgtggtggctcatgcctgtaatcccagcactgtgggaggccgaggtgggcagatcacaaggtcaggagatcgagaccatcctggctaacacggtgaaaccccgtctctactaaaaatacaaaaagttagccaggcgtggttgtgggcgcctgtagtcccagctactcgggagactgaggcaggcaaatggcgtgaacctgggaggtggagcttgcagtgagctgaggtcgcaccactacactccagcctgggcaacagagtgagactccatctcaaaaaaaaaaaattgcggttgtattttattatgccagccccagtaaaaacagaaaagaataaagttattaatattttttaaaattttttaaaaagmagtcaatgtggctgaagcagagcattgataggtgatagtattaggagata

SEQ ID NO: 15668 - DNA, 579 bp, Homo sapiens
cggtgaccttatttattttgttgtacatcaattcatgttgttgatattagggctaaaggattgtttttcactagtagatggatctagcatactaaagatttcttagctacgcatcttcttttccctatatatcttatacttatatcatttgytccatcaaaatatatttagacttatatagttattatccttaatgtaacctgtgattgtttatttgaatttcactgacacaagcagtgggagtacaaaaatattttaaccaatcttacttacttcgtggaatagcaaatgagctgagttagaccacaaaatgctggactggatttgaagactggcaagaatgttaattctgactggcatccgtggtgtttcatttcagtttaccacccaaatagccaacaagtagtgcaaaggtcacaagaattgagaataaaataattgactggaaacagctctgtaaagacaccctatgtttctcagagacactcccacaattcaggagtcaaagtatcctgtaggtattgagaatcctgttcagtgatagcagccaagaaatggggctgtttcatccagtaggct

SEQ ID NO: 15669 - DNA, 526 bp, Homo sapiens
tatacaaatcatattgacttaatatacacctgaaaatcccctgaattctaatacttatctagtctcaatgggtttcacataaagaaaagtgaaagatggtgaatctgatatatttgtaaagatgacctgaatactacagtatttcatattttacatataagaataagctgttttcacatttttcatgatacttttatgtacattctttgaaaattggtcattttcaccgtgtatcttttaaattattagtcagtcaaaatatatagttaatgakaagttcctattccttggtagagataaatagaaattttctgcattttagtattttgcaggtcaatactgggaacaatgagatggcgtcaatatcctgacagtaaacaagtaaataggaaaacatttgaacctgcttagacagtaatcctggacacaagtccaaaagccctcattccttctatctttctctctttctaataccataaatctctacctgaatgtttacaattagtaatccatcaacatgtaaaaa

SEQ ID NO: 15670 - DNA, 1027 bp, Homo sapiens
tgtttacattaagaaaatgaacaagattttacttacaagctcataaacagatgagcattaatagtattgtaaatggctaaatacttttgaacactatattattgtagaagaaacaatcaatgttgagttcttgagtacctaaggattggctcatccccagtccttttcaggtgaaaasagaaatactaaccagttctgcagaagtccccctcccagcctggactgcagcagcactttcccgtgggggtgcagtagccgtttcgacagagcctggagcactctgaagtcagtgtctgtgcaggttgtaccgtggctctgcattcctcaggcattaaaggtctacattaaaacacaatagttgaaagtgtattccatttgaaaatcaacagtggaatgaaatctagtgattctgtggcttacaaagcatgcctcttactttctagagagactttttttttttttaagtgactcagtcagatttacaactttctaaggataggaaatacataccagtgaggaaacaaactaaccagtttgtaacccaactaaacacattaaacattctaagaaactttatcctgatcaaagcccattgatgaaaatatctttaattaaattgatatttcacatttggtaagtaagaatttctaacaattgcaatatttaaagtaaagtagtataaatatcttaaaacttttcaccctatatctacaaaaatgtttaggaatagtgtctgagatagtttcacttgttattgacacagttggcagtagtacagggctgaaggcattcatcaaaatgacttgtagcctgaaaagctttggaatctttgtttttttttttaattttatttttgttttaattttatatttcttttgagataatatttttagactgatttttcttgaaaggtgaccataatatatgtgtgtatactattgagttgaagtttaaactccatgcacagaaagatccatatatatgtgaagattatatatatataaaatctgattttgatccatatatg

SEQ ID NO: 15671 - DNA, 1027 bp, Homo sapiens
tgtttacattaagaaaatgaacaagattttacttacaagctcataaacagatgagcattaatagtattgtaaatggctaaatacttttgaacactatattattgtagaagaaacaatcaatgttgagttcttgagtacctaaggattggctcatccccagtccttttcaggtgaaaacagaaatactaaccagttctgcagaagtccccctcccagcctggactgcagcagcactttcccgtgggggtgcagtagccgtttcgacagagcctggagcactctgaagtcagtgtctgtgcaggttgtaccgtggctctgcattcctcaggcattaaaggtctacattaaaacacaatagttgaaagtgtattccatttgaaaatcaacagtggaatgaaatctagtgattctgtggcttacaaagcatgcctcttactttctagagagactttttttttttttaagtgactcagtcagatttacaactttctaaggataggaaatacataccagtgaggaaacaaactaaccagtttgtaacccaactaaacacattaaacattctaagaaactttatcctgatcaaagcccattgatgaaaatatctttaattaaattgatatttcacatttggtaagtaagaatttctaacaattgcaatatttaaagtaaagtagtataaatatcttaaaacttttcmccctatatctacaaaaatgtttaggaatagtgtctgagatagtttcacttgttattgacacagttggcagtagtacagggctgaaggcattcatcaaaatgacttgtagcctgaaaagctttggaatctttgtttttttttttaattttatttttgttttaattttatatttcttttgagataatatttttagactgatttttcttgaaaggtgaccataatatatgtgtgtatactattgagttgaagtttaaactccatgcacagaaagatccatatatatgtgaagattatatatatataaaatctgattttgatccatatatg

SEQ ID NO: 15672 - DNA, 570 bp, Homo sapiens
tagtaacttagaacttaatgcaatgaactacctataaaaaaattattttacttctcttatcttgccccaaagcaacctgattataaaatttccactttcccactgtccttggataataacattattagccataactacttagttggctgtccaaaagaacatagtatgagtaatttggtaaatctataaggcattatattaccagcccatttttcaaatgcaaagttaggcatgacagaattagtgaaatatagaagcacttcaagatttctttaacctgtaaagatcatatgtttttgtaagtttatkttcagccagagttcatccatctactattatagtatacatttcatcattttttgttgttaatattattaatttctaaaagttatatatatcattgcattcacttagactacttataattatatatagtcatgcattgaaaaattatgtaacataaatattctgcaggaagacaaagtctaataatagatattaaatcataataaaagctctatttgtaacatttgattcatcagatttctttctttactaacatttactggc

SEQ ID NO: 15673 - DNA, 525 bp, Homo sapiens
tggagtctcactccgttgcccaggctggagtacagtggcatggatcttggctcactgcaacctctgtctcccagtttcaagcaattctcttgtctcagcctcccgagtagctgggactgcaggtgtgcgccaccacgcctggctaactttttgtatttttagtaaagatgggatttcaccatattggccaggccagtctcaaactcctgacctcatgatctgcccgcctcagcctctcaaagtgctgggattacaggtctgagccaccatgcctggcccatcccaatttttaatggaaaattccattagttaaaaaaatttgagtttgtacttcgagcatatrtatatttatttatacgtttatacaagcaccactgtcaagctaaatgtcaaattgcagagaagctgaatttcttcttgaagataataataaaaaataaataaaaataaatagaagctgaacaatatctttccatatggtaatagatcacataccacactttgaagattattgcccttgagcag

SEQ ID NO: 15674 - DNA, 1067 bp, Homo sapiens
taaaaayagtcatacatgtgaaatgatttagccaaattcagaattcaaagatggttcatacattttgacagattcttcccaccccaggaagatagcacagtttacaaaagtgatttaccatcattcagtaatacatacttatttactttaatggtataacaccgttcattttaatttgaaattctttcattacctgctaaagggagttcatatttatgtgtttacaatcttatacaggttgaattttctttctcccaaattcatatggtaaagttctaacccttagtttcttagaatgtgaccttattgaaaaatggtgttgttgcctatgtacttagttaagtcaggacgtcatactgaagtagagtgggtccctaatccaatatgactggtattcttatacaaaagcaaaatttggatacacattcccccaccaccacacacacacagaacatcgtgtgactataaaggcaaaaatcaaagtgatgcaacagaagccaaagaaaattggcttctagaactaagaaataacgaatttctcttgttctaaaccacccagtttgtctgcattgcgtatcatatactacgtatggatatttcttctttaataaatacactgtatgagttctttacctacttataggtcaagcttcctatgtttttttttttttgtatttaatttgctttcttacatagcagtgagtcatatccctttctaatgtgttaaatggcactatatctagaatggtttttggaccaactcttttgcctcttcttttcgattttctattgtagtttcaattaagctaagcttcaattactgtacttttaaaaaatagaatatattacctgggagaactagatttttcatttatttctcccttttcagaattttcatactattcttatctatttctattcccttagttttcttgtgatttctgtttttaattagaaattgtgtttcaaatttgattaaatattaagcctggggtgtttttacggtaaaagaaaaacagataatccctttcctgaaggggggtaggatcagaaacaaaagtagagag

SEQ ID NO: 15675 - DNA, 1067 bp, Homo sapiens
taaaaacagtcatacatgtgaaatgatttagccaaattcagaattcaaagatggttcatacattttgacagattcttcccaccccaggaagayagcacagtttacaaaagtgatttaccatcattcagtaatacatacttatttactttaatggtataacaccgttcattttaatttgaaattctttcattacctgctaaagggagttcatatttatgtgtttacaatcttatacaggttgaattttctttctcccaaattcatatggtaaagttctaacccttagtttcttagaatgtgaccttattgaaaaatggtgttgttgcctatgtacttagttaagtcaggacgtcatactgaagtagagtgggtccctaatccaatatgactggtattcttatacaaaagcaaaatttggatacacattcccccaccaccacacacacacagaacatcgtgtgactataaaggcaaaaatcaaagtgatgcaacagaagccaaagaaaattggcttctagaactaagaaataacgaatttctcttgttctaaaccacccagtttgtctgcattgcgtatcatatactacgtatggatatttcttctttaataaatacactgtatgagttctttacctacttataggtcaagcttcctatgtttttttttttttgtatttaatttgctttcttacatagcagtgagtcatatccctttctaatgtgttaaatggcactatatctagaatggtttttggaccaactcttttgcctcttcttttcgattttctattgtagtttcaattaagctaagcttcaattactgtacttttaaaaaatagaatatattacctgggagaactagatttttcatttatttctcccttttcagaattttcatactattcttatctatttctattcccttagttttcttgtgatttctgtttttaattagaaattgtgtttcaaatttgattaaatattaagcctggggtgtttttacggtaaaagaaaaacagataatccctttcctgaaggggggtaggatcagaaacaaaagtagagag

SEQ ID NO: 15676 - DNA, 1067 bp, Homo sapiens
taaaaacagtcatacatgtgaaatgatttagccaaattcagaattcaaagatggttcatacattttgacagattcttcccaccccaggaagatagcacagtttacaaaagtgatttaccatcattcagtaatacatacttatttactttaatggtataacaccgttcattttaatttgaaattctttcattacctgctaaagggagttcatatttatgtgtttacaatcttatacaggttgaattttctttctcccaaattcatatggtaaagttctaacccttagtttcttagaatgtgaccttattgaaaaatggtgttgttgcctatgtacttagttaagtcaggacgtcatactgaagtagagtgggtccctaatccaatatgactggtattcttatacaaaagcaaaatttggatacacattcccccaccaccacacacacacagaacatcgtgtgactataaaggcaaaaatcaaagtgatgyaacagaagccaaagaaaattggcttctagaactaagaaataacgaatttctcttgttctaaaccacccagtttgtctgcattgcgtatcatatactacgtatggatatttcttctttaataaatacactgtatgagttctttacctacttataggtcaagcttcctatgtttttttttttttgtatttaatttgctttcttacatagcagtgagtcatatccctttctaatgtgttaaatggcactatatctagaatggtttttggaccaactcttttgcctcttcttttcgattttctattgtagtttcaattaagctaagcttcaattactgtacttttaaaaaatagaatatattacctgggagaactagatttttcatttatttctcccttttcagaattttcatactattcttatctatttctattcccttagttttcttgtgatttctgtttttaattagaaattgtgtttcaaatttgattaaatattaagcctggggtgtttttacggtaaaagaaaaacagataatccctttcctgaaggggggtaggatcagaaacaaaagtagagag

SEQ ID NO: 15677 - DNA, 537 bp, Homo sapiens
cactttgcacagtgcytgttttacgattactagctgttaccatcatcatcctcatccccatttttcagatgaagaagcttggtgcacagattaataaagctctgaaatgaaaagcaggagttgagcaaagagttacctgactcctaaactcttgctgttgttgaaatcccaccaccttattgcattagggaatattgctttgtgagaaaggagggtgtgggagtgaggtttagccttcaggccaggaagctaattctaattttaggaagaggtgacaaggacgtgaggaaaagcaattatttatagtcaggccacaagggcctcggattttgcctctgattggcacttgtctccttctgcattcctgctttctcccactggtgttgtcctttccatgcatcatgatttcccaatgccgggagaatgtttaattgggtaattacccaggttcagttctctgaacttgcttaattccctggataacaaaaaaaaggaaagaggggtaacttaccagtcagatatctactccctttttta

SEQ ID NO: 15678 - DNA, 520 bp, Homo sapiens
aaggtaatatatttatattaaaaagttcacttaatgtatttcctagatagcagttataaaaggtagggtttctttttttctcctytccctccttccctccctctctttgttccttctctgtctctccaattttaataattggtattatcagtccttcctcattcatcttcttatttttccctagatgctttttcctggctcttattgcttttttagatttacgtaggaactttaaaatcaacttgtttaatttgaaaatcctactaataattttggggatgtgattcacaatagagtatttataaaatagctctgaaagaatcaacatctttttttttttttttttttttgagggggagtcttgctctgtcacccaggctggagtgtagtgactccatctcgtttccttgcaacttctgcttcccaggttcaagcaattcttctgcctcagcctcccgagtagttgggactacaggtatccaccaccactcctggctaatttttgtgtttttagtggaga

SEQ ID NO: 15679 - DNA, 652 bp, Homo sapiens
cgtgaattaaacttttcaaaaacaaacaaaaaaatcactacaatttttttatatcatttgtagctcttttctcattttccattcttcttactgtacttcctgcaacctgacccctattgaaacaacatgatctccaaaattccaaatttctttgaaccgaaccttttcactgcatgggatttttcatayctttattggaaatctctcgtcctttggctttcatgacagcataatctcagttttcttacttgtttgacaatccttacaatcctttgctgaaactctctttcaaattctgtaatacttttcagggcaaacattcttctttcctccctctcccctcccatttcttctccttgtctcttcttaattctttttctttctcagttgtactccgcttctctcctcttcagttgtgcattcattaactataaaagctttgactgaaaatataaagatcaacaggtgctcacaggtaatataaatgagcaaagcagatggaggtaagcatttgtgtgtctttaatgagcaggggagtaaaggaggttgccaatctcttataaaggggcagccctcacttagcaagtggaatatttgtcatgtggtgctttggctcagggttctttgaacttccagtattttgagaagagtt

SEQ ID NO: 15680 - DNA, 652 bp, Homo sapiens
cgtgaattaaacttttcaaaaacaaacaaaaaaatcactacaatttttttatatcatttgtagctcttttctcattttccattcttcttactgtacttcctgcaacctgacccctattgaaacaacatgatctccaaaattccaaatttctttgaaccgaaccttttcactgcatgggatttttcatacctttattggaaatctctcgtcctttggctttcatgacagcataatctcagttttcttacttgtttgacaatccttacaatcctttgctgaaactctcttycaaattctgtaatacttttcagggcaaacattcttctttcctccctctcccctcccatttcttctccttgtctcttcttaattctttttctttctcagttgtactccgcttctctcctcttcagttgtgcattcattaactataaaagctttgactgaaaatataaagatcaacaggtgctcacaggtaatataaatgagcaaagcagatggaggtaagcatttgtgtgtctttaatgagcaggggagtaaaggaggttgccaatctcttataaaggggcagccctcacttagcaagtggaatatttgtcatgtggtgctttggctcagggttctttgaacttccagtattttgagaagagtt

SEQ ID NO: 15681 - DNA, 652 bp, Homo sapiens
cgtgaattaaacttttcaaaaacaaacaaaaaaatcactacaatttttttatatcatttgtagctcttttctcattttccattcttcttactgtacttcctgcaacctgacccctattgaaacaacatgatctccaaaattccaaatttctttgaaccgaaccttttcactgcatgggatttttcatacctttattggaaatctctcgtcctttggctttcatgacagcataatctcagttttcttacttgtttgacaatccttacaatcctttgctgaaactctctttcaaattctgtaatacttttcagggcaaacattcttctttcctccctctcccctcccatttcttctccttgtctcttcttaattctttttctttctcagttgtactccgcttctctcctcttcagttgtgcwttcattaactataaaagctttgactgaaaatataaagatcaacaggtgctcacaggtaatataaatgagcaaagcagatggaggtaagcatttgtgtgtctttaatgagcaggggagtaaaggaggttgccaatctcttataaaggggcagccctcacttagcaagtggaatatttgtcatgtggtgctttggctcagggttctttgaacttccagtattttgagaagagtt

SEQ ID NO: 15682 - DNA, 571 bp, Homo sapiens
taaatgtggcattaatttttcgtctatactcagactctgtctctatcaaatcatttattttttcctgtgaattattagctattttagctctactttgaataaattcctgatcgcagggctcaaaaaagggtttttgaatcmctaattatcagggaaataaaaatcaaatccccagtaaaatgtcacctcactcagaatagccattataaaaaaaaaaaaaacccccaacgctgacatagattcagaaaaatgggaacctttatttttggtgggaatgtaaatgagtacaatcattttttttttttttttttttttttgagacagaatctcactgtgtcacccaggctggagtgggctgactgcaatctctacctgccgggttcaagcgattctcgtgcttcagcctcccaagcagctgggattacaggggtgtgccaccatacctgagcctccataagtgctgggattacaggcatgagtcatcatgcccagccagataaaaagttattaataagctctggtgttctattgcctagtagggttactatagttaacaatattgcgtatttca

SEQ ID NO: 15683 - DNA, 571 bp, Homo sapiens
taaatgtggcattaatttttcgtctatactcagactctgtctctatcaaatcatttattttttcctgtgaattattagctattttagctctactttgaataaattcctgatcgcagggctcaaaaaagggtttttgaatccctaattatcagggaaataaaaatcaaatccccagtaaaatgtcacctcactcagaatagccattataaaaaaaaaaaaaacmcccaacgctgacatagattcagaaaaatgggaacctttatttttggtgggaatgtaaatgagtacaatcattttttttttttttttttttttttgagacagaatctcactgtgtcacccaggctggagtgggctgactgcaatctctacctgccgggttcaagcgattctcgtgcttcagcctcccaagcagctgggattacaggggtgtgccaccatacctgagcctccataagtgctgggattacaggcatgagtcatcatgcccagccagataaaaagttattaataagctctggtgttctattgcctagtagggttactatagttaacaatattgcgtatttca

SEQ ID NO: 15684 - DNA, 571 bp, Homo sapiens
taaatgtggcattaatttttcgtctatactcagactctgtctctatcaaatcatttattttttcctgtgaattattagctattttagctctactttgaataaattcctgatcgcagggctcaaaaaagggtttttgaatccctaattatcagggaaataaaaatcaaatccccagtaaaatgtcacctcactcagaatagccattataaaaaaaaaaaaaaccccmaacgctgacatagattcagaaaaatgggaacctttatttttggtgggaatgtaaatgagtacaatcattttttttttttttttttttttttgagacagaatctcactgtgtcacccaggctggagtgggctgactgcaatctctacctgccgggttcaagcgattctcgtgcttcagcctcccaagcagctgggattacaggggtgtgccaccatacctgagcctccataagtgctgggattacaggcatgagtcatcatgcccagccagataaaaagttattaataagctctggtgttctattgcctagtagggttactatagttaacaatattgcgtatttca

SEQ ID NO: 15685 - DNA, 571 bp, Homo sapiens
taaatgtggcattaatttttcgtctatactcagactctgtctctatcaaatcatttattttttcctgtgaattattagctattttagctctactttgaataaattcctgatcgcagggctcaaaaaagggtttttgaatccctaattatcagggaaataaaaatcaaatccccagtaaaatgtcacctcactcagaatagccattataaaaaaaaaaaaaacccccaacgctgacatagattcagaaaaatgggaacctttatttttggtgggaatgtaaatgagtacaatcattttttttttttttttttttttttgagacagaatctcactgtgtcacccaggctggagtgggctgactgcaatctctacctgcygggttcaagcgattctcgtgcttcagcctcccaagcagctgggattacaggggtgtgccaccatacctgagcctccataagtgctgggattacaggcatgagtcatcatgcccagccagataaaaagttattaataagctctggtgttctattgcctagtagggttactatagttaacaatattgcgtatttca

SEQ ID NO: 15686 - DNA, 549 bp, Homo sapiens
catatgctgttaactgtcaaataaatacatagtaaactatatgtattttaagtacatataaaaaagtaaattataataatattgcatggtacatcattttagtcataattgtaagtataggttgctttgtattttactttgaaattgacctaaatatttaaatttaaaatgcttgccctgttattgatgttaccatattacaactttggagaacgtgaccaaatgaaactacaattaaattataggttttataagcaagacaaagtaaatatgactatttagaaattttttagcaaatattaacagtaactggtacttagattatcctcattttctcttaaggaaatttttgaatatctcaaagagttaacgtatacatttgataattttctaccaaaaataattttatttgatttagaaaggtatttactgatagtatgcactgaagaatatgctaaattgttagccattttaatctaattaggtgtgagagtctgtaygtatatatatatattctcagtattctttcaagattctgagtaaagaaca

SEQ ID NO: 15687 - DNA, 481 bp, Homo sapiens
tacagcacccaaacacacagccccggaaaaaccatgctagcagccaatgtgtcccagactttacagttgataaaacagcttcccatgcattctctccttgtaacaaccttgtgaactgaatatgtctgaacagcctccactcagtcagcgtttacgtgggccaagcactgtgctagtgctttaaatgcatcctcccatttactctccaaaacagcctatgaagtaagtacttattctagcccattatacagaygggaacaccgaggctcaaagccgccaggtgattggcccaagatcactcagctggtcagtgaggagctggaagtccagaactgtgacatccctgccactgaactcatggggctgccgcatcaggattctgcctgcaggggtgtccttgctatttccaggctgagagtgtgataggatgggggagaagaacctttctttctttttcttttctttttttttttttttgaga

SEQ ID NO: 15688 - DNA, 503 bp, Homo sapiens
ggtttcwccatgttggtcaggctggtcgcaaactcctggcctcatgatctgcccgcctcagcctctccaagtgctgggattacaggcatgagccgctgcgcccggctgacaatgtctctttttatggaggcaggggtggggggtgcttacagaggagaggaggccagcgtgtcaggctgtaggaagagcccaggggctgtcttgggatcccaaagccgctgcagaattgaggcttgcgctggggtccgggggcacctggcctgtctgttcttgccagttggcctggacctggtccaccttctcaggccctcggtctctagcctgccaccgccacctcctccaccgccctgagaagaagtgccaggctttgctgggttctgctcccagctgtccccagctggtgagggacaggcgtggttaggggtctgcacaagaggccctggccacttctccggggacagccctcttcctctcccctagagtgtgggctgccatggggacgg

SEQ ID NO: 15689 - DNA, 503 bp, Homo sapiens
ggtttcaccatgttggtcaggctggtcgcaaactcctggcctcatgatctgcccgcctcagcctctccaagtgctgggattacaggcatgagccgctgcgcccggctgacaatgtctctttttatggaggcaggggtggggggtgcttacagaggagaggaggccagcgtgtcaggctgtaggaagagcccaggggctgtcttgggatcccaaagccgctgcagaattgaggcttgcgctggggtccgggggcacctggcctgtctgttcttgccagttggcctggacctggtccaccttctcaggccctcggtctctagcctgccacygccacctcctccaccgccctgagaagaagtgccaggctttgctgggttctgctcccagctgtccccagctggtgagggacaggcgtggttaggggtctgcacaagaggccctggccacttctccggggacagccctcttcctctcccctagagtgtgggctgccatggggacgg

SEQ ID NO: 15690 - DNA, 503 bp, Homo sapiens
ggtttcaccatgttggtcaggctggtcgcaaactcctggcctcatgatctgcccgcctcagcctctccaagtgctgggattacaggcatgagccgctgcgcccggctgacaatgtctctttttatggaggcaggggtggggggtgcttacagaggagaggaggccagcgtgtcaggctgtaggaagagcccaggggctgtcttgggatcccaaagccgctgcagaattgaggcttgcgctggggtccgggggcacctggcctgtctgttcttgccagttggcctggacctggtccaccttctcaggccctcggtctctagcctgccaccgccacctcctccaccgccctgagaagaagtgccaggctttgctgggttctgctcccagctgtccccagctggtgagggacaggcgtggttaggggtctgcacaagaggccctggccacttctccggggrcagccctcttcctctcccctagagtgtgggctgccatggggacgg

SEQ ID NO: 15691 - DNA, 511 bp, Homo sapiens
gcttcccttccctaaggatgaatagaaatctttagtaacttcatttggatagaaacaatatgtaaatgatatgtaaaagcaaatttctcaaaatttatgagggctgtattgcataattctatacaaacagtctggtgtgtgggatcctatttccctgaaaagatgaaaagataagctatcctatggtgaaaaattgaaggctgtatgrattgcaagggggggaaattatagttgaaatgctattatgaatctttttgaccagacctgccgaatataatattaaaatttaaacacactgtctcaaacattgctcaagaacttcacgaaaccccttcatgtggtcatgccctgttctcatggctgagtgcgcgctctgatgaatgttcccagaggacagggacaaagtgagtgtctcagctctctctgcatgatccttttaggaactcttctcacaggccccaagagcagaaatgtaacaaacatttattggccaaaaggcactcagttcgtg

SEQ ID NO: 15692 - DNA, 511 bp, Homo sapiens
gcttcccttccctaaggatgaatagaaatctttagtaacttcatttggatagaaacaatatgtaaatgatatgtaaaagcaaatttctcaaaatttatgagggctgtattgcataattctatacaaacagtctggtgtgtgggatcctatttccctgaaaagatgaaaagataagctatcctatggtgaaaaattgaaggctgtatgaattgcaagggggggaaattatagttgaaatgctattatgaatctttttgaccagacctgccgaayataatattaaaatttaaacacactgtctcaaacattgctcaagaacttcacgaaaccccttcatgtggtcatgccctgttctcatggctgagtgcgcgctctgatgaatgttcccagaggacagggacaaagtgagtgtctcagctctctctgcatgatccttttaggaactcttctcacaggccccaagagcagaaatgtaacaaacatttattggccaaaaggcactcagttcgtg

SEQ ID NO: 15693 - DNA, 512 bp, Homo sapiens
tgcaagctgcttcttccagcctccttcattctcacaagacctttgcctcactcacacagttcatcaaagggaggactgattgggctccatccaacccacctcccagactagggaaggatattcgaaactcatccccacgggctgtggctcctgctgccttttccatccatgaataagataatggggtactattcattcaacccatatttattgataactaagtaccaggcagtgtgccaggttctagaaaacagaagaagtttaccgctttgagggagaggtagatggtagataataattgaaaacttacaggttgyaataagtgctataaagggaatggactttctagcaagcaaggtgaaagaaaatgctggtgcagcggggaggggggcctctcttgtcagataagtctagggaaacctctatatggcaatggcttttaaaacgaggcctccagcctgggcaacatggcgaaacctcatctctataaaaaatacaaagattggctgggc

SEQ ID NO: 15694 - DNA, 512 bp, Homo sapiens
tgcaagctgcttcttccagcctccttcattctcacaagacctttgcctcactcacacagttcatcaaagggaggactgattgggctccatccaacccacctcccagactagggaaggatattcgaaactcatccccacgggctgtggctcctgctgccttttccatccatgaataagataatggggtactattcattcaacccatatttattgataactaagtaccaggcagtgtgccaggttctagaaaacagaagaagtttaccgctttgagggagaggtagatggtagataataattgaaaacttacaggttgcaataagtgctataaagggaatggactttctagcaagcaaggtgaaagaaaatgctggtgcagcggggaggggggcctctcttgtcagataagtctagggaaayctctatatggcaatggcttttaaaacgaggcctccagcctgggcaacatggcgaaacctcatctctataaaaaatacaaagattggctgggc

SEQ ID NO: 15695 - DNA, 550 bp, Homo sapiens
tttttgagaaggagtctcgctctgtcgcccaggccggactgcggactgcagtggcgcaatctcggctcactgcaagctccgcttcccgggttcacgccattctcctgcctcagcctcccgagtagctgaaactacaggcgcccgccaccgcgcccggctaattttttgtatttttagtagagacggggtttcaccttgttagccaggatggtctcgatctcctgacctcacgatccacccgcctcggcctcccaaagtgctgggattacaggcgtgagccaccgcgcccggcccaaattatttctttgktaagaaagccccgccaccccccaaaaaaataaaggaatgaagggaaaggagtgtgtgtgtgtaagcaagaaagcagttatccctgttccagtgggttcttaataaaactcaattacacatttcaattgctctcttgtgactttctgtgggttacaagaaaagaatatatatatatatatattgagatggagtctcgctctgtggcccaggctggagtgcagtggcgcgatctcggctctct

SEQ ID NO: 15696 - DNA, 548 bp, Homo sapiens
ttactgaactataactttatgcaaaaagcacccaaaccttaactgtacagatcaatgaatttttaggtatgcatggacctgtgcaagtaccgctcagatcaaaggataggtttccagcccccagtgggcttgcttgtttycccactgagttcatacccttaaccactctctagacttctgacatagctttgttttttctgcttttgaactttttgtaaatggacttattcatatgtggtattttgtgtctgccttcttttgttcaacaatacatctgtgaaagtcatccatgttgtcattagtagtaatagcttatttttcattgttgtgttgtatcccattgtgtgcatatgatgtttgagttgttttgaggttttgactatcgtgaagaagactgctgataacatttttgtaagcaataacttttttttttgttttggaggaagatatgtaacctgaaacagaacttctgaatcataggttaatcatatttttaacattagtacatattttgagaaagtgtttcatatgttttataatggtaccat

SEQ ID NO: 15697 - DNA, 511 bp, Homo sapiens
taaatttattttaattttaattttaatttttattattttttgagacagagcctcgctctgttgcccaggctggagtgcagtggcgtgatctcggctcactgcaacctccrcctcccaggttcatgccattctcctagctcagcctcccgagtagctgggactacagccgtctgccaccatgcccagctaatttttgtatttgtagtagagacggagtttcaccatgttggccaggctggtttcgaattcctgatctcgggtgatccacccgccttggcctcccaaagtgctgggattacaggcgtgagccaccgtgctcagtcatgctttattattattaataattaaaaattttaaaacttatatctgaactatttggtaaaagggttaccttttttttttgccaaaaatttcagagcttaggtcgcaagtgtcattaacgcccccttctttttccctcaatttgttatagtggtaaaatgcacattaacatttaccatcttaaccattt

SEQ ID NO: 15698 - DNA, 524 bp, Homo sapiens
gcagtggcgtgatcatgcctcactgcagcctcgacctccctgggctcaagcaatcctcccacttcagcctccagagtagctgggaccacaggtasgcaccaccacgcctggctagatttttattttttgtagacatggggtctcactatgttgcccaggctggtctccaactcctgggcttaagcaatcctcccacagtggtctcccaaagtgctgggattacagacgcgagccaccatgcccagcctttattattattatttttaagaccagtcgagtgcagtagtgagatggggagaaagagtggaagaagaagtttgacgtgtaattcactgggaacagttgagatactcaccatcttcagagcagccaaggaccctctcctaacctaggcctatccagttgttcctatgaagtccttggatgtatgtgtgctggatggggtgggttgtccttaaagtcaggggcacctgcagtgttgttctttggtttctcagcatcacctgggcctgtcaagaatcagg

SEQ ID NO: 15699 - DNA, 561 bp, Homo sapiens
gaacaattactgctaaatttttaacattgaaattttgttttactttgctcacaaaatagggccaagtaactcaagagttcactggacattgtctttgaaarcataaaaagactaggctctcaaaaacagagaaactgagtgcttttggctttattttgactgtttcttcctctaaactatgatttcctatcatctttgaaaccaagcaaaataacagctcttaaatgaaagaagaaaccatatctcaaaggagattagcttaaaccccagtgtaatctctccattttctcctacatctaaggattgcattgatcatttctaagagtcactaccagactgacaaaataaatctttccaaaagtagcagagaaattgccagattttcactggtgtgagaatctataagtatggacattgatattctcccatccttaccctgcctcaggacatagtctagtgtttcttaatgaaaagcaatttatataaaaaaattctcttttcaaatagaaagttactaggttgagatatcttacaagactgagcagaagacaaacgcagtac

SEQ ID NO: 15700 - DNA, 1010 bp, Homo sapiens
tcacagttctggaggccacaagtccaaaatcaaggtgtgggcagaaatgcgctccctctgcagactcctggggaggatgcttgtttcttccagctctgcgactgtggtgcctgcagccattggaaccagctctgcacggctcagacctgggtgatgaggacacagctttgcaggtgggcagccacatccccagggggagactgtgggcctgtggcagggtaggggcaaccagtgcaggggctccccattgttgcccctgagctcctggggcttgtggagaaagacaggtggatgcacacatactgcagctccctgattctgagccttggtttccctacctgtgaaatgggcacccatggcagctcagaagtgtctgggagcatcccctgtgggggaaggtgtggggggctgctggggcacagtcatggggaaccccagtccccctctccatgtgcttccctcaatgctccctgatgccagcagtcctgcccccgaacagaaaggggcattcctgtgagttccttgtgtgggggactggtcacagagactccccaagtgcagggcagggtggagggaggctgaggggtggttgaatggacaggagaagagctctctccagtcccttgggtctgggtggcctggggagcatccatttgggcaggcagctggtggggctggtggctgagccactgtggctcggggaccccaggccaggacagagtagggtgggcagggagagcagagtgygagcatatggggcaggacaggtgtctcctggacagaaagagccctggtcactcatggctgcagcatagccatggcgacaggaaagtgctgctgtacattgtgctcctggggctggctcccaatggacacccaacagcatctcccccattgtactgtgggatgctggcagtggtgctgggcactggggtaagagccttggcaagcccttcgctccctgggtgtgagactttgggctcctggatgcctgggtttctgtgtcctat

SEQ ID NO: 15701 - DNA, 1010 bp, Homo sapiens
tcacagttctggaggccacaagtccaaaatcaaggtgtgggcagaaatgcgctccctctgcagactcctggggaggatgcttgtttcttccagctctgcgactgtggtgcctgcagccattggaaccagctctgcacggctcagacctgggtgatgaggacacagctttgcaggtgggcagccacatccccagggggagactgtgggcctgtggcagggtaggggcaaccagtgcaggggctccccattgttgcccctgagctcctggggcttgtggagaaagacaggtggatgcacacatactgcagctccctgattctgagccttggtttccctacctgtgaaatgggcacccatggcagctcagaagtgtctgggagcatcccctgtgggggaaggtgtggggggctgctggggcacagtcatggggaaccccagtccccctctccatgtgcttccctcaatgctccctgatgccagcagtcctgcccccgaacagaaaggggcattcctgtgagttccttgtgtgggggactggtcacagagactccccaagtgcagggcagggtggagggaggctgaggggtggttgaatggacaggagaagagctctctccagtcccttgggtctgggtggcctggggagcatccatttgggcaggcagctggtggggctggtggctgagccactgtggctcggggaccccaggccaggacagagtagggtgggcagggagagcagagtgcgagcatatggggcaggacaggtgtctcctggacagaaagagccctggtcactcatggctgcagcatagccatggcgacaggaaagtgctgctgtacattgtgctcctggggctggctcccaatggacacccaacagcatctcccccattgtactgtgggatgctggcagtggtgctgggcactggggtaagagccttggcaagcccttcgctccctgggtrtgagactttgggctcctggatgcctgggtttctgtgtcctat

SEQ ID NO: 15702 - DNA, 576 bp, Homo sapiens
ggctatcatgacaaaatggagcagcctactatatctacatatacaactatgggggacctagttttatctcatttaccacaatgttttcaatcattttttggatgacataatttttagcctcttctctaaatgcttcctcaagctttccttgccttccagccactgcaaatgacttgcagtttcccctacatggcacctgacccttgtgcctccctccctctgcccatggcccagaaagccctttcctgtgccctctggcttcctgataaactcctatcatcttcaagagccagttcccatgccagctctccccaagtgctccactgaggcttccgtaacacctctgttyccacatcgggttgactgtctttgttttgtcattgcttgctctggctgtgtctccctcattagactgggatgccttcaaggtagggaccctatctgggtcagcttggcaccccaaagcgtaccacagcacctgattctgaggaggctctcagtagatatctgttgagtaaccagaatgtagggtggtcctgatggtttctgacattgaatagaaaacagctccctatt

SEQ ID NO: 15703 - DNA, 721 bp, Homo sapiens
tgaagtcatttaacttttctgagcatcaacacgggaaaaaaaagaggtggtcttcccactccgggcagaggctgtgggagtgcagcacacactgatgagcatttgggagcctatccaagaggtgggacgcgaaaccatgtggttggcatggacgtggctccaggagatccagtgtggtggagcttgggacagggtttttcctgcatctgaggggaggccactcacctctctggaaggcacagcacagccccggctggcagtccctctggttgtcacagatggtcccattgctgcccctggtggccattttggtgcagtgaccccagacacacagctggtctccacagcactcactgtcccgggtgcagagctgcagacaggtggaaagagcctagagccagcggcttagggactgggggcctgctgagagcccagcctgaagataccacagataggccaacctgcatcctcccattgtagagacaggcagaccaggctgagatttcagtgaaagtcagtgggacagaggtgggagcttggctggcgagacatgggggtcagaaygctggaaaaatggcaccgggaggactcatggatctgagtctttctccacagcttaagattttgcaaagaacagcagggggtctttgtggtccccacagacttgtgctgttccctttttccttaggtccctaggtccaggcccaaagaggcaaggccc

SEQ ID NO: 15704 - DNA, 993 bp, Homo sapiens
ggactacaggtgtgcacaatgcccagcaaatttttgtatttttagtagagacggggtttcaccatgttggccaggatggtctcgaactcttgacctcgtgatcctcctgcctcagtctcccaaagtgctgggattacaggcgtgagccaccatgcccagccctttaatttgttatattgggtttgtaaggcacatagattaattgattaaactgtgtgtagcacactgaaataatttattcctcttccaaagcctcgaaggagaaagaccagatattgctccttccttgcctctctaagtcactctactcttctcggtatttgtggcccttcaggtctgaggcaaaagcctcatggtttaatacacatggcagggaataccgaaggcatactctctactcacttagactcaattttcaatttacctcctatcaacaaatatttcaatatatcctaaagggtaaataagactatagaaaaatgaatagaatgtaccactgattgtatttagaatttttttttattaaaataacttccatcttttcattcatcacttctgggtacactgcaatggtgatgactgtcatgtgttgtagagccacagaggcatatgcatgtgggattagtagakaaattgaacctattttcctttaattctctccctttagaacttccctttaattctctctttctttttctctttgtaaaagctgtaagccaatcagtgttgttggttatgaatcaggtagcaattgactgattagtttcaattggttgtaatgagcaaaagttcccggaaaatttcttgccctttccatgctctctgagaacacattgaagtaaatcaagttcagttttgagaatcaaaatgaatcaagaaaaacaacaaatttaatgagctgtaagaaagctctattaggattgaacaaaatacaggaactggtctagggtatctataaccactcaaagggcattcaatttataaattccaccc

SEQ ID NO: 15705 - DNA, 600 bp, Homo sapiens
tggaataaaaayttaaacagaagagccaaaactataaaaatcctagaagaaaatgtgggataaactctttggcacatgaatgtaaattaaaaccacaatgagatataatcttatgccagtcagaatggctgctactaaaaagtcaaaaaacctcttttgtaatttttttttatctccagttaaatcctttcacctttcaaaattctttctggggattaggtcctcaggttttactttgattctaagagatatagggaatgattccaattagttttgttgttgtttttccttcagtaagagtcagttgctgttgatggtaatcaaagtccccttattaatccaaggttcatgatggaaactttgcttatgtctcctgctctattcctgaccacttatagtaaactctggaggttcttactcatcctatgtatttttatttgctaatcattttgcttgagatgtctttcctggcttcctttctctttatgtgtctggctacttcttatctttttctgtcagggttatttcccttggaactccttacccataacctttacctcatcctcatgttagaagagatggctctccccagccaggcag

SEQ ID NO: 15706 - DNA, 600 bp, Homo sapiens
tggaataaaaacttaaacagaagagccaaaactataaaaatcctagaagaaaatgtgggataaactctttggcacatgaatgtaaattaaaaccacaatgagatataatctyatgccagtcagaatggctgctactaaaaagtcaaaaaacctcttttgtaatttttttttatctccagttaaatcctttcacctttcaaaattctttctggggattaggtcctcaggttttactttgattctaagagatatagggaatgattccaattagttttgttgttgtttttccttcagtaagagtcagttgctgttgatggtaatcaaagtccccttattaatccaaggttcatgatggaaactttgcttatgtctcctgctctattcctgaccacttatagtaaactctggaggttcttactcatcctatgtatttttatttgctaatcattttgcttgagatgtctttcctggcttcctttctctttatgtgtctggctacttcttatctttttctgtcagggttatttcccttggaactccttacccataacctttacctcatcctcatgttagaagagatggctctccccagccaggcag

SEQ ID NO: 15707 - DNA, 604 bp, Homo sapiens
catcatcttagttatgattaactgactagacagtgagcaaccaaggaaggacaatgtttctgtgacctttttttttaatggttacagtatgactacagcaggtctaactrtgaaatagatatttacaaggtgatttctttaaatgtaatttttattttgtcttatttttaagttcaatatgtatctggaatatttaaaagacagaaatcaagcccttccctttcccccactattatttctttaggcccagcctcctggtgaaagttgtattaacaatgtttcttaaggagtcttttgttcatctcaaaggcgttaagaatagtagtttgtagtatttctatgtttagctcactttccttctgtggatatacaaaaaattcttggattttggacaggcatcttttcatttcacttggcttgcagcctcatttctagtgggctgaataaatatctgtcttgaaattcagcactcttcaaccctttgttaatgtgcagctgagagcttcttgagagcacaaagccatgaactcatacaaccaggtgcttaggtaaaaatgctttaaacatcccttgccctcctgtctctgcaacctttttcaacttt

SEQ ID NO: 15708 - DNA, 393 bp, Homo sapiens
cccaggtaaatggagttatgttcttaggaggattatgactgcctctactgtgtcatgcaggttgtcagggaagtaggggaaagcgggcaatctcaggtttcactcagcttccatgaaacccaaaaggcttcagagtccttacacaaaaggggattaggcaggggaccagtcaatagagctcttgctccatttccccccctagtcccatgaggtagccargagttctattcattgtttaaccctgtagccatgtctttgggaattggcagataacctgtaaagaaaatcttctcaaaatctagagttaccaggctcacatcacccaatttcaaccccataattgttaactgccttacatactttaaagtacgtacatggaagacaagcttatag

SEQ ID NO: 15709 - DNA, 555 bp, Homo sapiens
tacttaaggttaaggctttctttgccgtttctctcaagaaatagcagcaaaatcaacatcatcagcaactctctgagtatgaaagtatttctggcaaaaggcattaagctatatgatatgtaatttgcaaactataaagcacagataaaaggttgcctttgctgacttgtttcgttatctctttcagagcatgcaatgtgcaagagactagattggggaggtggcaggaagttattttattcaaaatattgaaattccatyatagcaaaaataattttaattatttaaaccagcatattttctgttcctcctgaagggatgttaagtaaaatgagaaactctgttagaaaaattgaaaaatagaaatatctaatttataaagctagatatgcaaaagttctgtaaatataaaaaatagtcatgatatcatctaaaatttttaattttccaaatatattatgagacaaatttttagcaaatctacaataataattgataattactaatgatcaaaaatgactattcttagagaacttaatacttctacagatattg

SEQ ID NO: 15710 - DNA, 613 bp, Homo sapiens
tgtagagttggactgcctagtcttattttctttggtaaatttagactagtaaatgcatgattctactgagggatattaatcaacccataacagayatggagatatgtaaaaggtaatttaacaaactaggcattggtttacttatattttgttataggtaaactgtctaataaagttggaatttaggaagtattcaataatagagagacttatgtgtacaaattctttgagactgagtgccacactaacacacatgaattgtggtgtctaaaataatcccagatccagttggtaaaaaaagttataggataatgtgataacagtttaaagcagtcatatattaaatatatatctatatgcacacatacacatgtatgtgggtatttctaaaattgtatcagacaaccaagacaaatatattcgatataatattcatatgatttgaatgtaaaattatgcaaatgtgtaatagaaattctgatcgttctgggaaaataatgatcaatgtgaaaattccactttgaaagtctcaaaatctgctgaaaaaattcatgtgcaagcacaatgatattataaaatataattaaaaattaaaaacataaactgtataaaa

SEQ ID NO: 15711 - DNA, 613 bp, Homo sapiens
tgtagagttggactgcctagtcttattttctttggtaaatttagactagtaaatgcatgattctactgagggatattaatcaacccataacagatatggagatatgtaaaaggtaatttaacaaactaggcattggtttacttatattttgttataggtaaactgtctaataaagttggaatttaggaagtattcaataatagakagacttatgtgtacaaattctttgagactgagtgccacactaacacacatgaattgtggtgtctaaaataatcccagatccagttggtaaaaaaagttataggataatgtgataacagtttaaagcagtcatatattaaatatatatctatatgcacacatacacatgtatgtgggtatttctaaaattgtatcagacaaccaagacaaatatattcgatataatattcatatgatttgaatgtaaaattatgcaaatgtgtaatagaaattctgatcgttctgggaaaataatgatcaatgtgaaaattccactttgaaagtctcaaaatctgctgaaaaaattcatgtgcaagcacaatgatattataaaatataattaaaaattaaaaacataaactgtataaaa

SEQ ID NO: 15712 - DNA, 613 bp, Homo sapiens
tgtagagttggactgcctagtcttattttctttggtaaatttagactagtaaatgcatgattctactgagggatattaatcaacccataacagatatggagatatgtaaaaggtaatttaacaaactaggcattggtttacttatattttgttataggtaaactgtctaataaagttggaatttaggaagtattcaataatagagagacttatgtgtacaaattctttgagactgagtgccacactaacacacatgaattgtggtgtctaaaataatcccagatccagttggtaaaaaaagttataggataatgtgataacagtttaaagcagtcatatattaaatatatatctatatgcacacatacacatgtatgtgggtatttctaaaattgtatcagacaaccaagacaaatatattygatataatattcatatgatttgaatgtaaaattatgcaaatgtgtaatagaaattctgatcgttctgggaaaataatgatcaatgtgaaaattccactttgaaagtctcaaaatctgctgaaaaaattcatgtgcaagcacaatgatattataaaatataattaaaaattaaaaacataaactgtataaaa

SEQ ID NO: 15713 - DNA, 537 bp, Homo sapiens
attttcaagtgaaaataatttatattctgctgcattagccrgtgtgttctacagatatcagtgctaagagtttactctgttacttaagtcttattattgtttattttccactgctgacaaatacaaattgtaaatatttatggtgtaaaacatgatgtttaaaatagtgaacattgtagaatggctaaaccagtctaatatgtgcattacctcacataattttcactttttatggtataaacacaaaatctactctgttcaaaattttgaaatatacattgttgttaactatagtcaccatgttaatagatctcttaagtttatttttcctgtctaactaaaattttatatcctttgaccaatatctctccaactcactggcaattgctattctactttttgcttcagtgaggtaaactatattttattccacgtataaatgagaaaatcttttatttcttattctgtgcctggcttatttcacctaacataatgttcttcagattcatccatgttgtcataaatgatggggtatcc

SEQ ID NO: 15714 - DNA, 539 bp, Homo sapiens
ttttctttgccccagaaaaaaaaaaattcaggcagtatatcaggaaaatgtaatgtaaaaaaacttaaagtctgtgttccaattattataataaaaaagcttctaacatattattcttagtaaaaatgtgaaagtatttgctttttctcaaaaaatgtaaagatattgttaaaatattttacaargtgagatacacattatttattaaatatttaattaaaaagctaataaaaagccagatattctcatatttgttaccattatagtgtttaagtagatatctggggctggactcagtggctcccgcctgtaatcccagcactttgggaggccaaggcaggcggatcgcttgaggtcaggagctcaagaccagcctgggcaacatggcaaaaccccatctttacaaaaaataagaagttagccaggcatggtggtgtgcccctgtagtcccagctgcttaggaggctaaggtcggcagatcggaacccaggaggttgaggctgcagtgagccatgatcatgcgactgcactccagactg

SEQ ID NO: 15715 - DNA, 512 bp, Homo sapiens
aatgtacagtaaaaatatggtatgataaccctgtaggatcaccattgtatatgtggtccatcattgactgaaatgttacrtggcacctaactgtatgtcaaaatgctaaccatgttatggtatgtagcaggacaacacgtaatttcccccctttttctattttctaaattttaaatgtgattttattacctttataattttaaaaggtataataaacatcaaagcaaataacataaaaactttttgaaagcctacatgactaaaacggatgtctctgatgaggtttttgcttaggactttcattttgagagtataacaacaaagatttataatgctttatgagatgctggagggcaactgccaattcagaaaatgctttagtccaaatcaatggaaaaattaactgtttctaagactcaagacagtttggcactcttatctaaaactttccatttctctattatactatgcctggagaatgtagagcagaagtccatcctcaaacttcagtg

SEQ ID NO: 15716 - DNA, 544 bp, Homo sapiens
tgcatacatacatttgtatatacatatatagaaagctttaatattatggaaaataattccttcctctcactttattcttcatcacaaggttgtttattctgggatctgtgcctcttcatataaattttagaatagcctatgtctaccgaaaaccttactgagattttgataggaattgtattaaacctataagccatttaggggagaattgatatcttaaatgaaaattcatgaacataatttatttctccattcatttgggtctcctttgatatcttttgtcagaattttgtaatttttgtacatatttgtacacatttatattttgtatatgttaaattacttcgatttcaaaaggagaatctgcaaaaatatctacaattctcattaacttgaaataaaatcctaagctccccactgactgaatggacccccttgtggtgaaggggaccccataataactttaaaactgagttcctcaccatgacaggataggaggtcagacacgccttgtctaaatctctrttttgtggtttagatacaa

SEQ ID NO: 15717 - DNA, 578 bp, Homo sapiens
taattcatccctcagctgtatctattctatctatttaaatatgtgctttaattctcacrtatttccatatctagtattataactggctttttaatgttttcatgacaatatactttcttacgtaagttactatgattattaaatgaataaaattctagaactttttaatattgatatatctgttcttgatacaatgtgtgtaatacagtgcattttttgttatctatgaaaataaaggtggtcttcaaatttcttgttagtttggtttatgggctcattttcctctggaacaggtttgtctgtcaaagaatgtgtatgggggaaggccaagcatacgtctggttattctctatgggcttaaggagtagtggcagatgagcttcagagtcctgtcttggtgaagggactcagcagtcatattgtttggtattgtttttagagcactctgagttttagaagtctggaaaatggggagaaaacatcaaatggaactgttgaggagcaatgagtgggaaagaagagaatcaaagagatggtggtgtgctgacagaagaaaatgtttcaagaaggtagcacca

SEQ ID NO: 15718 - DNA, 578 bp, Homo sapiens
taattcatccctcagctgtatctattctatctatttaaatatgtgctttaattctcacatatttccatatctagtattataactggctttttaatgttttcatgacaatatactttcttacgtaagttactatgattattaartgaataaaattctagaactttttaatattgatatatctgttcttgatacaatgtgtgtaatacagtgcattttttgttatctatgaaaataaaggtggtcttcaaatttcttgttagtttggtttatgggctcattttcctctggaacaggtttgtctgtcaaagaatgtgtatgggggaaggccaagcatacgtctggttattctctatgggcttaaggagtagtggcagatgagcttcagagtcctgtcttggtgaagggactcagcagtcatattgtttggtattgtttttagagcactctgagttttagaagtctggaaaatggggagaaaacatcaaatggaactgttgaggagcaatgagtgggaaagaagagaatcaaagagatggtggtgtgctgacagaagaaaatgtttcaagaaggtagcacca

SEQ ID NO: 15719 - DNA, 570 bp, Homo sapiens
gcactgtttctgacttacatagtttatgaaaaattgagtaattcggaaggcaaatcagaaaatgtatcatggcttatttaattgctattcaactataatacatgatgatagatgcctgttttgattgtagcttagcatgcccttaggaaataatgtgtttgtacatattcattgttataactgacctgttacagcaactggctagcagtaatgccaaaacaaagattcattataaatagatcagtttattttagtaayagtttaattgtgactccataatcattaacttttacatgccaattaaaaatatcaaataattctcccactactttggtttttataaatgaatagtgactgtgaaccatcttgcccactctgcccttatcccacaattcaccgttatgtttatatctaaatccttaggttgccgggcacagcttacggataagtgggtggtttgcatgtcttcagaatggctctgaaggcatatactgacagaagcactaattagtgaagcgtatttcaaagtaaataatttggtgtagagaacttcaccagaagcctcgttca

SEQ ID NO: 15720 - DNA, 570 bp, Homo sapiens
gcactgtttctgacttacatagtttatgaaaaattgagtaattcggaaggcaaatcagaaaatgtatcatggcttatttaattgctattcaactataatacatgatgatagatgcctgttttgattgtagcttagcatgcccttaggaaataatgtgtttgtacatattcattgttataactgacctgttacagcaactggctagcagtaatgccaaaacaaagattcattataaatagatcagtttattttagtaacagtttaattgtgactccataatcattaacttttacatgccarttaaaaatatcaaataattctcccactactttggtttttataaatgaatagtgactgtgaaccatcttgcccactctgcccttatcccacaattcaccgttatgtttatatctaaatccttaggttgccgggcacagcttacggataagtgggtggtttgcatgtcttcagaatggctctgaaggcatatactgacagaagcactaattagtgaagcgtatttcaaagtaaataatttggtgtagagaacttcaccagaagcctcgttca

SEQ ID NO: 15721 - DNA, 570 bp, Homo sapiens
gcactgtttctgacttacatagtttatgaaaaattgagtaattcggaaggcaaatcagaaaatgtatcatggcttatttaattgctattcaactataatacatgatgatagatgcctgttttgattgtagcttagcatgcccttaggaaataatgtgtttgtacatattcattgttataactgacctgttacagcaactggctagcagtaatgccaaaacaaagattcattataaatagatcagtttattttagtaacagtttaattgtgactccataatcattaacttttacatgccaattaaaaatatcaaataattctcccactactttggtttttataaatgaatagtgactgtgaaccatcttgcccactctgcccttatcccacaattcaccgttatgtttatatctaaatccttaggttgccgggcacagcttacrgataagtgggtggtttgcatgtcttcagaatggctctgaaggcatatactgacagaagcactaattagtgaagcgtatttcaaagtaaataatttggtgtagagaacttcaccagaagcctcgttca

SEQ ID NO: 15722 - DNA, 519 bp, Homo sapiens
ggttatagtagtgacagtataattatgtattatatctcttatgtaatagtaatggtagtgatttgcaygtgtggagcacctgtagggtgcaggcccgctgaggacctcatgcacgctgttgtatctcattatgtcaatgagaaaactgcctttgggaatggtagtgaactttgccagtgcagaacagtaatcctagttttgaatccagatttttctaacattttatttctagtataaagagtatttattttgttttacagtcattaaaaaaaaaaaatacagtcacatggttcaaaaatcaaacctaggcagagacacactgtcgcttcccctgcccaccccttccacccattttcccacctgctccctctgactttccagtctcctctgtaacctccttgttctctggcatgagtacgttcgtggtagcatgcttcattacttgtgttgcttgttttttgttttttttttttaactaaccatatatactggagtaccttatcagagtgtccctctttg

SEQ ID NO: 15723 - DNA, 550 bp, Homo sapiens
agagaaaattatgggataatagaagagaacaatactgatcttaaagaaggcagaatttgagatggaaaaagaatggatagatcttaaagggatggatggactcattggtatggggcagtagagaatgaaaaatgggtttaaagtcgaccacactgacaacaatataaagaatagtttagagagaatactggagatagtgagatccctctagctacatctctagctattgttccagacaaagcgttaatggcaatttgaattaaggcagtattagtgtcattagaaaagaagaattcactgaagagacgggagaagcaattgtgatctcaatgtgttggttaggataagagaaaggrggaaattaaaaataatccagataagatcagtaaaatgaccaaatcattctggtttaggggctacttctgcctgggtttatgacctaacttgagcattctacatattcgttcttccctatgcccaatgtttggtttagagatgggtctgtgatgcaagtcagtctgccatactcaaatctaggactttggcttga

SEQ ID NO: 15724 - DNA, 550 bp, Homo sapiens
agagaaaattatgggataatagaagagaacaatactgatcttaaagaaggcagaatttgagatggaaaaagaatggatagatcttaaagggatggatggactcattggtatggggcagtagagaatgaaaaatgggtttaaagtcgaccacactgacaacaatataaagaatagtttagagagaatactggagatagtgagatccctctagctacatctctagctattgttccagacaaagcgttaatggcaatttgaattaaggcagtattagtgtcattagaaaagaagaattcactgaagagacgggagaagcaattgtgatctcaatgtgttggttaggataagagaaagggggaaattaaaaataatccagataagatcagtaaaatgaccaaatcattctggtttaggggctacttctgcctgggtttatgacctaacttgagcattctacatattcgttcttccctatgcccaatgtttggtttagagatgggtctgtgatgcaagtcagtctgccmtactcaaatctaggactttggcttga

SEQ ID NO: 15725 - DNA, 1272 bp, Homo sapiens
tctttccccacctcatcataacccttggaggtgagaactgttatttcccccaaaattttttttcagaaaaggaaattgagttccagagaggttaagaaacttgtccagagctatgtagttaatcagtggtagggctaagagtttgataaatcccaaagcttgccagctgaagaaaagaagaggttttaattgttgacaatgtaaataaatttctaaaaaggaattttctaatatcacgtcagattccttacaagcacagtatacctcctagcatctcaatatggggcccagcttcagacctttgatacttctaccagaaacccatataacagagggcagcgctatggaatattttccacaggaaacatctgcccaaatatttcagaggctgcaaagtgtcscaagagggagggggggaaaactgagaccagtcacaaggatagtgataagtccaggtaccaggtgaactgaaatggagagaaaacgcaggcttcctgctttccgctccctctggaagcatgctctggtaaaataaactctttccaagactcgggttcccaggttagtgatctggttttcttctcgtaggaagtgagctgtctctcaatcagaaggtgggggaagggaaaattattgccaattactccaaataagtaagcaggaagattcagacatttcatgtctttacagttaagagacctccactttattctaagagtcagtcacagcccggccacaggatagacattctttgagtgtttataggagaatcaatttcaaaagattttttaggctgggtgcagtggctcacgcctgtaatcccagcactttgggaggccgaggcgggtggatcaccggaggtcaggagttggagacccacatggtgaaatcctgtctctactaaaaattcaaaaattagccaggtgtggtagcacaggcctatagtcccagctactcgggaggctgaggcaggagaatcactggaaccagggggcagagttgcagtgagctgagattgcgccatagcactccagcctgggcgacagagtgaaactgttgtctcaaaaaaaaaaaaaaacaacaacaacaacaacaacaacaaacaaaaagaaaattgctaccaggaaacaataaaacaatatatatatttttaaatgaatgtctttgagtggaaatagagtctgcagtcgtcctgaatgtactgttcagactcattgttccttatatttcaacttcacatgcgcttaatgagaactgccccccatgtaccag

SEQ ID NO: 15726 - DNA, 380 bp, Homo sapiens
gaaataaaatataatttaattagttaatcagagtatctccctagagacacaaaagggatggcaaaaactgtagggtacctagggataattataacaagagtctcaagttctctactaagttgatttaaaattttagtctatatctttgttttttaaagactgaggaatgttttatcatcttcaacaatggaaatacttaacacttcaatataacgattatctacaaattgatatttgaattcaatttaattcctttcaaaaaaatttttaagtctttatatagaacatyggccaacaaactatggcctgtgggccaaatctgacccattgcctgatttcttaaattaagtttattggaacaaagccctggctgtttgttc

SEQ ID NO: 15727 - DNA, 548 bp, Homo sapiens
ctcatgcctgcaatcccagcattttgggaggccaaggtgggaagatcacttgagccccgcagttcgagtcatcctgggcagcaaggagagactccccctctactttaaaaagtaaaaataaagaaatctcgtacytaagaagataaacataggtcatgggggtatatattcaagcaactaagactcactctgacagttgtttactacatcagagtaattccattcatagggataaggatcctactgcatagaaaaactttaaccaaaggccaggcacggaggctcacgcctgtaatcccagcactttgggaggctgaggcaggtagatcacctggtcaggagttcgagaccagcctgaccaatatgatgaaaccctgtctctactaaaaatacaaaaattagccagacgtggtggcatgcgcctgtaatcccagctacgtgggaggctgagacaagagaatcacttgaacctggaaggtggaggttacagtgagccaagatggtgccattgcactccagcctgggctacaagaacaaaactctgtctc

SEQ ID NO: 15728 - DNA, 557 bp, Homo sapiens
tttgaaacttttttcaaaaaatgtgtatggattgtttttctcttcctgagaactaaattaacactatagtgtttttttgttatatgatcccttttcagcaaagtcaataaacatttattaagagttgtggttgggtgcggtagcttacatctgtaatcccagcactttggaaggctggtggatcacttgaggccaggagttcaagaccatcctgggcaatgtggcaaaaccctgtctctactaaaaatacaaaaattagctgggcatagtagtgcacgtctgtaattgcagctacttgagaggttgaggcacaagaattgcttsaacctggtaggcggaagttgtagtgagccgagatcgtgccactgcactccaccctggtgacagagtgagactgtctcaaagaaaaaaaaaagaattgtgtgtatatgtgtgtgtgtgtgtaacaataaaaacaggtagcagtcaatgagttattgttctaggactgtttctacccactttacaaatataaatcattgattgcaatagctctgtgatagagtattcccatttta

SEQ ID NO: 15729 - DNA, 557 bp, Homo sapiens
tttgaaacttttttcaaaaaatgtgtatggattgtttttctcttcctgagaactaaattaacactatagtgtttttttgttatatgatcccttttcagcaaagtcaataaacatttattaagagttgtggttgggtgcggtagcttacatctgtaatcccagcactttggaaggctggtggatcacttgaggccaggagttcaagaccatcctgggcaatgtggcaaaaccctgtctctactaaaaatacaaaaattagctgggcatagtagtgcacgtctgtaattgcagctacttgagaggttgaggcacaagaattgcttgaacctggtaggcggaagttgtagtgagccgagatcgtgccactgcactccaccctggtgacagagtgagactgtctcaaagaaaaaaaaaagaattgtgtgtatatgtgtgtgtgtgtgtaacaataaaaacaggtagcartcaatgagttattgttctaggactgtttctacccactttacaaatataaatcattgattgcaatagctctgtgatagagtattcccatttta

SEQ ID NO: 15730 - DNA, 644 bp, Homo sapiens
taacgtgcagcaacatgcacttattaacaatgaaatctagcttctgtttttttttcctatgcatcttgtgagagcatctttagctcatcaatttctcttgataatttcaactcagaagagctaagcatcatctgcagatttaacgatttcattgaaaaaaaaatcctccagatcaggtattttagaatattaaataacaccaatcctgaggcccgtctgtaaccactcaaagggtccaccttgcccactgcctagacagagccaattcatcaacacgggggaattgcaatagagaaagagtgatccatgcagaaccggctgtgcgggagacyggagttttattattactcaaatcagtctctccgagcattcggggagcagagtttttaaggataatttggtgggtggggggaagccagtgagccaggatactgactggtcaggggtgaaatcgtagagagtaaagctgtcttcttgcactgagtcagttcctggctgagggctacaaaatcagacaagccagtttattaatttgggtggtgccaactgatccatcaagttcagggtctacaaaatatcttgagccctgatcttaggaggagtttagggagggtcagaatcttgtagtctccagctgcatgact

SEQ ID NO: 15731 - DNA, 565 bp, Homo sapiens
agagatctgtttaagaaccataaagcgtagttgaagttaaactcatgaaaccctgggtattagttacgaattcgtttaagtatagaaatgtactggtgtgttgatgagaaatggcctgacagtctagaatattactcctgaatgtgagtctggcacaggcttacaccttgtcactgattgtttcctggaacagttagattacaagttaattatattaattgttgctgaatagagagtaggtattttagaggasgtttgggggccataattggtgaagagtcagatgtggattagtttagagtgagagatggggataaacaagataatagcataagtggtttggagttgggatggctggagaatgaggtgatgatggtgtgcagacataggtaagtggtgaacttgtggtgagtccttcaggacattattgaaccatcttctgaatatacaggctattgctaactcactggcccaacataaatcacttcattctgttccaggctaggagaggaagcgtagctttaaaattttggagtcattttttttccgttgagtctgtagcttg

SEQ ID NO: 15732 - DNA, 516 bp, Homo sapiens
tgaaggctgcatacgtggctggtgtgaggaagtcagctgacgggaatttgctgatttaagggaaggttcagctgcgtctgcatgctaaagggctgtcctccagatcagatctagaagctttgggaaggtaatgcaaaagaatttctgatgttcttggcgtgggggaaatttgttacacggacacagaaagccttgycctgcaggaaaagattcttagaaggcaccagattaaaagaaagaacttctgttcgttgaaaaaatatcatcaagagagtgaaaaagcaaaccccagggtaggagatgtttgctatgcacaacaaatgttggcttgtctccagaatatataaagaacctctacaaatcgataggaactcaatccacaaagggcagctgacttgaacaggcccctcggggacgagggtatccaagtgcccagtgctcggtggggagcactcagcttcgttagtatgaccaggaaaatgcaaatcataaggcttccacacagccttacaaaag

SEQ ID NO: 15733 - DNA, 516 bp, Homo sapiens
tgaaggctgcatacgtggctggtgtgaggaagtcagctgacgggaatttgctgatttaagggaaggttcagctgcgtctgcatgctaaagggctgtcctccagatcagatctagaagctttgggaaggtaatgcaaaagaatttctgatgttcttggcgtgggggaaatttgttacacggacacagaaagccttgccctgcaggaaaagattcttagaaggcaccagattaaaagaaagaacttctgttcgttgaaaaaatatcatcaagagagtgaaaaagcaaaccccagggtaggagatgtttgctatgcacaacaaatgttggcttgtctccagaatatataaagaacctctacaaatcgataggaactcaatccacaaagggcagctgacttgaacaggcccctcggggacgagggtatccaagtgcccagtgctcggtgggragcactcagcttcgttagtatgaccaggaaaatgcaaatcataaggcttccacacagccttacaaaag

SEQ ID NO: 15734 - DNA, 560 bp, Homo sapiens
tgaggaytttgtctacctttgtcgcaaaacagaaagaaacaaaaacaactctcacttctgcagacaagtggctttcacttaacttttgttttatgttgtagagcttccttctttctgaaatagaaacgtttatgtggaacacaaatatgtaggacagttaaaggccgagccagtgtggccatggggtgggaaggatgtgcttttcctgccccattacccatgggccaggggctgccagcaccaatagaaacctccaatcaaattgctatttctgaaagaatctgcaccctggaagccctccctgggaagtgataatccattcgtagagccagaggcaatgactacagcacaaccaggtggaaaaggttttgtaattgcagagtgagagaaagatgacaggtgcattgagagaatgaaaactccctcgggtgggagactgtgcttttttgttataaatggaccctctgttgtctgcgtcagcaaatgtcaaattgcaaagcctgcagatcaggatactggggccagtgctcagtgcttagaaaataaccaactgtcctgtt

SEQ ID NO: 15735 - DNA, 560 bp, Homo sapiens
tgaggactttgtctacctttgtcgcaaaacagaaagaaacaaaaacaactctcacttctgcagacaagtggctttcacttaacttttgttttatgttgtagagcttccttctttctgaaatagaaacgtttatgtggaacacaaatatgtaggacagttaaaggccgagccagtgtggccatggggtgggaaggatgtgcttttcctgccccattacccatgggccaggggctgccagcaccaatagaaacctccaatcaaattgctrtttctgaaagaatctgcaccctggaagccctccctgggaagtgataatccattcgtagagccagaggcaatgactacagcacaaccaggtggaaaaggttttgtaattgcagagtgagagaaagatgacaggtgcattgagagaatgaaaactccctcgggtgggagactgtgcttttttgttataaatggaccctctgttgtctgcgtcagcaaatgtcaaattgcaaagcctgcagatcaggatactggggccagtgctcagtgcttagaaaataaccaactgtcctgtt

SEQ ID NO: 15736 - DNA, 517 bp, Homo sapiens
tgccattgcactccagcttcagggaaaagagcaagactctatctcaaaaccaaaccaaaacaaaaagagtaattgggcttatcagataatataaagtccttgtccaaaatgttttgtgtttaatgtggagtatgggagtgtgactcagctccttcaatgggtaacaataattaacaatgatacttctctcttctctattaaatcacagaattaccaaatagggagttgaaaggcaatagagaaatctagcccaacatcctcactttataaataggaaaacaaagacagtggtagattgtgttctttcttcattattattcgtttcttctcaccctcaccatgcttctctgccmcattgcctataagcttggacaacggaacatgggtggatatggcatttgcttcagagcagaaactttaggtgcaattgtgtggcttggctgggtcctcttatttcagccctccaccaggagaagagcatatcctgtgtgctcaccttctgtgtggattttggtat

SEQ ID NO: 15737 - DNA, 346 bp, Homo sapiens
  misc_feature (1)...(346): n = A,T,C or G
ctctcaccyaccagtctgactctctctctccctctcacagagggccacagttatgctttgttctgtcttgtttcatacctcttcgtaagaatttacacacacaggttttcgtgtttttgaacataagtcgtatcatttgctacatattgtttgcaacttgtttgcttcactgaacaataaaattgtgcctataaaccttataaaattaagaaaaaagggagagggccgggtgcagggggctcacannnnnnnnnnnnnnnnnnnnnnnnnnnnnnnnnnnnnnnnnnnnnnnnnnnnnnnnnnnnnnnnnnnnnnnnnnnnnnnnnnnnnnnnnnnnnnnnnnnng

SEQ ID NO: 15738 - DNA, 1009 bp, Homo sapiens
ttaggaatgaagtaaaatttagccagaaagacttgaggaaaaagaagactataaaaattctcttgctataaaggttttaaaaatactttcatacttagctataatgccattatctcaccttacaaaattactagaatttggtatttcctaataatccatcatattcaaactctctgggttgtcccttacataccattttgcagttggtttctttgaatgaagacccaaataaggtccacatattacttttagttgttaagttataagttattagtcttttaatctagagtactcttctctttgcttcccccaactcaccctatttggccattgatttgttgctgggattaggttaactgttcttgcagcatgtcatgttttacatctgtccatctgcttcctggatgtcctctgcctttatcctttgtctcccatatttctcttaaactggaagtcagatctaagggccttattagattcaggytgaatacatctgggacaaatccatcactggtcacactgtgcctattaatagtatatgtgaggagctgagatacatgatgttggattatccacttttatcactggattcagctgatatcaacctgggcctctaatcttaggttttgtttttccctttaccattataaaataatctgttgggagtgatattttaaacagtcattttttatatttattggctgacttttctgaaagaagaagaaattcttatcaatttgggactattcagtcaacccaaacctgtctgtccggggcaagtaggacagatgctcatatttttcccattaattttggttttcagaataaggaattggtgtattaactattcacatgggtgtgctaactgcttccaaaacatcaaagtgttttctttgatgttgctttttctcttttcgtgattattattttggacttttccttttttgagcatcataaactcatggatttgtgtatgttcagtgtttttccatcagttttggtcattatt

SEQ ID NO: 15739 - DNA, 526 bp, Homo sapiens
cattgtttaaaacatacccacatattaacaaacrtgtgatttgaagttttgctttacattttttattaaaaatttttaaaaattagagatgggggtctcactgtgttgtccaggctggtgttgaactcctgggctcaagtgatctacacacctcagccttccaaagtattgggattacagacatgagccaccatgcccagccttttatattttttaaattaaaaactattacaaggattccttggcaatcaattaaattaagaatgatccaggaaaattatgtgtagctgtgctaagaaatagttaattaaataattaacttttgtttagggagcggcaattattggtactaaaataacaaccttgaatttattttagaacgaacaatgacgtattttcaaagatgttaataaaaagctaaatgcaagattgttgtgaaacctcacttacgctaacataatgatgctttgactcagtggactcaacatttgcttctgaagcatttggaaaacatctttaacatgtg

SEQ ID NO: 15740 - DNA, 548 bp, Homo sapiens
gttcctaaagcagacagcaagcagagcatctctgtatttgtcactctccactcattcctcagctcactgcaatctgacttccgcccctacttttcagatcaattcatactatggcaatgtctttcttcttaatggccaaatccaagggacatttcctaccttatgttacttgaatyctccatagtatatttaagctatcaatagtgacttttgtcttgaaattctttctttggcttccaaaatgccaccttcttttggttctccttccgtttctcaaggtacaccttcatcgcctttgctcacacttttttccctttaagtctcagtattcctcaggcagagtcccctccttggtccctttcttactgccactctttccttaggggtctccttttttcctgtgactttaaccatcactgccatgttggttattcctcggtcttgctatccagcccagaccctgaatcctaggctccagggtaatgcctgcactactctctcctgggcccttctttctgcattccagtggcaacacaaatttggcaagt

SEQ ID NO: 15741 - DNA, 568 bp, Homo sapiens
ccagaattttcaccagaatgtatcctaaataacaacctaaacatctatcaatgaggtgttcttaaattatagtagctctttatattacagtatcatgtaccatcaaaatcaataacaygcatatttacaaaaaaagctacacctatgttataaatttattttaaaaactatatttgaaaacaatttataacacagttgtgtttttaaataggtgtgcttacatgtacaacaagaaaaaaacttagaaggatatttctcaaaatgtaaatcatcatctctaagaggtggaactatgaattccttctttataccttctttcctatacatagatttttgaattatctgattttttttcaaagagcatgtatacttttataattaaaattattatgaacaatataattatttctactgtttaataagaatggagaaagacaaaaaccaatgtttgtgtgaatggatagagaagagtcacatgtctaaaaaagctgccattttaactaaattataccaaccacaaccaaggaacactcataaagtccagcttgtacaaagtttgacaaatcca

SEQ ID NO: 15742 - DNA, 534 bp, Homo sapiens
atatggaggagatcccagagggaagccctggatagaatcagtaatggtttgggagcagctggtgaatgtctggggagggattgcagcagctcagaaacagacatcatcaccacaaatgcccagaacctcactacttggcagaaaggtcagcctgacagtaaacatctgttctaggagatttaaaaagaaatgaattcttgctgtcgatgtgagagggggaatttgtcttagaaggtctcatacatggatgagaattacttatgattgctacagtcagtgaatacaaatgttgttgaaagagttgtgcttggaaacagtctgttgaccttcactctgaggctggccaaaggtttcctttggtttcactattaatttgctcaccagacctgaaaagggcagcagcttggatctatcgaagatgctctgtggggtcggagttaatgggttttgatcttgagtcgttgcggttggccaacatcgactgagcacccacgcgtttatagtctaacagggtaggagcrgggctagaatttg

SEQ ID NO: 15743 - DNA, 541 bp, Homo sapiens
taatgaaaggggagaaaaaaagggggtggacaaggaaggtgcagcctactgggcctgggaggaggctggtgaggggtcggatgatgggaaatgctttcgaggccagctggagcccatgctccccttaggatggttctaggcagaaacagacaggacactgaacagctgtttggagacattgacatgtttctgattttgcagttgtgcttctatgtgaagttaaggtatagcagtatgtgggaaactgtcatcttcagtttattattgttattatttgagacagggtcttgctctgttgcccaggctggagtgcagtggcatgatcgcggcttactgtagccttgacctcctgggatcmagtgatcctcccacctcagcctcctgaatagctggaaccacaggcgtgtgctaccatgcccggctaatttttaatttttttttggtagagacaggagtctccctatgttgcccgggctagtcttgaactcctgagctcaagcaatcctcctactttggcctccccctcttcagtgttgggatt

SEQ ID NO: 15744 - DNA, 781 bp, Homo sapiens
tagctgtagctggcagggggcaccaattagtcccctgaccttggccttggcctttcctcagggagctctgacttgttgacaagcttcaattaaagagactgccttcctcggatcacttgaggtcaggagtttgagaccagcctggccaacatggtgaaaccctgtttctactaaaaatacaaatattagccgggcatggtggcgggcacctgtaatcccagctactgggaagctgagacaggagaatcactttaattagggaggcagaggttgcagtgagctgagatcacaccactgcactccagcctgggcaacagagtgagactctgtctctcaaaaataacaaatacaaaatttaaaaaaacgaagagactgcccttcatgggccagcaacgtgcagggtcatcacagcctkagttgaatgaaacctcagaacaaaatgaacagagctcccccgtcctgaatccgtgcgatagaaggtgtgtgcgggtttggcggaggtcaggtttgcctcccagacgctgacaatcatcacaggttgctttgttttgccatcctcagacacggttgttagtagcaatgactcaccccagtgaggaagagccagaaaggaggtgatgggacttaagacctattgaaggttggtactgggacctggagcagatgcaccaagctgcttgcagcaaggtttgagggctgcagggtctgcggttctatgacacccaacgtgctttgtagggggggccttagttcgcccttgtagacttaatatgcaggtagc

SEQ ID NO: 15745 - DNA, 544 bp, Homo sapiens
tattcccatctaagacttcattacattgaccttcaccattcatatttctaccaacattctatacatgattgtttgtgttctttatgaaaatgggagcttcttctccaggtctctrtgtcctgtctaacacccaccagaattgctttgaatagttcattcagggaaatattggttttatttagcatgtatatcagtactctttcagcctttacttattatccagttccaaagtaacttccacatttctcccatccagagcatttattttagaattcagttcagtatagaaaaatgaagatgatgcaacccattatttttgagtttataaatgtatgggataaaatgtctcacccattcaacataactaattgtgaagttaaaaatctaatttgttatttaaacactaatgaacagacattacagaaccaaagacatctccttagctaacagcctgtactaagagtacttttcttagttttggtttcagctgcaataatacaaaatttttaaaactatctccagtcattttgtcacttaacatcat

SEQ ID NO: 15746 - DNA, 459 bp, Homo sapiens
tgaagattttttcctttattctacaggtctaaaacttctctgggctacacatccagaagatcctctaagtttggctggtacctgtgattcctttctgtctaaagactgggatgttttcttctattattctttaattttctamagtatctattcagttactgcttccattgtgtatgtaatttatcatatttgtcttttcgaattatttctctttctaatatcggtctgttttgcgctgatttcgtaaatgagaatatggattagagattttcttgtatagtgagctctgctctctagcgctcattccattgcagaggaggagaggacatctgctctgatttctcaggccggcctcctcttccagaactgctcagctctttacctatctagttgtgttcactgtttggtccttcttagtaaggagaggctgggagaattgaaatgggttgcaatcagaga

SEQ ID NO: 15747 - DNA, 508 bp, Homo sapiens
catgaagaattcccatccacagcagataaagccacctagacagcaagggagagagaaggggagggagagaagcccacccgctgagagggggttgtggccgagagcagagtcattggctcctgtcctctggtccaggtagcacctaggaagggatcctctatccctgtggtttcagcgttctttgccgaatctgtctcttttccctgaacccctgcagctaatgctcctgggatatgctggcagagttactgctgttaccattctcatttctttaggctttaatcaagctctcctgtgaagtgctacatcaattcaattttgaatttcacatataaaataatgaaatgagagtgaagcgtgatagacataaaatgtttttttaaaatgaaaatgrtatttttaatttaatcatataaaaatcatctggatccagtacatgtaagtggcagagagtttgctatattctcttaccaatggcctcagaaagcccacgatccacattggttgg

SEQ ID NO: 15748 - DNA, 508 bp, Homo sapiens
catgaagaattcccatccacagcagataaagccacctagacagcaagggagagagaaggggagggagagaagcccacccgctgagagggggttgtggccgagagcagagtcattggctcctgtcctctggtccaggtagcacctaggaagggatcctctatccctgtggtttcagcgttctttgccgaatctgtctcttttccctgaacccctgcagctaatgctcctgggatatgctggcagagttactgctgttaccattctcatttctttaggctttaatcaagctctcctgtgaagtgctacatcaattcaattttgaatttcacatataaaataatgaaatgagagtgaagcgtgatagacataaaatgtttttttaaaatgaaaatgatatttttaatttaatcatataaaaatcatctggatccagtacatgtaagtggcagagagtttgctatattctcttaccaatggcctcagaaagcccacgatccacaytggttgg

SEQ ID NO: 15749 - DNA, 563 bp, Homo sapiens
ccacaaaaaatacaaaatttatccaggtgtggtggtgtatacctgtagtccaagctactcaggaggctgacatagaaggatcacctgagcccaggaggtcaaggctgcagtgagtggagattgcaccactgaactccagcctcagcgacagagcaagaccctgccttaaaaaaaaaaaaaaaaaaaaaaaaaaaggaaaagaaagaaaaaagcttctgcttcataggtgattttggtatgaayagagaattccttattttaattccttctttctttcatattcttgctttccttaaaataaaagcactttacattcgcatggggctttgtatatttaaaatatgtcctgcaatggtgactatagttaataatagtatatgttatatttcaaaattgcaaagaaagtacatttcaaatgttctcaccacaaaaaataagtatttgaggtgatgcatatgttaagtgtgatttaatcattctacattgcagacataaatcataatatcactttgtgccccataaacatatacaattaaattttgtcaatttgcaataagataaaa

SEQ ID NO: 15750 - DNA, 563 bp, Homo sapiens
ccacaaaaaatacaaaatttatccaggtgtggtggtgtatacctgtagtccaagctactcaggaggctgacatagaaggatcacctgagcccaggaggtcaaggctgcagtgagtggagattgcaccactgaactccagcctcagcgacagagcaagaccctgccttaaaaaaaaaaaaaaaaaaaaaaaaaaaggaaaagaaagaaaaaagcttctgcttcataggtgattttggtatgaacagagaattccttattttaattccttctttctttcatattcttgctttccttaaaataaaagcactttacattcgcatggkgctttgtatatttaaaatatgtcctgcaatggtgactatagttaataatagtatatgttatatttcaaaattgcaaagaaagtacatttcaaatgttctcaccacaaaaaataagtatttgaggtgatgcatatgttaagtgtgatttaatcattctacattgcagacataaatcataatatcactttgtgccccataaacatatacaattaaattttgtcaatttgcaataagataaaa

SEQ ID NO: 15751 - DNA, 380 bp, Homo sapiens
ataagtgaggacataatcttgggatggcatgcggtcttcattctgattacatcgatgcaatttctgtaaaattttttaaaaaatgaattgcattatagttttaaacaacttaaatatatgaacataaaatttatttttatttaccttttatgtttaatttttaaccagtgtgtcctctaatggattcctacacacagaaaatgcaaatgattggtctatatcacaaccataccataaagtcagtatagtttacatttctagtgctccatataaataaaaaaktatgtatacaagttttatatttaagtacattcaagttgtcattaaatgcttatccctaaattttatacacagaggtcagtctagtctaaaaaatagag

SEQ ID NO: 15752 - DNA, 542 bp, Homo sapiens
tcgaaggaggagagccattataaatgtaaaaaaaaactttagaaacatgaatcaatgcaaatgagtgtccctcattcagactgaaattcaaacaaattcgactataaaagacattttttagataacttgagaaatttcaacatggactaggtattagatgatatcagggaataactgtcaattttttgtcaggtgtaatctattaacaggtgaaatgatacaattctaggaatttatacttaagcaaaagtaaatgaaacaagactggtaaaacattgggaggctcatcgtgycattttttccgcttttgtgagttttggaaaactttcatgttaaaatatttttaggttagcttttgttttgctttggttttgcttgtttgtttttacaacacagacttgataactttattagtcacatcctgcaattgaagattctttttaaagccttatttaacacggaagatccaactaatcaaaagaagagacagttctttgtataaaccataaagaaggtaaatcggcaaaaaaaaaaaaaaaaaa

SEQ ID NO: 15753 - DNA, 506 bp, Homo sapiens
tgaaatctgactaaggcccagaggtagtgccttgggcctgtctgttgtgtttcttcttggcattcatgataagagctgagaaatgaaatttcaaaaggagaaatagtagctaagagcacrtgaataaaacttccagtagatagacagattttcatttttcttttcacatttcagtattatttgtgactattcttgtatgagaatatttctgtcagggcttaaatgtgtcaaacaagaaagaatcggaggaaccagaagtctgggtttctgctccagctgctattaactgagagagaccttgggcaaaacctttgatcttattgagccttgatgatctcatctgtaaaatgggaagactggggcctctctcaaagggttgtggttaggatcaaataaaatcataaatgtaaaatcccttgatgaactagggggaatgtgacacaaatggaagctagtttttgcatgtcagatgttcatcgatcatctgcttgaagcatacatattaa

SEQ ID NO: 15754 - DNA, 530 bp, Homo sapiens
atgcctacttttactccatggttaattttaatggtcattttattcctcatctaatacacataccataaatttactatcataaccattttttaagtgtacaattcagtacagactgtatttttattgttaatgcttgttttatgggccracctgcatttcatttgtggactgtgtaaacacaacatatacatagctctctctctctcttttttttttttttttttttgagatggagtctcgctctgtcacccaggctggaatgcaatggcacgatctcagctcaccacaacctccacctcctgggttcaagcaattctcccacctcagccttctgagtagccaggattacaggtgtgtgccaccacacccagctaatctttgtattttcagttgagacagggttttgccatgttggtcaggctggtctggaactcatgacctcaggtgatccgcccgccttggcctcccaaagtgctgggattacaggcatgagccactgcgcccagccttttttttttttttttttttta

SEQ ID NO: 15755 - DNA, 530 bp, Homo sapiens
atgcctacttttactccatggttaattttaatggtcattttattcctcatctaatacacataccataaatttactatcataaccattttttaagtgtacaattcagtacagactgtatttttattgttaatgcttgttttatgggccgacctgcatttcatttgtggactrtgtaaacacaacatatacatagctctctctctctcttttttttttttttttttttgagatggagtctcgctctgtcacccaggctggaatgcaatggcacgatctcagctcaccacaacctccacctcctgggttcaagcaattctcccacctcagccttctgagtagccaggattacaggtgtgtgccaccacacccagctaatctttgtattttcagttgagacagggttttgccatgttggtcaggctggtctggaactcatgacctcaggtgatccgcccgccttggcctcccaaagtgctgggattacaggcatgagccactgcgcccagccttttttttttttttttttttta

SEQ ID NO: 15756 - DNA, 476 bp, Homo sapiens
tcatgattatttagacaatgattttaatgggcccatataaacttattctgtttttatactagtaacagagaagaagatgttggaagattaaatatagagraggatgggctttagcgtcactgttcagggacattgggaattattctacagaattcgatccagcctattctcattatttccttcttcttatgactttcattctttccttaccttcctccttttccctttcttcttcttcttttttttttttttgaaacggagtctctctctgccgcccaggctggagtgcagtggtgcaatctcagctcactgcaagctctgcctcccaggttcacggcattctcctgcctcagcctcccaactggctgggactacaggcgcccgccaccatgtccagctatttttttgtatttttagtagagacagggtttcactgccttagccaggatggtctcgatctcctgaccttgtgatcc

SEQ ID NO: 15757 - DNA, 476 bp, Homo sapiens
tcatgattatttagacaatgattttaatgggcccatataaacttattctgtttttatactagtaacagagaagaagatgttggaagattaaatatagagaaggatgggctttagcrtcactgttcagggacattgggaattattctacagaattcgatccagcctattctcattatttccttcttcttatgactttcattctttccttaccttcctccttttccctttcttcttcttcttttttttttttttgaaacggagtctctctctgccgcccaggctggagtgcagtggtgcaatctcagctcactgcaagctctgcctcccaggttcacggcattctcctgcctcagcctcccaactggctgggactacaggcgcccgccaccatgtccagctatttttttgtatttttagtagagacagggtttcactgccttagccaggatggtctcgatctcctgaccttgtgatcc

SEQ ID NO: 15758 - DNA, 476 bp, Homo sapiens
tcatgattatttagacaatgattttaatgggcccatataaacttattctgtttttatactagtaacagagaagaagatgttggaagattaaatatagagaaggatgggctttagcgtcactgttcagggacattgggaattattctacagaattcgatccagcctattctcattatttccttcttcttatgactttcattctttccttaccttcctccttttccctttcttcttcttcttttttttttttttgaaacggagtctctctctgccgcccaggctggagtgcagtggtgcaatctcagctcactgcaagctctgcctcccaggttcacggcattctcctgcctcagcctcccaactggctgggactacaggcgcccgccaccatgyccagctatttttttgtatttttagtagagacagggtttcactgccttagccaggatggtctcgatctcctgaccttgtgatcc

SEQ ID NO: 15759 - DNA, 476 bp, Homo sapiens
tcatgattatttagacaatgattttaatgggcccatataaacttattctgtttttatactagtaacagagaagaagatgttggaagattaaatatagagaaggatgggctttagcgtcactgttcagggacattgggaattattctacagaattcgatccagcctattctcattatttccttcttcttatgactttcattctttccttaccttcctccttttccctttcttcttcttcttttttttttttttgaaacggagtctctctctgccgcccaggctggagtgcagtggtgcaatctcagctcactgcaagctctgcctcccaggttcacggcattctcctgcctcagcctcccaactggctgggactacaggcgcccgccaccatgtccagctatttttttgtatttttagtagagacrgggtttcactgccttagccaggatggtctcgatctcctgaccttgtgatcc

SEQ ID NO: 15760 - DNA, 674 bp, Homo sapiens
attgtacagaaaataactgacaccgaaagtatctaccttttcacatttaaatgcaagtgwctttttgttcattcattcaaaaattatggattattatactttagcttaaatgtttgtctcccctctaaaagccattttgaaacttaatcctcaatgcaacagtattaagaagtcagcctttaggagtaattaggccatgaggactctgtactcataaatgggattagtgcattgcaaaagggctgaagggaactagctaatgtaaggacacagcattcaagttaccattttagaagcagaaactgggacctcacttggtgccaaacctgccagaaccatggttttgaacttttcagcctcctggactgtgagaaacaagtttctgttcttatcagtctcagctattttgttacagaagcacaagtgaactgagacctgagatgggagggtttatgtgctaggtatggagctaattgctgaataaataaagatgaatacattctatgacctcatcatctagtgcctgttacagtgacgcagtggatattttttcttgccttattactcatttttgctctcctcactaaatattgaggaaaacatgaatgcatcatcagtttttccactgatagaactgtttaagaagtacatatgacattatattttttctttct

SEQ ID NO: 15761 - DNA, 674 bp, Homo sapiens
attgtacagaaaataactgacaccgaaagtatctaccttttcacatttaaatgcaagtgtctttttgttcattcattcaaaaattatggattattatactttagcttaaatgtttgtctcccctctaaaagccattttgaaacttaatcctcaatgcaayagtattaagaagtcagcctttaggagtaattaggccatgaggactctgtactcataaatgggattagtgcattgcaaaagggctgaagggaactagctaatgtaaggacacagcattcaagttaccattttagaagcagaaactgggacctcacttggtgccaaacctgccagaaccatggttttgaacttttcagcctcctggactgtgagaaacaagtttctgttcttatcagtctcagctattttgttacagaagcacaagtgaactgagacctgagatgggagggtttatgtgctaggtatggagctaattgctgaataaataaagatgaatacattctatgacctcatcatctagtgcctgttacagtgacgcagtggatattttttcttgccttattactcatttttgctctcctcactaaatattgaggaaaacatgaatgcatcatcagtttttccactgatagaactgtttaagaagtacatatgacattatattttttctttct

SEQ ID NO: 15762 - DNA, 674 bp, Homo sapiens
attgtacagaaaataactgacaccgaaagtatctaccttttcacatttaaatgcaagtgtctttttgttcattcattcaaaaattatggattattatactttagcttaaatgtttgtctcccctctaaaagccattttgaaacttaatcctcaatgcaacagtattaagaagtcagcctttaggagtaattaggccatgaggactctgtactcataratgggattagtgcattgcaaaagggctgaagggaactagctaatgtaaggacacagcattcaagttaccattttagaagcagaaactgggacctcacttggtgccaaacctgccagaaccatggttttgaacttttcagcctcctggactgtgagaaacaagtttctgttcttatcagtctcagctattttgttacagaagcacaagtgaactgagacctgagatgggagggtttatgtgctaggtatggagctaattgctgaataaataaagatgaatacattctatgacctcatcatctagtgcctgttacagtgacgcagtggatattttttcttgccttattactcatttttgctctcctcactaaatattgaggaaaacatgaatgcatcatcagtttttccactgatagaactgtttaagaagtacatatgacattatattttttctttct

SEQ ID NO: 15763 - DNA, 581 bp, Homo sapiens
agaccacaccttgacatttctggcctttgagtctttcacaactgttattataatgcattagctcttctagaagttagaagtgactttggattaagtctttcataaggtggctaaatgaatttatatggctcatcacaattcactagattggttaagcaggaaatttacagagatttttttctttgctgtaaatgtttttctaaattgaaaaacttctaatactgtcttctggagtagtcctagaaataagtgcaagtgattgtttttggcaggaggccacataaacatttctgcttctctgtgccttatgggtagcattgatataaattgttaaaaataatgattgtagatagataatgtrtcagagtttgggctcagccgcggtagctgctgttgacccagagggaccactgggatcctcacatctcagggcagcacatcgtttgcagcaatggttgcttctatgcaaccttttatgaaattaggtgaggcccttgcttagaattttttaaaagcttaatatgagtttatatctctttaaatatcagtttctaatgtttttttaaaggcctatgtttaca

SEQ ID NO: 15764 - DNA, 581 bp, Homo sapiens
agaccacaccttgacatttctggcctttgagtctttcacaactgttattataatgcattagctcttctagaagttagaagtgactttggattaagtctttcataaggtggctaaatgaatttatatggctcatcacaattcactagattggttaagcaggaaatttacagagatttttttctttgctgtaaatgtttttctaaattgaaaaacttctaatactgtcttctggagtagtcctagaaataagtgcaagtgattgtttttggcaggaggccacataaacatttctgcttctctgtgccttatgggtagcattgatataaattgttaaaaataatgattgtagatagataatgtgtcagagtttgggctcagccgcggtagctgctgttgacccagagggaccactgggatcctcacatctcagggcagcacatcgtttgcagcaatggttgcttctaygcaaccttttatgaaattaggtgaggcccttgcttagaattttttaaaagcttaatatgagtttatatctctttaaatatcagtttctaatgtttttttaaaggcctatgtttaca

SEQ ID NO: 15765 - DNA, 581 bp, Homo sapiens
agaccacaccttgacatttctggcctttgagtctttcacaactgttattataatgcattagctcttctagaagttagaagtgactttggattaagtctttcataaggtggctaaatgaatttatatggctcatcacaattcactagattggttaagcaggaaatttacagagatttttttctttgctgtaaatgtttttctaaattgaaaaacttctaatactgtcttctggagtagtcctagaaataagtgcaagtgattgtttttggcaggaggccacataaacatttctgcttctctgtgccttatgggtagcattgatataaattgttaaaaataatgattgtagatagataatgtgtcagagtttgggctcagccgcggtagctgctgttgacccagagggaccactgggatcctcacatctcagggcagcacatcgtttgcagcaatggttgcttctatgcaaccttttatgaaattaggtgaggcccttgcttagaattttttaaaagcttaatatgagtttatatctctttaaatatcagtttctaatrtttttttaaaggcctatgtttaca

SEQ ID NO: 15766 - DNA, 523 bp, Homo sapiens
cccgctctccagactcctgtgatggtggtgggggctggacccaccctcggaaggcaggcaaattcctgccaggagtcagctgagccgagccatctcttgcagaaagctcctagccccgcaggggtgaaccggctgctgctcccgcgctgggagtgctgtccatccctcggtgcyccagcagccgcccctgggaggacagccccgtttgaagcccacgtgcaggcgaaaccccttcagagctgggcatgggtttccagtcatcgccacatcactctctgtctgaacttgaacatacctcaagcttgctggttgttactgggtcgcagtaactagattttcttggggggttggtgtgggtgggtggaaagatacatccagaaaatgaaatgtaatgttgcctcttattcaccaagaagtttttcaagccagaagaccatggtgtttttcgttgattggtattgcttgatttagattcggaagctgggctctcctacagttacccagcccttcactggactggctg

SEQ ID NO: 15767 - DNA, 523 bp, Homo sapiens
cccgctctccagactcctgtgatggtggtgggggctggacccaccctcggaaggcaggcaaattcctgccaggagtcagctgagccgagccatctcttgcagaaagctcctagccccgcaggggtgaaccggctgctgctcccgcgctgggagtgctgtccatccctcggtgctccagcagccgcccctgggaggacagccccgtttgaagcccacgtgcaggcgaaaccccttcagagctgggcatgggtttccagtcatcgccacatcactctctgtctgaacttgaacatacctcaagcttgctggttgttactgggtcgcagtaactagattttcttggggggttggtgtgggtgggtggaaagatacatccagaaaatgaaatgtaatgttgcctcttattcaccaagaagtttttcaagccagaagaccatkgtgtttttcgttgattggtattgcttgatttagattcggaagctgggctctcctacagttacccagcccttcactggactggctg

SEQ ID NO: 15768 - DNA, 539 bp, Homo sapiens
taaataaagtttacttttttaaatttcagggcaagttttcatgaaaagtgctgaatgttatcatttgccacaatgaaatcaaagcaggcagacaagagtgtccttccccacaggaggcctctctagtctcagctccctcaagcaatgcatctggtatttggaaataggtcagaacattcgcatggcttttgytattggccaggaaataacttttttgaaatatcattttttcctcctacagatactattttgcatgatcagagctgctgtaaagagtaaggtgccataaaaatatatgaagaatatcttgtcatcattatgaacaacctggctactgcactacaacttcagatatcaaaacttacacaatatttgaaggtaaaagtttgattttttttaaaaaccaacagcataaaagaaatgaggtagaaacatgctgatcacttaaaagtgatgtccctttcagctcagttcaattctgacattcttcagaatgaaagactcaaaactctgtgtatttgacatagcaattaactgca

SEQ ID NO: 15769 - DNA, 539 bp, Homo sapiens
taaataaagtttacttttttaaatttcagggcaagttttcatgaaaagtgctgaatgttatcatttgccacaatgaaatcaaagcaggcagacaagagtgtccttccccacaggaggcctctctagtctcagctccctcaagcaatgcatctggtatttggaaataggtcagaacattcgcatggcttttgctattggccaggaaataacttttttgaratatcattttttcctcctacagatactattttgcatgatcagagctgctgtaaagagtaaggtgccataaaaatatatgaagaatatcttgtcatcattatgaacaacctggctactgcactacaacttcagatatcaaaacttacacaatatttgaaggtaaaagtttgattttttttaaaaaccaacagcataaaagaaatgaggtagaaacatgctgatcacttaaaagtgatgtccctttcagctcagttcaattctgacattcttcagaatgaaagactcaaaactctgtgtatttgacatagcaattaactgca

SEQ ID NO: 15770 - DNA, 539 bp, Homo sapiens
taaataaagtttacttttttaaatttcagggcaagttttcatgaaaagtgctgaatgttatcatttgccacaatgaaatcaaagcaggcagacaagagtgtccttccccacaggaggcctctctagtctcagctccctcaagcaatgcatctggtatttggaaataggtcagaacattcgcatggcttttgctattggccaggaaataacttttttgaaatatcattttttcctcctacagatactattttgcatgatcagagctgctgtaaagagtaaggtgccataaaaatatatgaagaatatcttgtcatcattatgaacaacctggctactgcactacaacttcagatatcaaaacttacacaatatttgaaggtaaaagtttgattttttttwaaaaccaacagcataaaagaaatgaggtagaaacatgctgatcacttaaaagtgatgtccctttcagctcagttcaattctgacattcttcagaatgaaagactcaaaactctgtgtatttgacatagcaattaactgca

SEQ ID NO: 15771 - DNA, 526 bp, Homo sapiens
tggaggtggggggttattcttacaaataatactgaaggattacaataatactgtcaaattatcaaatgtgttaatactacattagccattctactggtatttatggcacaaactgccagatgtagtgcaatactgattcttcccttcctccagagtaagagaacccctgatttttgactaggcacatagtaatttccagcacagaatatactttctagcttctcttgcagttatgtgtgaccttgtgattccgttataatcgaagggacayagcagaagcgatatgtacaatttctggaaagtatcttcacaagaagggagtgtgcccagcttttgccttttcctccttcctgctggtgagaatgcagaactgatgtgagaaagtggagaagccacctctgacaaaaaggaaagagttacatgttgaaggctgggtcccctaatgagcatgaaggtagcatactggttcaggactgtctatgagatacatgaaagaaaggaaacttctatcttgtttaagccattg

SEQ ID NO: 15772 - DNA, 543 bp, Homo sapiens
gatgtcataatggttaataaggactttgtgatacttatgctagcataaggaaatatttccttctttgataaatttatacctcttatgtaggtataaatatacctcttatgtaagcatataggatgaagagcagacttttctgagcccttcagttttcagttattatttcctttagttttcaatctatttattcaacaactatgaaattagtgttttatttacaaggctagaatgctttaagaacaacaaaatcattttcagagacttgacacaatagtactttatttttcacttatccaactgcctcgtacaaatacaagtgggagttgcaaatgacagaggtttggctctgcacagttttttcagaaatccaggcttctggtgatttactctgtgtaacacatagcttcccaagtcacatttaatgtcaacatgaaaggctgcacatgggagggttttatgagccaggtatagaaattgcacatgtcacttccactcacattggaagtaatggcyagaatttaataatacccaactcaaaga

SEQ ID NO: 15773 - DNA, 550 bp, Homo sapiens
acactggatgagtgagaagaaattaaatacctcctctagaaaatgtaagactctggaaatctctaacccactaccctgttggtctctctaacagttcttccacatcatatgagattgggcatgaagtcttttttttttaatttttatacttgtatgaccccatttaattcactgatccccactgaacatcaattttcccatggctacaatgagggtactaataatatctttgcctaattaaagggttgataagaaaattaaataggaaaaacagggtccatatgctgtgaaaactctcagaacagtgtgtcaactttcattaacgtaggtaaatgtactcttttcaaggctttacttccaatcttccccttaagtgctagtgtccagaggaaaaattatttcttctctgtagaagtcattttgaagacagyatttttctgagatccaatgtggttgggagttctgaagaggaagttatagttttaagctagattatctcattttattatattctgtgtttattttcctttgccgtgcttaggcctttggc

SEQ ID NO: 15774 - DNA, 550 bp, Homo sapiens
acactggatgagtgagaagaaattaaatacctcctctagaaaatgtaagactctggaaatctctaacccactaccctgttggtctctctaacagttcttccacatcatatgagattgggcatgaagtcttttttttttaatttttatacttgtatgaccccatttaattcactgatccccactgaacatcaattttcccatggctacaatgagggtactaataatatctttgcctaattaaagggttgataagaaaattaaataggaaaaacagggtccatatgctgtgaaaactctcagaacagtgtgtcaactttcattaacgtaggtaaatgtactcttttcaaggctttacttccaatcttccccttaagtgctagtgtccagaggaaaaattatttcttctctgtagaagtcattttgaagacagcatttttctgagatccaatgtggttgggagttctgaagaggaagttatagttttaagctagattatctcattttattatattctgtgtttattttcctttgcygtgcttaggcctttggc

SEQ ID NO: 15775 - DNA, 1057 bp, Homo sapiens
tgcccttctcagactctcgctgtaccctacggaaggcacagtcaaagcaaccgaacgtttaattatttgaattttctcaaagtaattcatgtataataaaaagtcaaacattaaagcaggtcttattttgaagagcagtaactacccatccccagatctttgcagaggctgccacttttagtttgkccccatttagatgtttttagcaccctaaatcaaaataatatgcgttccactgtatttctggatttatcattttgatatttctttgccttactttcttactgccacaatcttgtcaattttccatcgctattttaggtcttccatttgtagctttaaataatgggtatcaacttccatttattgttttattgactttagatggtgtctcttaatgtctctactgacttagctaaggatattaacacatcctccactttcaatctactatcggttggaactcaacatttacatttagttttcacgtattcaacaagtatttgaggcactgttcttggcactggggaaatagaaatggacaaaacagacaatgaccctatccacatgaaaaagttctagtatgggaagtaagacaatagacgaatacatggcaaatgacgtcaaaggcaggatcatgtagaagtcattttcagctgggagaatagcaggcacccaagtcaggtagattgaatggacgaggggtttgcgggagtgtgtggaagtttattcctttgcctagctgggcacaggtgctgtttcaaggagagatcttgttaaccgggagccaggatagattatttagtaagttagtgatttaccaaaatgaggttttaggatactggatcccacagtttggtagtgatagtgggaggaagaaaagcaggaggcagggagtctagtgagaaggcatgccctgccaatggcatatcagagtcctgcaagatttactgctctgcttcctgcttcctgctactggactgcgctaaaccacagtgatttttctctcctcttgaatttgtattataccttaaagctaaagaggttaagaaatttg

SEQ ID NO: 15776 - DNA, 235 bp, Homo sapiens
cccagtcaaaatctttataaaacagttttgttcgtatctccgtggattctcagttgttttacctcttcctaatgggagtagatttttctcctgtttcttaaaataaacgattttaaaagattttaattttawttttttttcttccattgtgacattttgaagtagaacagtacagcttgtgattctgaaattgcaaatcacacccctgccctgaagtgttaaaaatcacattgca

SEQ ID NO: 15777 - DNA, 777 bp, Homo sapiens
ctcagtcagrccagatacaaacacccacactttggggctttcatgcttttgcagatcacttccccagtatgccttgccatactcaacgcttaagaatcttgttcctggctgggcgcagtgggtcatgcctgtaatcccaacacttagggaggccgaggcgggaggatcatccgaggttgggagttcgagaccagcctgaccaacacagagaaaccccgtctctactaaaaatacaaaattagcctggtgtggtggtgcatgcctgtaatcccagttactcaggaggctgaagcaggggggaatcgcctgaacccaggaggcggaggttgccgtgagctgagattgcaccattgcgctccagcctgggcaacaagagtgaaactccatctcaaataaaataaaacaaaaccaaaaaaagaagaagcctgtttcctccccttcacagctgcactgtggctccctgcttctcagccagagttcagggagacaaggaaaggatttctggaaggtgcgagaggggacaacaaacaatgatgaaggatattaccatctactgaactcgcattctgtggtagggactatcacctaacactgcactgaatcttctctaccattctgggatgccactcaaagatatatgcatagctccaatttatataaacgtatacttaccatatgatatataatattacataaagtatttcatatatatatatatttttttctccactttacaagctgagcaaaccacttaaggtcccacagccagagggcaga

SEQ ID NO: 15778 - DNA, 596 bp, Homo sapiens
acaaaaccaacaatctttcatttgaaataaaggaatcaagtatgtggacaggcagcagtgtcttccctcaacctggtttatcataaaagagaaggtggtagggcgccattggaagaagaatcattcagacataccacatatgcaggaagcattgtgtttgtgaggcaaaatggaaaaaatatatatagactgtgatgtgagcagccctgtgattgccaatttctcttagttaaaagtagaagctaaaggaactcatctacacaacctctgtattataagcagaattcctattaggctgaaacatggtccaggcctctcagcacaaaccttctgcaagcagcatttcttggaaaacctctcctccaaacatgagcaatcaatcaaaaagtaatcagtcatccaggcacggtggtgcaggcctgtagttccagctacttgggaggctgaggttggggatctcttgagcccaggagttcgaggctagcttgggcaacatagtaagattctctctaaaatattttttttaattttaaaagtgcgtatataaaaactatacacattttacaaaartatatgcaaacaaaaagatacatatt

SEQ ID NO: 15779 - DNA, 507 bp, Homo sapiens
agtggcaccgactctgtggcacctccttcttccacaggtgccatcctgagcacttgatgggaggccagcttgtttaccttccagaccaagggacacaggtgacctaggccaggaaggctgggccctcagaggctcaggctctaagccagcctctccttcatcaccaggggcccggtaggtgacagcagggtgctgcagtgctgtgtgtgcacctgccagaccgtactctggtgacagctccctgatctctctttgggtaccttaagcttttgggggacggtatttagcaattaaaaatacagaatgaaaaaaattaaaattaaattttaattaaaaaaaattagccaggcatggtagtgcacacctgtaattccagctgcttgggaggctgaagtgggaggatggcttgagcccaggagtttgaggctacggtragctatgatcatgccattgcactcccacctgggcaacacagtgacaccccatctctataaaaatatatatgta

SEQ ID NO: 15780 - DNA, 538 bp, Homo sapiens
aaccccgtctctactaaaaatacaaaaattagctgggcatggtggcgcgtgcctgtggtcccagctactggggaggctgaggcaggagaatcgcttgaacataggaggtagaagttacagtgagcctagatcgtgccactgcactccagcctggtgacagagcgagactccgcctcaacaacagcaaaaaaaaaaaaaaaaaagtgcacactcctcaaaattcctagcagcagcacacagcagccaatgtaaacaacttccccagccagagcagcaactgatgggacaaaggtaacgygaggacaagcctagggtcccccaggggaacagtcactctgcaaacaccgttcccggctcggctccatcccagcctggcaaaatttggagccgcctgtcttgctgtttcctgctgatggggccagcctggcatcggcccacagctcctgcccttggaggtcccatgggagccccttggagcaacacagacaaatcaggcccctggggaaaggaggtgctagaaaaaaggctggggctgatt

SEQ ID NO: 15781 - DNA, 572 bp, Homo sapiens
gccttggtttgcttgcctgtgaaatggagataagggcccgcttcggagccccctgttagaatgcaatgaaaaggttggggtaaagcccgaggcctggtgtgcctggaacatgcgtagtaaggagaggaagcctggtgtgcctggatcatgcgtagtaaggagaggaagcctggtgtgcctggaacatgcrtaaggagaggagactggggtcatcgggacaggcttccaggccaagaccgtccctagagatggctgctgaccttcccttgtcttccacacagcgtgccgtgttaccctcagaggtcactcagcatggccactcctgtttcacagacactgaggcccagagagaaggcacctgcccaggacctctggcaagttagaggcccagcaggaggcctgaggataggcttggagccggcacgtctggcctgccacgcccccctggctgatttaggaacccagcaatacagcagcagagcattggctgtaggctccacaggagcccaggctggggcgttgctgtatttatggttcttatgcccctccctcaccctcacctcctggtgccc

SEQ ID NO: 15782 - DNA, 675 bp, Homo sapiens
ccgagttttattttaaagggtaatgactctgggcctcttcccaggccccctgagggaccattagcagccgggattgggtgtcaagggttggagaacaccaccctacctttcagactgaactccattcctgagcgagcccacgtaggtcttctttttatccacgggcatcacgtccacgtcacccccactctcgttgctgatgactcccgcgtgcacrgctgtcttgcagatgcttgaggtctggaagcacaggaagggctgtgatcagcgatgcggattccagctcatgggtcaagccagctggggctccatcattcactgctgggcaacctggctggtgggatgtggaccccatcaacccttaggaaataatcatcactaccttgatgccttgggggtctctccagagagactggacatcatgcattcattcactttgttcaacaagtgttttctaagcacctattatatgccaggcacggaattaggaactgggggaattcagcagggaacaagataaagaccttgccttcaaagagtcgagtgagcaaataaataaatacacaaatgaggtagcatcggctatgaagaaaacaaaaccagttcacaaggttaaatgcctgggtggcgggggctacttcagaattgtttcatcagggggaactgctcagggaa

SEQ ID NO: 15783 - DNA, 675 bp, Homo sapiens
ccgagttttattttaaagggtaatgactctgggcctcttcccaggccccctgagggaccattagcagccgggattgggtgtcaagggttggagaacaccaccctacctttcagactgaactccattcctgagcgagcccacgtaggtcttctttttatccacgggcatcacgtccacgtcacccccactctcgttgctgatgactcccgcgtgcacggctgtcttgcagatgcttgaggtctggaagcacaggaagggctgtgatcagcgatgcggattccagctcatgggtcaagccagctggggctccatcattcactgctgggcaacctggctggkgggatgtggaccccatcaacccttaggaaataatcatcactaccttgatgccttgggggtctctccagagagactggacatcatgcattcattcactttgttcaacaagtgttttctaagcacctattatatgccaggcacggaattaggaactgggggaattcagcagggaacaagataaagaccttgccttcaaagagtcgagtgagcaaataaataaatacacaaatgaggtagcatcggctatgaagaaaacaaaaccagttcacaaggttaaatgcctgggtggcgggggctacttcagaattgtttcatcagggggaactgctcagggaa

SEQ ID NO: 15784 - DNA, 589 bp, Homo sapiens
ttctttcgggttgcgtggatgcacgggtgtaccataacctacttaactgggttccttttgatgaagggcaattttagttgcatccagtccttcgcaattacaaccattgcctcagtaaattgtgtatgtgggctgtttttcactcgcacgtcaatctgaagatgagttcccagcagtgggactgctaggtcaaagggcgtgtgccatggcggtgggtggtgctgaacctgctctcagcggagggacattctcagttgtcacaccacctgtgcaagggagctttccatgtgttaaggagttttctgatctttgscagactgactggtagaaaatagtgtttctatagttttaatatgcatttctcttacgaataaactcaaaaataagttgagccatttgtatttcctttttaatgagttgcctattaatatccttggcccattacaaaatgttagattattcatcggtttcttactgctttccaggaaattactggatcaatcaaggaaactagctctttgagcttcacatatgatcatgtgaactttaggaaaagaggtaaatcataagaaagtaagcttaatgactc

SEQ ID NO: 15785 - DNA, 546 bp, Homo sapiens
ctcccaagctgtgagaactacaggcaggcgccactatacccacatagttttgttcttttttttcttttttctgtagagatgagatctcactatgatgcccaggctggtctcgaactcctgtgctcaagtgatccacccacctcggcctccccaaagtgttgagattacaggcgtcagccaccgcacccagctgtaacaaattgttttaataaatagtgctaaaaggttttccagaaatatttggctctcttattaaaataaaacataagttttgagtttttttatgaaagaaaatgtactctctctctctctctctctctctctctatatataatatatatatatattttttttttttttttttttttttttttttgagacagagtttyactctgtcacccagactggcatgcagtggcccgatctcggctcactgcaacctccacctcccaggtgcaagcgattcccctgcctcagccttcccaagtagctggaattacaggcacacaccaccacgcccagctgacttttttgtatttttagtag

SEQ ID NO: 15786 - DNA, 542 bp, Homo sapiens
gcaataatctaattgggttcattttatcctctatctaacaatgacaactcattgcctacacagcaggtagaaggagtttgttttcagaattgccctctgacctatttaagacgctcagatattccctgaggcgccttggcatggccacaaaggccctacacattccggctgcttcctcctttccagcatcctcgctcacgtctcctctcctcagttccaccctcaggaggcaccagaattcctcacttctttcrctacaaggcaccgtcttactcccaagaccagtgaatccgaaggtggaccaccagctgagggactagattccagactgaatagaacaactttccctgtctctccacataaagtgtgtttgtttttcctcttacaggtttccttaatgacaacaaaaaagggagtaatcctacccactgtaagagtcatgactcttgattgcagctgacagaaactcatgacagcctgctttagatgaagggggagagaaggactggaagaatcttggagttgggaatgtcacacgtaat

SEQ ID NO: 15787 - DNA, 891 bp, Homo sapiens
ccgactggaacatcttaggagttgagaagagtgtgtacattatttctttcctattttctttgggctacctttcagtctggatggagtctgccagggatggggatggcttcagtctcctctttatatgtaactaactattcctaaacttagtggtataaaaaacgctttattttgtgggtcaaaatttagacagggtacagtggtgttggcttttctctgctctgcaatgtctggaatgttagctgggaacagctgagagtgacttgaagtcctgcagatagaaccacctggaagctttttcattcacatgtctggtgcttgggctggaaggaggtgaggctgggcacagttgggataccgatgagaatattgactttggcctctctatggagtttgggcttcctcacaatatggcagcgtcagggcagtcccgtggacacaggggaagctgaatggctgtttgtgacccagccatcactcaactggacaaacaagccctcctaggttcaagaggaatggacagaaacaccacctcttgaggaagaagtgtccaggaatttgcagccatgctttcaacctgccaygggagccccgaagcctctcctttgctgcaatcccacctgccttttatccccctgacctctccttgggcatcctgattcctttctgaccctattccttgagtcccaggcagatgggccttttcctcactttgtcttgggagtatggcagtggactctgcctacttcataatggagcctttttcttgtccattttgatgacctctcagagcagggctctgacacgttactgggttacaaagacccctccctgccagggccagcgtgcagcacagggtgcttttgagttccggtgaacggggtgctctgg

SEQ ID NO: 15788 - DNA, 891 bp, Homo sapiens
ccgactggaacatcttaggagttgagaagagtgtgtacattatttctttcctattttctttgggctacctttcagtctggatggagtctgccagggatggggatggcttcagtctcctctttatatgtaactaactattcctaaacttagtggtataaaaaacgctttattttgtgggtcaaaatttagacagggtacagtggtgttggcttttctctgctctgcaatgtctggaatgttagctgggaacagctgagagtgacttgaagtcctgcagatagaaccacctggaagctttttcattcacatgtctggtgcttgggctggaaggaggtgaggctgggcacagttgggataccgatgagaatattgactttggcctctctatggagtttgggcttcctcacaatatggcagcgtcagggcagtcccgtggacacaggggaagctgaatggctgtttgtgacccagccatcactcaactggacaaacaagccctcctaggttcaagaggaatggacagaaacaccacctcttgaggaagaagtgtccaggaatttgcagccatgctttcaacctgccacgggagccccgaagcctctcctttgctgcaatcccacctgccttttatccccctgacctctccttgggcatcctgaytcctttctgaccctattccttgagtcccaggcagatgggccttttcctcactttgtcttgggagtatggcagtggactctgcctacttcataatggagcctttttcttgtccattttgatgacctctcagagcagggctctgacacgttactgggttacaaagacccctccctgccagggccagcgtgcagcacagggtgcttttgagttccggtgaacggggtgctctgg

SEQ ID NO: 15789 - DNA, 914 bp, Homo sapiens
atagtgtcaacaataactataggtaattatttaataattagtaattataaaataattgatactaaattaactatagaattatatagtgccagagttgtttggctatctttaattatacatgtagttatttaatttcacaaatagttatatgaattatggaagtgaaggtacgatggtataactatacaattattagataacttatcatagtggtatacatatttatcatrcagttattaaataattacaatggaatgacttattcgctctctgcgtttgtgcaagggcaaggatggccacgtcccagctctatccagcccctggcccagtgcctggggttcggtggcgctcagttcacgcttgcagagcgagcggcggtgagtggatgcggtggggtcgggctgtggtggtaaaggtggccgtgaacaggaggggccactagagcacacagacgtgaatgacatggggctccaggaggggcaggaagagctacagaaacagcatccccaaagctgcctggcacggaagaggtgctgcagaaatgggacttcccttcccatcctcttctcctgataaacaactgaaaacataagagcgagatcttggggcttctgtgaggttaaatgaacgaacaaaagtcttacagcggaaatcactgagaatctcccctcccctgtcttccaaggagaacatgattgtgagcctgctcctcccttcctgggggggttgcttcctgctggggagaggctaagttgaactctaggatcaagaaagggaaggaggcagagaaaggtgagaaaggtgagaaagatgagaaggtgctcgcatggagcgtccgggcagtaccaggctggcccgaaggaggtgcggatgagggggaaaggctgtttacagatgtggtggcttctccgtgt

SEQ ID NO: 15790 - DNA, 547 bp, Homo sapiens
aaaagttacactctctgctgtcaagcaatacacaagcctattattgaagatgtttagctttcagtgggacaaacatatttcagaagaaatgtggagttgtcatcaccaagtagtgttaaaaataattttccaaatgatgaaagttaaacatttcttagcaaaatcaggactaatccttgtattagtgtcccatctatccagctgtacagggtcgcagaagcagcacagacagcaacttgcttgcatttcgtaagaagaaagacaggccgggcgcagtggctcacgcctctaatcccagcgctttgggacgccgaggcggttggatcacgagatcagkagattgagaccatcctggctaactcggtgaaaccccgtctctactaaaacatacaaaaaaattagtcgggcttggtggcgggtgcctgtagtcccagctactcgggaggctgaggcaggagaatggcgcgaacccgggagctggaagttgcagtgggcggagattgctcgacaaaaaaaaaaaaaaaaaagaagaagaagaagaaagatg

SEQ ID NO: 15791 - DNA, 547 bp, Homo sapiens
aaaagttacactctctgctgtcaagcaatacacaagcctattattgaagatgtttagctttcagtgggacaaacatatttcagaagaaatgtggagttgtcatcaccaagtagtgttaaaaataattttccaaatgatgaaagttaaacatttcttagcaaaatcaggactaatccttgtattagtgtcccatctatccagctgtacagggtcgcagaagcagcacagacagcaacttgcttgcatttcgtaagaagaaagacaggccgggcgcagtggctcacgcctctaatcccagcgctttgggacgccgaggcggttggatcacgagatcagtagattgagaccatcctggctaactcggtgaaaccccgtctctactaaaacatacaaaaaaattagtcgggcttggtggcgggtgcctgtagtcccagctactcgggaggctgaggcaggagaatggcgcgaacccgggagctggaagttgcagtgggcggagattgctcgacaaaaaaaaaaaaaaaraagaagaagaagaagaaagatg

SEQ ID NO: 15792 - DNA, 648 bp, Homo sapiens
tgaattgaaagtgatttaataacatatgtaayaaacaatgtagctctgctattagattggttaggtcaaattataaaatcactattcattattttcttacattaagtttggtgatgtcagtaaatatttatctgaaacctgagccaactgtacccacaaactgtttgatagactacaatcgacttaacagtttgtaaggatattcactaatacctttaagaggaaatcagtgttataaaagctaataaaataaatatttaaaacttgcctggtggcaatcataaattctttttttaaatgagtgggcaatttttctgaggttggtaagaggctgatgaaactgagcagattcaaggaaagggacacttggttttgccaaacctgcaaattgggccagacatctcacagccttgcccagatgaaatgcctgtgactaaggcaaagagctatggttggggtcttgtgtgttctaatgaaccaacactgcaaactgcattttttatttcttcagtcataaaactaatgatgctaaacatacaaaatgaaaatcacacaatatacttaaattcaagaaaaactgtacagtatttgcaacatatattcctttcaaaaataatagaggggtgtcagagtgagagctcatctcta

SEQ ID NO: 15793 - DNA, 560 bp, Homo sapiens
aatatctaaaaaaacagaagttatgtaaagagctaaaaaatatgagactgaaagtgataaaagggcactttgggaggccaaggcaggcgggtggatcacttgaggccaggagttcaagaccagcctggccaaaatggcaaaaccccagttctaccaaaaaatacaaaaattagccaagcatggtggcacgtgcctgtagtcccagctactgggagagtgaggcaggagaatcgcttgaactcgagaggtggaggttgcactgagctgagattgtgccactgcactccagcctgggcaaaaaagcgagacccccakctcaaaaaaaaagaaaaagaaaaataaagaaagaaggaaagaaagaaggaaggaaggaaagagaaaaagaggaaagaaagaagagaaagaaaaaaaagaaagaaaaagaaagaaagaaagaaagataaaagacaggcaaagcaagccaatttatgtacaataggagtccctaaagaagaaaacctaaataaattagacagaattaatatttaaaattatactctaggaaaactatttagaactaa

SEQ ID NO: 15794 - DNA, 558 bp, Homo sapiens
ttaattgactcacagttccacagggctggggaggcctcaggaaacttataatcatggcggaaggggaagcaaacacgtccttcttcacatagtggcaggagaaagaagtgcagagcaaagtggggaaaaatcacttataaaaccatcagatctcatgagaactcactcactatcacaagatcagcataggggtaactgcccccatgattcaggtacctcccaccaggtcccttccacaacacatggagattatgggaactacaattcaagatgagatttgggtgsagacacagccaaaccatatcaagggcctaaaaggcaaagttgcctatatctcattcaataaggacaaaagagtgagcgtgtattaggaaacttcagccttgagctacagtcttttgaatgtcctcagtaggacaatgggtggaggaaggccagaaaagaatataaagacgctccagctctcccctctttctcaagtacgaagtgcgatcagttctgttcctgaaccaggaagcaaatgagaggaatcaggtaagtttcagccccctgggaact

SEQ ID NO: 15795 - DNA, 343 bp, Homo sapiens
catgcttacgaaatccaaaayatccaatccaatcctgggaagcaggctaaaatacacttgaccttccctggaagtggggtaaggaagcatgtaatgttccacggaaagtaaaccactagaagaaaaacacaattttaagatatcaaggagacttagggctcctttgtcatcctcatttattcaaaagaggattttagagtccaaaggaatgaagttttttgcctgattgatcaatgaatccacacagtcagaagtgatacctagtaatacagtgatctcactttaatttaaaaggggagagtgtaccctgtctcgtggttgcttttactgtaacagaaacagc

SEQ ID NO: 15796 - DNA, 471 bp, Homo sapiens
  misc_feature (1)...(471): n = A,T,C or G
gaaaaattaaattttacctcaaatgatagttaacattgagatgcatcaagactactaagaaacaaggatatccttacattcaaaatggtaaagttgatacattgatacacattggatattttaattcatttatatatatatataacattgatactcaatataaccatcaaggtaatytgaaagtaatatcactgttggataactggaatgtgacaatttagtgataatttacttgtatgctgttaggaaaaagatgataagaattttactttcataggtgggaattgaacaatgagatcacatggacacaggaaggggaatatcacactctggggactgtggtggggtggggggaggggggggaaaggatancattgggagatatacctaatgctagatgacgagttagtgggtgcagcgcaccagcatggcacatgtatacatatgtaactaacctgcacaatgtgcaca

SEQ ID NO: 15797 - DNA, 1203 bp, Homo sapiens
atagtgaaagtcgcatgcatctttatgattatgtacacagatttcataagttgtaaatgataacatgttcagatgctacatacctgcaggatggatgcattttccccatgatctgattaaaaggacaaagatctgtgtgattattagactcatacagatcttctgcctggacttttcccttgggaagactgaactggaatttaatatttaaactttaaaatgcaaactttactttgtaaatctttgtgaaatgtctgtcaattagtgacatttacttaaaattagagcaatcttcttgacccacttcagaggaaaattaagagtgacatcaagtgactgcagttctccttagtaaacagctatgtgagatggtaaggcwgagaatctttgaggacatctgaagcatgctgagctggtgaagatctcaaaggggaagtgggataaggtcacagcctgtgagctgtgacccattttaaaacatccccatttcagagatttgaaaactctggtagcttacctaattttttcaatgtcatatgagattgtcagaggcagtgttttattaggtttcttgcttcttaactatttctctatatttctctccaaaatgtagaaaactatgaaattctaactgaaggtagtttattaatgtcacctattgttcatagcattgaaaagcacagttccatatgaatatagtgatcaattttacaacattcaacacacatttaaagaacagcaactgtataatatcactttgtgcagtgctgtgaagatatagaaacactgccatggccatctaggagttcaggatctagtagaaagggcagataaaacgtaaatacaggggatgacagctataaatgttgtaagtacaaacagtatgttctgataatattctcagggagaataaggtaaaagattttccccattcccatcttggtttgctgttgatcaatataatattaaaactgcaactacctctgatatattcattccagaaattttgctagttcatttctgcaactataaaatatcaaagttcacatgaatttttataagaatattttgtccatatttttctacctgacttctggttctcagccatagaaatgtgctgccagaataggttgtatagcttccaaaactgatggaaaattatcaaaaattaacaaattacaaacatggtttatcccatctaag

SEQ ID NO: 15798 - DNA, 519 bp, Homo sapiens
tatagagaatattcttgaaattatagtgtttgtcttctggaacaaaaaatactaatcaaggaaatctacaaatttaatggtttattgagtttccacaggaaacactgtgtgaggaggctgaggcttagaagttcaaaaactaaaaggattgttatgatttcgataataatatcttatgtctgcacaacatctgaactcagttctttcctgaggttctctcattcttcaagcagcctctgaggtaggcaggrgcgataatatcggttccattttacagttaggaaaacagaggctcacagagtcccaaggcttagcgggaacgtccgccctgctctctgggttctgaagaacacagtcgtgaaggatgtaagccatttcacattttaagacgaaacagataacttgtgctaaatgcatgtcccagccctgccctgagggcaggtgggcacccggtggcctgcagggctgacaattgtgagagggaagcaagctggggaggctccctggagagctggtgca

SEQ ID NO: 15799 - DNA, 565 bp, Homo sapiens
gctttgttgagttgggataacagtatggattgatggcagtccaagtaaggtacagtgcagtaccagagtaagactgcaaatgctacctcatatttctcagtaatacagtggacaaaattgtaatttttattctgtttctattgcagtgtcttaagaaattgtgtataagcatgattgtgaaaaaataaccaacagaatcagaatcaaaatttcctttggaggtagatatacaaagtgtgagtggtaggtagaccttcaaactctggaccaaactaacagtttatggagaacatgttatttcagcaactcaagctatatttgcatagctttgagaggctatcttcgacattcaaaatttataccattttgagaaactcgtgctttctctaatgaaaatgtgttttgctcaatttgagatatttttgagtacaactatgtgctaagcattgtgccagtcaccggaaacaccaggtgaatcagtctctattctgaatgatctcatatatttgtgatcacaggtggaatggtaggttatgtytatctattgttgaaggataatgggagg

SEQ ID NO: 15800 - DNA, 598 bp, Homo sapiens
cagtggttaatgacaattgaatgtactacagaatctattataactttcaaaaattgtaatttaaaaataaatcttcctttataatatctttatattccccacatcaaaatgctgcaatcaacccattgtatcattatgaaaactggattaaaatccatccatcttttttattacaattctgaagtgtttctcaaatcaaggaaaatttaataaatcttttcaggacttaataaaagaacagaagatttatatatctaataaaaaatgcattcagttccaatggttttatttaatttgttttcatatgtcttcttatcacctattagatatcattttgtttctcaaaatccagagtggaaatcacttctaaaataatttttatagaaaaaaatatagattactcaggtattccatatgtctgtcctttaaaaaatgtggaagatttgagagtagcttgcacaatcagaggacatcaggggaaggtctatttggctattgaacttcagatcaattttgcgattttaacactgtttktttcataactcatacagatttcctctagagagtttcagagaatgaagaagagttaaaattaagc

SEQ ID NO: 15801 - DNA, 574 bp, Homo sapiens
tttcttgatgataatatctacctagtcacaatttttgtattgagaactttgatttttataaattaattttgtacctagcaacttttacaaatatgtttaaaatcattttttcctttaaaaacatttttattatgaaacttgtcatagacagagatatacgtaaaacttgtatgttcaggccgcgcgcggtggctcacgcctgtaatcccagcactttgggaggccgaggcgggcggatcacgaggtcaggagatcgagaccatcctggctaacatggtgaaaccctgtctctactaaaaatacaaaaaattagcggggcrtggtggcgggcgcctgtagtcccagctactcaggaggctgaggcaggagaatggcgtgaacctgggaggcagagcttgcagtgagctgagattgcgccactgcactccagcctgggtgacagagcaagactccgtctcaaaaaagaaaaaaaattgtatgttcagtttaactaacaaatcattataaaataacaaaataaaacacccttgcaaactactgcccaagtcaaggattgccaggagtcctagagcct

SEQ ID NO: 15802 - DNA, 616 bp, Homo sapiens
tccacctttgaagtacagagcttttataaaggatcactctgacacactattatgtaaaatatatcattttatcatgagaaaggcatattgattcagttaacaaatctgtagttagattttatatgtctgtatagataaccacttatttgacagttttcaattatttcctcacttaggatctttcaatttgaaataaaatgcctatcacaaaagattagaattaaaatttcataacataatttatgtgaagaacataatcataaaacttacaacctaaaaatctctccttgttaacaagtaaagctaaatccaaagtaaaagctacccattattgggtagctggcaagatgggcaaataggaacagctgcagtctgcagctcccagtgagatccacgcagaaggcgggtgattcctgcatttccaactgaggtacacagttcatctcattggaactggttggacattgggtgcagcccaaggagggtgagccaaaggagggtggggtgtcacctcacccaggragcacaaggggttgggggatttcccattcctagccaagggaagctgtgagagactgtacggggaggaacagtacattccggcccagatactgca

SEQ ID NO: 15803 - DNA, 573 bp, Homo sapiens
tagggaactttatatttgtccattttcacactgctgtaaagatacgagactgggtaattaataaaggaaagaggttttattgactcacagttccacatggccagagaggcctcaggaaacttacattcatggtagaagggaaagcagacatcttcttcacaaggtgacaggagagagtgtgagcacatgaaggaagaactgtcaaacacttataaaactgtcagatctcgtgagaactcagtcactgttatgagaacagcatggggaaaacctctcccatgatccaatcacttcccactgggtccctccctcaacacgtggggattatggcaatacaattcaagacaagatttgagtggggacacagccagaccatatcaaatatatttatattcatatcctcaggatcatcaagaataaaaagatataaaagtgaatggggacattttagaaagttattcaccaaaactttaataattataaaaagtggcttwtatctcagaataaccctatgtagtaagaatactgaggcttagagaagataagatcacacatttaatggcagaattttga

SEQ ID NO: 15804 - DNA, 1327 bp, Homo sapiens
tgtctgtctgactgtctgtttttgaagtgtctcaccctgttaaaaaaaataccctaaatgatcttattttgcccaagtatcaggtagctttttataacaatagcctataaaatacacaacagtagtataaaaggaaatgaaaaagctctatctgcctcaatgatccattgttatctctagcaatatgctcccagactacaagttaagtgaattttttttttgagacagggtcttgctctgtctcccagactgtagtgcagtggtgcaatcagcactcactgcagcctgtatctcccaggctcaagtgatgctcctgtatcagcctcccaagtagctgggacctcaagtgtgcaccactatgcccggctaattaattttttaaaaaaawtttttgtagagatggggtcttgctatgttgcccaggctggtctcaaactcttagcctcaagtgatcctcctgcctcagcctcccaaataatacttgacaatgatgctgaactctgaatagagaaattatgagcgtgagccaccatgccctgcctctttttttttttttttttttttttttgagacggagtctcactctgtcacccaggctggagtgcagtggcgcaatcacgggtgactgcaagctccgcctcccgggttcacgccattctcctgcctcagcctcccgagtagctggaactacaggcgcccgccaccacgcccgggtaattttttgtatttttagtagagacggggtttcaccatgttagccaggatggactcaatctcctgacctcatgatccagccgcctcagcctcccaaagtgctgggatataaagccctatggaagctttccttaacgtcctctatagatgttcaaaaattatgcctcatcatgggaaagcacacaaacaaggaagaagggcaacagtaggaataagaagaacagtagctggccagggcttgagatcaaagccacaccatttctggaggctcatcttccattattagaaatgtctgagtcttagatgcttcaatattaagatgacataagaagacgattttgtgacatagtgagttgtatccttgagcatgtggaccttgttaagtgggcctttagaaaataaatttaaaacagggatattggaaactatattttctgtttatttactaggtaagagaaggctatgctcttgtttgttctttctgggaatacagctagactaaatttctcagactctcttgcagttaattttgggccatacaacagagttctggccaatagcttgttggtagaagcgtcaaatgccaccctaggcatggaccatgttaaatctc

SEQ ID NO: 15805 - DNA, 1327 bp, Homo sapiens
tgtctgtctgactgtctgtttttgaagtgtctcaccctgttaaaaaaaataccctaaatgatcttattttgcccaagtatcaggtagctttttataacaatagcctataaaatacacaacagtagtataaaaggaaatgaaaaagctctatctgcctcaatgatccattgttatctctagcaatatgctcccagactacaagttaagtgaattttttttttgagacagggtcttgctctgtctcccagactgtagtgcagtggtgcaatcagcactcactgcagcctgtatctcccaggctcaagtgatgctcctgtatcagcctcccaagtagctgggacctcaagtgtgcaccactatgcccggctaattaattttttaaaaaaaatttttgtagagatggggtcttgctatgttgcccaggctggtctcaaactcttagcctcaagtgatcctcctgcctcagcctcccaaataatacttgacaatgatgctgaactctgaatagagaaattatgagcgtgagccaccatgccctgcctctttttttttttttttttttttttttgagacggagtctcactctgtcacccaggctggagtgcagtggcgcaatcacggstgactgcaagctccgcctcccgggttcacgccattctcctgcctcagcctcccgagtagctggaactacaggcgcccgccaccacgcccgggtaattttttgtatttttagtagagacggggtttcaccatgttagccaggatggactcaatctcctgacctcatgatccagccgcctcagcctcccaaagtgctgggatataaagccctatggaagctttccttaacgtcctctatagatgttcaaaaattatgcctcatcatgggaaagcacacaaacaaggaagaagggcaacagtaggaataagaagaacagtagctggccagggcttgagatcaaagccacaccatttctggaggctcatcttccattattagaaatgtctgagtcttagatgcttcaatattaagatgacataagaagacgattttgtgacatagtgagttgtatccttgagcatgtggaccttgttaagtgggcctttagaaaataaatttaaaacagggatattggaaactatattttctgtttatttactaggtaagagaaggctatgctcttgtttgttctttctgggaatacagctagactaaatttctcagactctcttgcagttaattttgggccatacaacagagttctggccaatagcttgttggtagaagcgtcaaatgccaccctaggcatggaccatgttaaatctc

SEQ ID NO: 15806 - DNA, 1327 bp, Homo sapiens
tgtctgtctgactgtctgtttttgaagtgtctcaccctgttaaaaaaaataccctaaatgatcttattttgcccaagtatcaggtagctttttataacaatagcctataaaatacacaacagtagtataaaaggaaatgaaaaagctctatctgcctcaatgatccattgttatctctagcaatatgctcccagactacaagttaagtgaattttttttttgagacagggtcttgctctgtctcccagactgtagtgcagtggtgcaatcagcactcactgcagcctgtatctcccaggctcaagtgatgctcctgtatcagcctcccaagtagctgggacctcaagtgtgcaccactatgcccggctaattaattttttaaaaaaaatttttgtagagatggggtcttgctatgttgcccaggctggtctcaaactcttagcctcaagtgatcctcctgcctcagcctcccaaataatacttgacaatgatgctgaactctgaatagagaaattatgagcgtgagccaccatgccctgcctctttttttttttttttttttttttttgagacggagtctcactctgtcacccaggctggagtgcagtggcgcaatcacgggtsactgcaagctccgcctcccgggttcacgccattctcctgcctcagcctcccgagtagctggaactacaggcgcccgccaccacgcccgggtaattttttgtatttttagtagagacggggtttcaccatgttagccaggatggactcaatctcctgacctcatgatccagccgcctcagcctcccaaagtgctgggatataaagccctatggaagctttccttaacgtcctctatagatgttcaaaaattatgcctcatcatgggaaagcacacaaacaaggaagaagggcaacagtaggaataagaagaacagtagctggccagggcttgagatcaaagccacaccatttctggaggctcatcttccattattagaaatgtctgagtcttagatgcttcaatattaagatgacataagaagacgattttgtgacatagtgagttgtatccttgagcatgtggaccttgttaagtgggcctttagaaaataaatttaaaacagggatattggaaactatattttctgtttatttactaggtaagagaaggctatgctcttgtttgttctttctgggaatacagctagactaaatttctcagactctcttgcagttaattttgggccatacaacagagttctggccaatagcttgttggtagaagcgtcaaatgccaccctaggcatggaccatgttaaatctc

SEQ ID NO: 15807 - DNA, 572 bp, Homo sapiens
atacttaagatttatgaacaacatatgagtgaaactgtgggaaaagaaaggcagatattactagagattccaatttttttttttttttgagacagagtttctctcttgttgcccaggctggagtgcagtagcgagatctcgggtcactgcaacctcagcctccccagttcaagtgattctcctgcctcagcctcccaagtagctgggattacaggcacctgccaccacgcccagctagtttttttgtatttttagtagaaacggggttttgccatgttggtcaggctggtcttgaactcctgacctcaggtgatctgcctgtcttggcctcccaaagtgctgggattacaggcatgagccaccgcgactggccccaaaattttaatttgaggcagaagccattaagttaagcttcacctgttagacygccccctgtttaattttaaccacaatatgtagtcggtgggcccaagcaatgctcatgcaattccaagaaaaattcgcaataattacagactgaccatatttacagagaaatggaacattcaagaaaaccaagggaaataatctca

SEQ ID NO: 15808 - DNA, 574 bp, Homo sapiens
ccaaagaaaaccaaagctctaagaggaaagtctctgatgcttcttaacgtggttcactcgacatgctgtttcctccccctgagctctctcctctccagcctcctgccatcgtgtggcttcgtctcactcttcgtctgggcctcagttgactggtcgtgtcctcagggcagagcacccggacccactgcctattcgaccagaaacaaaagtatattacacaccttggtaatcccagcactttgtgggggctgaggcaggaggattgtttgagcccaggagttcgaaaccagcctgggcaacatagcaagatcccatttctgcaaaaaaaaaaaagaaagaaagaaagaaagaaaaaatagccaggcacagtggtgcatgcctatagtcccagctactcaggaggctgaggtggcaggaaccattaagcctaggagtttgaagctgcaatgagctatgattatgacactgtgctccagcctgggtgacagagtgagaayttgtctcttaaaaaattaattaaattattgaattaaatattatttttaaaaaattaaaatatgccgaatgaatgact

SEQ ID NO: 15809 - DNA, 543 bp, Homo sapiens
ctaacatccacyttttccttgacatgcatgccccatatttactcatagaagttccattctaccagggaagagtaattgatttcaatgtcttgccgggaaaagtgaaggtaaattttatttgggaaagagttgagttctgtagctatgggaatcttcctcaagtatgtggtggactgtttgtggttaaggaataaacagtctaagttgtcccaaagacaagagttaaggcatgatgtgagaatttggaatagggagcagcttttagtattaacattgaatatatttgtctaaatgtggaatagctttattggaaagtcgtgaatggttctctgtttctggaaacatgttggccaaaaaattctgtagatatcaaagggaagaatactgctcaggtgctcagaatactgctgaggtgcatgtacacccaattctaaaattctgtggcagaaataagatgggctcagctgaaggtttttgctgtaggttgtttctttatcattatggaggtctttttatcttgaaatttttgcagttttcattttg

SEQ ID NO: 15810 - DNA, 560 bp, Homo sapiens
ctttgcccctgttcacccctcctcattttttcctcccatatgcaatgtgcctaatactcttctcaagagcacayatgcttgattcacagcttgggccttggcctttcttttctgagtttgaatcataggcagctaatgctaaaggggtcttctcacacagctttgtgcaatcctctaaattatgatgagaaaactaaggagcaatagattaaatggctgtggctctagtgagccattgagtcaatgtcggcaccaggaccaccactgactctggggcagtatgctagcacttcatagtgctctcaaagttgtgcaagggccaggcatgtgcctcacacctataatcctagcaactggggaggctgaggcaggaggatcccttgaggccaggagtttaaaactagcctgggcaaccctttttcctaaaaagttttaaagcatggtggtgcacacctgtagtcttagctactcaggaagctgaggcagaaagatcccttgagcccagtagttcaaggctacagtgagctgtgaccgctgtaacgcactatagcctgggtgac

SEQ ID NO: 15811 - DNA, 526 bp, Homo sapiens
taaagactgtttcttgaaataaaagaaaaaaaaaagcaaatggtaccttaaaagacaaagtactaaaactattgttataaaacaggaacagacaaaattatctttactcacacatattgtgatgaacctaaaaaacaagaaacactaaaaagagattagcattagtagcaaatttggtaagacgctgttataagaaatacataaacagtaatttttttctttttatggagaaaaataaatgagaaatggaaatggaaaaaaacctagacgcacgatagtaaccacatatgataaaatacctagaaatacattaacaaatgtagctagacagtctatatgaaggaaactctaaaattgtattaacagacataaaacaagaactgaataaatggaaaggtatgtcatgtttctggataggamgactttttaaaatgtcacttttataaattaatacataaatttaatgcagctcctgtcaggattccaaaggactttattttgtaactgggcaaaatgcttgccaaaa

SEQ ID NO: 15812 - DNA, 683 bp, Homo sapiens
ccagttcagtataaggcaaacttcagcctcatctccaattcacggcttctgtcctccttccttttcagtgcctaagacacagttctggaatctgcagtgggatcaatgaggtacggtctctgctttaactaacgctccactttgacctcacacaatgttctaccaagtggagatggggcaaggaggtgggaggaaggacaacaggaaagatttcttcacctacarggtactgttgatagttcttgctacagtgtcaaattactctgtcccgtagacctccaagtgtgagctctcttggaggcatttggtgggggcatactcctcacccagattggaagcccctttggtggagtcctttcgacatagcagtttaggcatggtggctcacacctgttatcctagctttttgggaggctgaggttgaatgatcacttgaggccaagagtgcaggacctgcctgggaaacacagtgagaccttgtcacttacaaacaaacaaacaaacaaaaaattagctgggcacagtggtgtgcacttgtagtctcaagctacttgagaggctgaggtaggaggattgcttggttctgggaagttgaggtggcagtgagccttgactgtgtcactcaactccagactgggagacagagcaagaccgtgtctaaaaacaaaaacaaaaacaaacaa

SEQ ID NO: 15813 - DNA, 558 bp, Homo sapiens
gtacaaaatttccagaaatgaagaagtatagaggattagaagcctcttgtgtggaaagtgatacctttattttgctgagtttcatttggatcttcttagacaccagatcagaccagtatttctctcctaagaagtcccaaaatattcttccaagcaaggcattcacccaggcttcctgttcttcctcctcagagggtggaacctctggcaactggcaaaagaaaagggaccaaaattagctagaaagcaactggagaataagacaggtgcttatttttataaagtcactgaaggtccctccttatagaaacaggagaccacacgagtcatactccttccctataaattacaagtcccacattrtattggtgactaggaaaggggagaaacgaaagctgccatcacagctaaaaccttctctttgtctgttttctttttctaccagtcttcctgtaaaccagctaatatttcatactattagcttagccaaactgctctgcgtccaaattagcttggtatcaacattatgcatcagtgacacatctgataaaatgcctg

SEQ ID NO: 15814 - DNA, 608 bp, Homo sapiens
agactacatgtatcttctttggccctgaaaaatccaagaggtggttcaatttggccaactctgttttagccctaaggaaagaaaacagagactctaagaaggtggcagattaaaaaagccccggtgaagtctgtattttgtgctaacacagggaacatgtgaatagcaataaaatttctctctgagcaacaaaggagactaaaagattttagtgaaagaagctagtaaagaatgcagtggcacagaataccttgggcatccatggagcactggaaggactctttgaaggataaaccaataaatgsagaatttcaggtaaagcatcaaagatatattcatttattcagattatgtttctttattgcctacttatgtcataagttatacagataaagtagaaaataaaataaacgatcacattacttatatagggctttatgccttaggtaatatggcctatttatcttagggaggttatttacataacttggatatcacctttgtttcacatatactctatcattagtatttcaggttaataatttgaagactgctctttaattgatatgttcctttacagtactcaaaaatttttaacttttacttta

SEQ ID NO: 15815 - DNA, 533 bp, Homo sapiens
ctcagtttctccatgtaacaaaccttcatatgtaccccttgaacctaaatgctggaaagaaaaaaaaaaamgaaaatgaagtaatgtatgtaaattgctgagaatcatgttcagcatagagtaagtgttcaacaaatgtaagcctttatcatattattcatataatagtaactgcctcccttgcatatgtaattaaacagctgaatagtttgattttcttctcataactaaattgtgattttctctctgtttctgattaggtgtgtgatattgaataaatggttcaccgtttctagaccttggtttctactgagaaataaaacaaatggataaagtcctcctaatatcatttctgagcctgtagtttggaatctcaagagaaacaaagtcaaagacattaaaagaaatgatgtgatgtaagggtaatgaggaaaactaaatatatttaggcatatttgaaattttgaatgcatcaaaatccaacctatgtatcagtcagcagaagcccagtgaacagtttgtgtggtttgaca

SEQ ID NO: 15816 - DNA, 499 bp, Homo sapiens
gtccattttaggctttttagaaatagccacattttcccttctaaaattgattctaagaaataactgattgaatgtaaaaagacttatgatcaaagatgtttacagtagcctttttttttttttgtaataatggacaatgtatggctctagagcctgtgaactttccatcacatgtttcaagtaaagatattgacattgctgggaacaactgtggaaggtcacagtgaaaggtcagttactggggtgaagttagtagacagatttaaatgctgggccagtttcctgttacttgcaaattataagcagaaacacttraattttactagaaagaatatgaagaaaggggatttaaaattttctgaatggaccaagatttaattctggctcaaaaaagggtacttaaaagtagaatctatttattatacttgatatgtctgtctgcttgaaaatatttgtaaaatattttattttgatttttaaacactatggaagtgcctca

SEQ ID NO: 15817 - DNA, 526 bp, Homo sapiens
ggttagggtaggaccctaagcagacacccacatattggacttcaggctggcatggagccccagaatttgtatgggagcttgagtgctgactttttggagagaacccagcaccggtcatgccagcacctcctctctgggctgtgtttgtctgtccttgtttactataagagataggaacaaagtcaaagtatttttcctactcacacacccaacactcaacacaaaacacttctgagaccagatgttccccacacactaaacacttctccggtagactccagctgggtgtcctataattcaatygatttggacctgagccacctggagtcagtcagatccctcaggttaagggcccagtcctgccagaccgcctcctacttcagacgccaatcccaagtggtaggttgtcatctatacttctgatcaaccagctataaatcagagttctcatgacctcttccttaggttcaattaatatgctaggatggctcacagaactcagagaaacacttatgtttaccagttt

SEQ ID NO: 15818 - DNA, 1091 bp, Homo sapiens
tataaaaaaaagtctacattctattatacatctaggatttaaagaatataagatccaatgtaataattgcctgattcaaatatatagtggatcagttgccaatcaaatttaaactggccaatccaattcaaacagaagaccaaaacatacacatgtgaataagctatctcagtgaacaaaaaatactgaatttgatcaactatatttttgttcattgaatgctgtgacaaaatctcatctgaaacaaccatgtcactatcacatggctagttaagtasttatagctagttacactatcacactgcaaaaaaaattcattttctgaggctctgacatctctgtaaaaacacattttaatattaggagaaaagagaaatacttacgagtagctggtcagtttatctaagttgttgtgcatattaaatgcatatgtttctcctaaatcaaagagcttctccaaagcctcgtagatgaatatgatgcaaataagggctgcaaaagcctcttctgtaaatcgagtaatataacacacaaggctgcttgcatctgttgcaaccaaaacaatgcacaaaaaagaagtccacagaccaatactggttcttaaagacagataagaaagttgataatctctgtttagaaagaaaaatatgaatatgataaacatatgtggaatagtatttgtacctaaaatttttcattgcaagcaatgggaacagcaaccccccacgattcttaaaagagaatgaattacagaatgacaaaataacatctagaaataactctatatctttttctgcttcggctgaagactagcttattagtagatttattattaataaattaattagtattaattattaatagtttattacacttatataaaagatttacagtgaaaatctaccaggcgataaatatttcaaaatcattacagctcactttataaatcagttatgagtaaatgacaggtatggtgtctatatgaaaaaacaattgcatcttactccctctaaagatccagacatcatatgtatcaatacagtaaccagctccaacatcattaccatcactaccactaccctcctctccca

SEQ ID NO: 15819 - DNA, 579 bp, Homo sapiens
aagtgtagtaggtactgctgttatctccattttayaaatgaggaagcaggcagagagtggttaggtaactgttccaaatgtagtctcttcaccatttcactgtgttgtacctccatagctctgacacagtaatacttttcaaaaattacatatcatgtgcttactaaatcagcaattagaagaattagagttttagcaatattaaaatataggtaacacaaaatagttatacctcagagtatattatctgagaaaactttaaatacatttaacataaattttagcatatatttaattttaatagcgttttaataattggcatacataatgacaaaaaggatttttaagtaattatcttttttaaaaagtataataaagttttagtctttatatgcacttactgtgtaccaccattagttgatttgtatgctgagatttaagcataaataactttattctgaattggaatttgatttttaataaccaactcgatagtatcggttaataagaaggaaaagtagagacttgagtatatagcattgatggttttgttgattgtagttccttgctccattttcc

SEQ ID NO: 15820 - DNA, 579 bp, Homo sapiens
aagtgtagtaggtactgctgttatctccattttataaatgaggaagcaggcagagagtggttaggtaactgttccaaatgtagtctcttcaccatttcactgtgttgtacctccatagctctgacacagtaatacttttcaaaaattacatatcatgtgcttactaaatcagcaatyagaagaattagagttttagcaatattaaaatataggtaacacaaaatagttatacctcagagtatattatctgagaaaactttaaatacatttaacataaattttagcatatatttaattttaatagcgttttaataattggcatacataatgacaaaaaggatttttaagtaattatcttttttaaaaagtataataaagttttagtctttatatgcacttactgtgtaccaccattagttgatttgtatgctgagatttaagcataaataactttattctgaattggaatttgatttttaataaccaactcgatagtatcggttaataagaaggaaaagtagagacttgagtatatagcattgatggttttgttgattgtagttccttgctccattttcc

SEQ ID NO: 15821 - DNA, 575 bp, Homo sapiens
ctaagtctgtaaaatgttataaattagtcaattctcttggaaaatattctgggaaaagtaacctcttcacacatgtgttataaaggaagctgaacggatgcttcaagaygatgatgatactgtgcaccttccatttgaagggggaagtctcttgcaaattccagtcaaggccctaaaatataggtgagatatgactttatgctctaaaacttttatatgcatgtcaaatgtattaataagtcatataatgcttctttaaagtgatgatttctattttataaaagatgatacaatctgcatatggtgtatcaactaaaggagggcttcacacaatttgaaaaggaagtcccttgctcctttcccacccaagctggacttggactaacccaagctggacttaaactaacttccatgccaagccaataaaatttgcttgtcttctatcactccatctatcttagtgaagtttaaaatcagtacatgagtctgagaatatttccattttcccagtagtgtggctttttcctttgtgcccttcattagggctggggtcggtgggtgctggaaaataaacg

SEQ ID NO: 15822 - DNA, 1208 bp, Homo sapiens
tgaaggcctattattattattacttgtataattaaatcccttaatgtttgatgatatgggacaaatttggcttgtaccaagttcttaaaacatgctaagtaattatttttatagcaagcatatttaaaataaaattgttttcttttcatttaaaagtggataccaatgcttcagaatggacggttgaagactggccagttttgcttgccagtctcattggaaaaaccaccacaggcttattctgtactgtctcctgaggtcagtgtctcccatgttgactttctccagattgaatgaaatgggttttttactataaagatgtttttaccaagcaaactcttgccatttcttctacttaaagtttatagataatgaaggaaaagtattttctcccgtggttaaaattcttttacataaaacttaaaagcttttatcctgtttttaaatttaaatttaaatttcattttaaatgtaaatatcctcattttaaaaccaaaataatacatggaatgtaaactcaaaagatcattttggagaattttcatactgtaacttgagaaacttctttaaataaatgaatatttcttttttatttttagtagacttaacatttcactaaaagactggaggaaggaaaacagatttaaattaattttttagaatctttttgtaattgaagatcatgtgaatgaaaacaaagtagctgtgaacctgtaatacatgagatattggcaactttgatgattacatatgggatttgaaagacttgtaacacaaatattggaaaaatctcaatcaagaatcaatagccaccgttcataaaccaaagttcctcttgagagaaacacaatggttgtcagtgtctcttaatgattttgaatataactgctggtaaatgttactctaaaatacgttttgtgaatattttcctggtgctatttgttttcagaatacaattcaaaatgtattcacaaataaatttttatgtatttttatttttaaaaaacaattcaaggctattgctctgatcttatttctcactgttctctgtcactcacttttgayagccacatagcacagagcctctgctgttccttacacacgaaaagtgcatttgcatttcaggccctttgctcttccctctgctggcagtgctctatcacaaagcctggttcttcattttactcagacctctactcaaatatcac

SEQ ID NO: 15823 - DNA, 526 bp, Homo sapiens
ggtacatcatcctgattggaccattaccttgtgccaggagctgactatgcttcacctaccacctgctaggtagtctataattcagctcccaaacctcatctggttgtctactttctccaaccaatcctcgtactaattcttgcaggcagccttcttgaggagcaggtgcagagagagacaaagctggagcataagatgtgaaaggaagggagaggaagtaggactggkaagagaatgaagtcaaattccagtacaggtccaataaagctttggccagcctcgctaagagctctggagtgaatactgcccatcagaggtgtccagtggtggccataatggctgagcctttatagtccagccttgcttaatcacccagtttaggctgcagagagcatgactgtgggcaaggccattgtctgcgattgaagcagagtctgatggaactgacaactggaggtagtctttgcagcttgggagcaagtccctccttgaagggggatctgggcagctcatctccatatctacc

SEQ ID NO: 15824 - DNA, 688 bp, Homo sapiens
cttgaggagagatgagagaaaggaaatactgtttgagggtagaaataggataaatgaagtcacagagaagaggctttcatttccacatctgttacttgaccatgtccatggtatgagagtttcatagttctttttctgtttttgcaggctgcatgctcaaatattctctataaaacataaacccatctccttaccctctcttcatttagcatttattttcaagatgctggctacattggtacattaatttcttatagatatttaatgagtcagttcacattaactggtgttcccttgcttaaaataataataataaagatgctggtagcttgtacctatgattttggtcaccaaaatacaggatrtttttccattacccagtactaataaaaggtgaggtacagaggtacagtaggtgagacaaattcataggctggcagcagcttagtttttcctatatttgaccccaactggagaaatgtgtattattatttttcaaggctgggtatagagctatatattgttgagctgttttattaatataaatatatagagagttaaaattgttttcaaaaagcatgttaggagttcacctaatgggagtgactgagaagaagaaaatgcacagaatttagtataaagaaatcccaaataataacaataaaaaagcataaagtatatctgaaga

SEQ ID NO: 15825 - DNA, 576 bp, Homo sapiens
gctgcccacatgtgtggctcataattttcttgtttcaatcaataacagcaaagttaaataattactagatttggttaagataattttacacgccaacttggctaatccatggtacccacaaatttggtcaaatatgtcattacatttctctgaaggtatcttttagaagagattaacattaggatccatagactttgactgaagcagattattctccataatgattgggtgggtctcctccagtctatgagggccttaagataaaaaagactgaggtttccagaggaagggagaattctacttccagactgcctttgggcttgagctgcaacatcaacttttccctaggtctctagcctgccagcctactccacagattttggacttaccagctcctagaatcctctgagccaattccttataataaatctgtctatatacatatacacacccaatttgttctgtttttctgaagaactaagactagtatattgatacgcagtgtatttatattaattaaaacacggtttacagttaccaaaacstaaaacaaactagcttaaacataaaatttgt

SEQ ID NO: 15826 - DNA, 515 bp, Homo sapiens
gataaatttcaaagctattaaaatacgtgtaataccatgcactcataaaaaggaatgagatcatgtcttttgctatgtcatggatgaagctggaagccatcatcctcggcaaactaacacaggaacagaaaaccaaacaccacatgttctcactcataagtgggagctgaacaatgagaacacatgggcacagggagggaacaacacacaccagggcttgttagcgggtggcgagtgaggggaaggaacttagaggatgggtcaataggtgtagcaaaccaccatggcacaggtatatctgtgtaacaaaccaccatggyacccgtatacctatgtaacaaacctgcacattctgcacatgtatcctgaaacttaaagcaaaagaaaaaaaaatcctggctttggaagttgtaattataatttctctgatattgcttaatgtaaaaattatgaatatccagtatgatagcaacaacagatcctactgtataaccaacatctttctcactgaaact

SEQ ID NO: 15827 - DNA, 515 bp, Homo sapiens
gataaatttcaaagctattaaaatacgtgtaataccatgcactcataaaaaggaatgagatcatgtcttttgctatgtcatggatgaagctggaagccatcatcctcggcaaactaacacaggaacagaaaaccaaacaccacatgttctcactcataagtgggagctgaacaatgagaacacatgggcacagggagggaacaacacacaccagggcttgttagcgggtggcgagtgaggggaaggaacttagaggatgggtcaataggtgtagcaaaccaccatggcacaggtatatctgtgtaacaaaccaccatggcaccygtatacctatgtaacaaacctgcacattctgcacatgtatcctgaaacttaaagcaaaagaaaaaaaaatcctggctttggaagttgtaattataatttctctgatattgcttaatgtaaaaattatgaatatccagtatgatagcaacaacagatcctactgtataaccaacatctttctcactgaaact

SEQ ID NO: 15828 - DNA, 579 bp, Homo sapiens
gcataattgatttttattcgtagccggtcaaacactgttcacatgccagagaggayagttcctttcaacggcatcccaggaggctccactatttccaaccatgttactatcattcaaaacatgttggccatacaacctcttttgaaattgccctcaggacttgcatgtaagcctcaaagggaaaccagtcacattgctgtataaatggcactttgttttttttttttttttttttgaagaaaataaaaaatattttcagggaaattaaagcaaaaactagtagaatcttcattttcctaagatactttgagaatgcaaaagtaatagccaacatttattgagcatttactatgtaccaagcactcttctaattgtcttacatgaatcaactcatttaaacctcattacaacccaatgaagtaggtcctgttattacccctattttattttttattttttaatttaattttaagttccgggatacatatgtaggacgtgcaggttggttacgtagataaatgtgcaccatggtggtttgttgcacagatcaacccatcacctaggctattaagcccctta

SEQ ID NO: 15829 - DNA, 557 bp, Homo sapiens
ttgagacagtctcactctgttgcccaggctggagtgcagtggtgtgatctcggctcactgcagcctccaccctcctgggttcaagcaattctcctgcctcagcctcccgagtagctgggattacaggcgcccaccatcatgcgcagctaatttttgtatttttagtagagacggggtttcaccatgttggccaggctggtctggaactcctgacctcaggtgatccacccacgtcagtctcgcaaagtgctgggattataagtgtgagccaccgcaaacggcctataatattttaaaattgtttttaagtgagagaaggggatatgctaggaggtatgccagctccagaaagcacattgcctagaatactatggtaaataagtagattttacagagaggacaatgagaaattaatgaaagattttaagcagataaataaaagtcagatttgtgctccccaaaccacagctacctttagggatgacagcttaacgtttaatatagaatttaagagacaaagataggttatgtgatttgcctaaagtcactamgcgaat

SEQ ID NO: 15830 - DNA, 672 bp, Homo sapiens
tacatatagaaatgagtttttaaaatcaaaataagataatttctggtaaatggctgacttttcccatatcatactatgtttgatgactaaaatcaaataaggaaaagggttatttctaggggggttacagaagtcaatttgtaagagatatcattatcatggctttggacaactatgaggtgacttatagttaggaaaaaatctgcactctatggttttgttggtttttcatatgatgacttactaagtattctttctgaatctttcttgcagccggtttttataaaatataaacatgtaagaatggttattcagaaactcttgyataaccctacaaagtgatgaattagaaggtgttaaaaaaaaaacccagcaacttaattataaaacaattacttctaatttctcacttagtgttggggaattttgcttggcattttctagggaaagaggaaaagcagaggtagtggtagctttgaaaatgtggaaccttatgctattatgtataacttcacttcaatatggctttacagaagacacagtcacccaacaggctggttctagattgctttggtttccacatgagacttttcaattgtttaaaatgaacgatgaagcacaaaatccagcctcattatgcaaagaacacttgagaagtgtcagcagtcacat

SEQ ID NO: 15831 - DNA, 664 bp, Homo sapiens
ctgaaacatttaataacttgtatatttctttgttacccaccatcttttcaatactacccagtcttagaacataaaacccaaactgaaaggggagctcttattttaatgtcttcttcatgggtgaatttttgaacagttctgctataatatgaaatattatttgagcttttaggataagaaaatatctttggaaagatcatgtgtgattgaggtaagttgttccagtaagatgtctaggacacagttcagaaggtgaaaatgtataccatatgacatgtgagtcttactaaatagaargaatccaggagcttcaacagatggtttggtaaagcaggtttcttggatggagccaaaacccccaggtagtagtccagcctgtttgatcagagaaattggaaatggcttaaagaatgccgtgcctggatgaattggtatgagccaagaaggacgtttgaaagaaattaaatcttgtttgcattgcttggaattcccataaaaaatatactgctggcagaagcatcaagctgccatgtaacacagatgaagaagattttctttactgatagtgctttttaaacaaatataatgaatgaaatgaaccttgaggaacttagcaaaaattaaatgtgtgtcattatgaatggctctgacagggaaaatataa

SEQ ID NO: 15832 - DNA, 664 bp, Homo sapiens
ctgaaacatttaataacttgtatatttctttgttacccaccatcttttcaatactacccagtcttagaacataaaacccaaactgaaaggggagctcttattttaatgtcttcttcatgggtgaatttttgaacagttctgctataatatgaaatattatttgagcttttaggataagaaaatatctttggaaagatcatgtgtgattgaggtaagttgttccagtaagatgtctaggacacagttcagaaggtgaaaatgtataccatatgacatgtgagtcttactaaatagaaggaatccaggagcttcaacagatggtttggtaaagcaggtttcttggatggagccaaaacccccaggtartagtccagcctgtttgatcagagaaattggaaatggcttaaagaatgccgtgcctggatgaattggtatgagccaagaaggacgtttgaaagaaattaaatcttgtttgcattgcttggaattcccataaaaaatatactgctggcagaagcatcaagctgccatgtaacacagatgaagaagattttctttactgatagtgctttttaaacaaatataatgaatgaaatgaaccttgaggaacttagcaaaaattaaatgtgtgtcattatgaatggctctgacagggaaaatataa

SEQ ID NO: 15833 - DNA, 496 bp, Homo sapiens
ttttccaaagaagccttcagcattgccgcatgccttctttactcatagtaaaaatcctgttcaacttgctatgattaaaaatgtctattatttcttagcattcagaaaatgctttaaaaaaatgtctttgggtttttcacaacaatcctcttttgctaaagtctgtaactcagaaaakattcattttgggaggaaagtctacagtaaatgcccttgggtcaaaggcctctgtctagtagagttcttctaaatgaaatccagtgaaagcatattagcaagtttcacagtttatctatggctttccatcaattgttagaaaatggcatttacattccttagtcagtttaacaagtgctttattgtttagtgatatttggacttctgacatctttagacccttgaggttaaagtcaaaatactttaaacaaaacagcatttattcaagtcattcagggcttaaaaagcatttttctccaaagaaagggatattagtggt

SEQ ID NO: 15834 - DNA, 581 bp, Homo sapiens
cggcgaaaccccatctctacaaaaaatacaaaaaaatacatggtggtgtgcacctgtagtcccagctactcrgaaggctgagatgggaggacacttaagcccaagaggcagaggttgcagcaagccaagatcatgccactatattccgtccagcctgacagagctagaccctgtctcaaaaaaaaaaaaaaaaaaaaaaaaaaaaagaatggaaaacaaacatatacaatgcaacctcaactggcaggatgaaaccccaggttcttgtgttaactccgctggctgggcagcccaggatgggtcactttcactctccatctccacactggtacgggaagaaattgggctgggagacagatcactcaggttcttccagttctaactctctgtgactccttgattctagtttgcgctaccaggcaaggttctatgtaaaaatagaggttcctcttcaaagactttcctctccatttaattaggaataaataataacttctcttagaagcaaaatttattcaaaaacctgtgctaacattcttaaatatctgctagtcgtaataagaaaaccaatatactttatg

SEQ ID NO: 15835 - DNA, 507 bp, Homo sapiens
cagctctaccagatgcaaatctacaagttaacatgtcacgatagactttgagacataattaattaaaaacagcaagtcaaacaagggcatataagcctagataaataatcaaacttgcacggacctattagacaatgctcctaggacagaaaatatatgtcaaccttcttttgctttactttcaaattttggataatttttcttaacaacatattaaatattttaccttcctctcattaaaatgctaacctttctttgagagattagatttccatatatgttatattttatttgcttaatcagaaattagtgctgttttttgcaattgaaggctgatatttttagtttcctctgttatagctacatataatgtstagtcctttatttagtggctaccacaatcataggcatagctctgggtacataggaaatgagtcttatactcataggtatatgaatctcttgaattaacaggctctgagcaattagaaaggaagaaggaacaaa

SEQ ID NO: 15836 - DNA, 507 bp, Homo sapiens
cagctctaccagatgcaaatctacaagttaacatgtcacgatagactttgagacataattaattaaaaacagcaagtcaaacaagggcatataagcctagataaataatcaaacttgcacggacctattagacaatgctcctaggacagaaaatatatgtcaaccttcttttgctttactttcaaattttggataatttttcttaacaacatattaaatattttaccttcctctcattaaaatgctaacctttctttgagagattagatttccatatatgttatattttatttgcttaatcagaaattagtgctgttttttgcaattgaaggctgatatttttagtttcctctgttatagctacatataatgtctagtcctttatttagtggctaccacaatcataggcatagctctgggtacataggaaatgagtcttatactcataggyatatgaatctcttgaattaacaggctctgagcaattagaaaggaagaaggaacaaa

SEQ ID NO: 15837 - DNA, 799 bp, Homo sapiens
attttttaattcagtagtagttcatataaatgaaagaatcataattttcagaaatcctcaggtgattttttttaagtgaatactttgtcaacaaacgagccacaagttcagtttagtgagaagagtttctccggctgggcacaatggctcacacctgtaatcccagcactttgggaggccgaggcagggaatactcacctgaggacaggagttcaagaccaacctggctaacatggtgaaaccccatctctactaaaactagaaaaattagccggccatagtggctcatgcctgtaatygcaactactcgtgaggctgaggcatgagaatcacttgaacccaggaggcatagtttgcagtaagatgagattgcaccattgcactccagtctggatgacagagtaagactctgtctcaaaaaaaaaaaaaaaaagaatacagtttctttagtttgtttcctcaaagacattctggtctacattgaaaaaaattattaatgccttgtttgataatagagaataagcatcactataattagctgctacagaagtctaaaacatgtaacaaaatatatcatttaataaattgctactagctactaaaaactctcctagaagcctttaaaatattatagtttttcataaaatcctttcttcttagggagctatttagattgtgctcacataacttggctaaaaactactcatttgtattttgtaaggccccatagttctaccatggatatttaatttaaccatttccttgtcaaatggatttttctcctgaagctatcaaaaag

SEQ ID NO: 15838 - DNA, 1268 bp, Homo sapiens
tagaatttttcgcatttatagggaaatcaaagattatccaatatttttaataacgtttgaacacctacaggaagaatcctatcatatggtatttctaagcacttttgaagtttaatgtatcatatattttttaaaaaattaggataatctagggttggaaattcaaagaatactaggaagaaaggcaggaaatcaagactagcctcttaaatcacttttccctgaatgtcatttaagggcatttaactttgtaactccacccaaagcagcactgcccctaaatttgagtcaaatcttgcagtattaaataagaggaacttggtgatcgtaatcatctttgttattctctaactttcctctctttgtctaaaagaaagccaagcaaaatggaccagagcatcgagcgccgcaaagtcaattatttacactttaaagtgaaaatggtaaaacgtgcctactttcaaaatgtgaagtttttatgactagtctatattctattctacagagaacatacatgaaactgcatctttgctcttattacactttacaaagtgtatcagaagcttttccatttcaactctgcttatgaaatatgcatattctagaccaacactgtccattagaatttcctgtggggatggaatgttctagtatggtgctgtccagaacagtggtcattagccacacagagccattgagtacttgctgcgtggctggaacagctgaggaactaaatttttcatgtcatctaattttaattaagttaaataaccacatgtagctggtggctgctgtggtggacagcacagctttatagtgactctgtgttatctggtagccagtaatttgcttaaaacaatgacaataacaacaggaactatagagtaggtagtctattgaaattayaacctattttgaaaaatagtgaaaagttggggtatagctcttggggcaatttgtattggtgaatttaaacagtgatgcatatggctagaatcacttcctctttgtctgccaaagaaaagaatgtatgcagacttctggctgcacacatcctacactctgccaagcacggaactaaaattcaacaaaagtttaattgctaatagtttttttctaccctgtgaaaatcttggaaagcacaaaatcatggaaatgacatgcagatagaaatggaaaacattagcaaaattgcccgcgaacaaaggcacgcatctgacatctaaaccaaagttattaggcattttacaacatggaatagagcagag

SEQ ID NO: 15839 - DNA, 539 bp, Homo sapiens
gatttagagaatgaggctttcagggcagagcccatgttttgttcatatttttatgtgttgtgccttgagcaaccaatggctgaaagaaagggcaccaaatagtctctgcctctgtttattaaatcataaagagatgcagagagcctaccgtgggcgctatggaattatatagttttttaaaaagtgaaatctggactgacttcattttgtttccttatgtagaaccctgggggcccagaaataacatctggttggactccacctaatgacacagggtatcaacctctcaaccacacagagacactgccctgtgaaatgtccttccagctcggggctcctgctcacakgagccctacagacgtttgcattgttccactataaccagagtcacccagggctcacacggccaacaaccaggttctgatttggaggcaagacccaaagagaagacacctgggaaggacacagaaaatcaaacttctttcctcaaagcgcacattcctcaacaattctctaagtaaaataaataacacatttgc

SEQ ID NO: 15840 - DNA, 539 bp, Homo sapiens
gatttagagaatgaggctttcagggcagagcccatgttttgttcatatttttatgtgttgtgccttgagcaaccaatggctgaaagaaagggcaccaaatagtctctgcctctgtttattaaatcataaagagatgcagagagcctaccgtgggcgctatggaattatatagttttttaaaaagtgaaatctggactgacttcattttgtttccttatgtagaaccctgggggcccagaaataacatctggttggactccacctaatgacacagggtatcaacctctcaaccacacagagacactgccctgtgaaatgtccttccagctcggggctcctgctcacatgagccctacagacgtttgcattgttccactataaccagagtcacccagggctcacacggccaacaaccaggttctgatttggaggcaagacccaaagagaagacacctgggaaggacacagaaaatcaaacttctttcctcaargcgcacattcctcaacaattctctaagtaaaataaataacacatttgc

SEQ ID NO: 15841 - DNA, 555 bp, Homo sapiens
tgcggaaatcgtttagaaaacagattacctatatgtgtgtatatataatatattataatgtgtataaatgtatgtaatattttaggcaagtcacttcaatgttggtgatattcaaactgtcattgcttggaaattcaaaatgtgtttgactttttagagttttgaagacgaacatcatttctgcttatgttgttctagttaacatgagctaactctcttcattatgtttattgttcaaaacaaatkaaagaatgtgtgtaaccttaaatggacatacttcttcacgtaataaacttgcctgtttctgagagatgttttgaagtaaaattgttacagttaaatatcttttgatcttaaataaaccttcttgaccaaatttaaacaataaatataaggtaattaatccacaggagaatgttatagaccccaatgttgggcagaaaagagaataattcactggacaaagtaaccagggatctttatacattttaggtttatccctgtaaattaacttcatgtctttttctttttgtggattcatattctgagtaactt

SEQ ID NO: 15842 - DNA, 1417 bp, Homo sapiens
tattgaaactaagggcactattcagatacaagtggtagaaattatttggtctttattatacatgcattgttcactatctctgtgcttctctgtcaggcacctatgatgttgagacaagttcccccaggaagctttactgagttgcttgtcataaggcagacatcgtctgctctaatagggtatgtttatgatctaaaatgttaaattctgggatctcaatgcagaatgatttaaatactttattaaagtcaagtgaaccctgggtttgtctgcacatatttgaggtacacatttatattgctgaggaagtgttttaagctggaatactggtgaagatccytattacttatggtagaattttagaatttcaagcagctcaacttgctgtcacaattgatatgtctaattttaatcaagtccacagggtatctgtcatctatgactttccaagagaatataaccttgatgtgctgaataatctggttctcttaaatgaggaatgatatctcaagtgacttacacatattaagtagttagtagtattagtaataatcacaaaataaccataatgcaaaattaataacatttctgagtcactgactatatgccagagacattttaagtgttttgtctgttttaatattttttccacacaacaaaatatgaagttggtactatttttgtaaatgtaggcataattatttctatcaacattctagtctacttttccatcatctgctacctgaatccatgcaaaatttcctgaatggttggctctttacagtgtggcccttctgtaatttaatccattgaatatcttggaggcttttcttaaaaaagagaatcgtttcatatatatttatttcttaactctttttagtagtttttcaatattcttaacaaatatttccactcctaatatgtatctggctctaatttacctcttaatatcatctgattcttaatcattccctgaaaacaaaacctgaggacttgagaactgtcctgaccactttatctgctttccctttttgtctgcccctccccgtcgttcttttacctattcctacatattgttcagctctcatcttactaatcagtaactccaggatactttctattatctccactgatgctttcttgacattgggtttttccttgagataatagttttttataacattttcattaattacttataatctatatttcaaagtagaatgtaaagtatgtagggacggaaactgtgtctttttttttctctgaaatttctgcacttacttgtgttttgtgctaatccctttataaatattctctgaatgaatgatcaataccttcttaggtgttgcataatcaagactttactttaaccaactctattttcaaagtctccttactattcctctctctctgtaat

SEQ ID NO: 15843 - DNA, 1417 bp, Homo sapiens
tattgaaactaagggcactattcagatacaagtggtagaaattatttggtctttattatacatgcattgttcactatctctgtgcttctctgtcaggcacctatgatgttgagacaagttcccccaggaagctttactgagttgcttgtcataaggcagacatcgtctgctctaatagggtatgtttatgatctaaaatgttaaattctgggatctcaatgcagaatgatttaaatactttattaaagtcaagtgaaccctgggtttgtctgcacatatttgaggtacacatttatattgctgaggaagtgttttaagctggaatactggtgaagatccctattacttatggtagaattttagaatttcaagcagctcaacttgctgtyacaattgatatgtctaattttaatcaagtccacagggtatctgtcatctatgactttccaagagaatataaccttgatgtgctgaataatctggttctcttaaatgaggaatgatatctcaagtgacttacacatattaagtagttagtagtattagtaataatcacaaaataaccataatgcaaaattaataacatttctgagtcactgactatatgccagagacattttaagtgttttgtctgttttaatattttttccacacaacaaaatatgaagttggtactatttttgtaaatgtaggcataattatttctatcaacattctagtctacttttccatcatctgctacctgaatccatgcaaaatttcctgaatggttggctctttacagtgtggcccttctgtaatttaatccattgaatatcttggaggcttttcttaaaaaagagaatcgtttcatatatatttatttcttaactctttttagtagtttttcaatattcttaacaaatatttccactcctaatatgtatctggctctaatttacctcttaatatcatctgattcttaatcattccctgaaaacaaaacctgaggacttgagaactgtcctgaccactttatctgctttccctttttgtctgcccctccccgtcgttcttttacctattcctacatattgttcagctctcatcttactaatcagtaactccaggatactttctattatctccactgatgctttcttgacattgggtttttccttgagataatagttttttataacattttcattaattacttataatctatatttcaaagtagaatgtaaagtatgtagggacggaaactgtgtctttttttttctctgaaatttctgcacttacttgtgttttgtgctaatccctttataaatattctctgaatgaatgatcaataccttcttaggtgttgcataatcaagactttactttaaccaactctattttcaaagtctccttactattcctctctctctgtaat

SEQ ID NO: 15844 - DNA, 1417 bp, Homo sapiens
tattgaaactaagggcactattcagatacaagtggtagaaattatttggtctttattatacatgcattgttcactatctctgtgcttctctgtcaggcacctatgatgttgagacaagttcccccaggaagctttactgagttgcttgtcataaggcagacatcgtctgctctaatagggtatgtttatgatctaaaatgttaaattctgggatctcaatgcagaatgatttaaatactttattaaagtcaagtgaaccctgggtttgtctgcacatatttgaggtacacatttatattgctgaggaagtgttttaagctggaatactggtgaagatccctattacttatggtagaattttagaatttcaagcagctcaacttgctgtcacaattgatatgtctaattttaatcaagtccacagggtatctgtcatctatgactttscaagagaatataaccttgatgtgctgaataatctggttctcttaaatgaggaatgatatctcaagtgacttacacatattaagtagttagtagtattagtaataatcacaaaataaccataatgcaaaattaataacatttctgagtcactgactatatgccagagacattttaagtgttttgtctgttttaatattttttccacacaacaaaatatgaagttggtactatttttgtaaatgtaggcataattatttctatcaacattctagtctacttttccatcatctgctacctgaatccatgcaaaatttcctgaatggttggctctttacagtgtggcccttctgtaatttaatccattgaatatcttggaggcttttcttaaaaaagagaatcgtttcatatatatttatttcttaactctttttagtagtttttcaatattcttaacaaatatttccactcctaatatgtatctggctctaatttacctcttaatatcatctgattcttaatcattccctgaaaacaaaacctgaggacttgagaactgtcctgaccactttatctgctttccctttttgtctgcccctccccgtcgttcttttacctattcctacatattgttcagctctcatcttactaatcagtaactccaggatactttctattatctccactgatgctttcttgacattgggtttttccttgagataatagttttttataacattttcattaattacttataatctatatttcaaagtagaatgtaaagtatgtagggacggaaactgtgtctttttttttctctgaaatttctgcacttacttgtgttttgtgctaatccctttataaatattctctgaatgaatgatcaataccttcttaggtgttgcataatcaagactttactttaaccaactctattttcaaagtctccttactattcctctctctctgtaat

SEQ ID NO: 15845 - DNA, 603 bp, Homo sapiens
taccaccaagtgatctccwatgatgtcagtaaagcagaagaatcgcctagctgagcccagtctaaattcctgatccataaaattgtgagatataataaaataattattgtattaaggtagcaaaagataactgtaacagcacctttacttgtttgagcagttgggaggggcatgcattctctctttgccccatcctactttcacaacgaggaaggagttcaaggcagtgggtgggtaaagagttttagatttggactataagaagaagccacaatacatttgtaaagaagaagcaaggtaaattaaaattgtctttttttccccataaggcacatgtttgcatgttttaaagccagagtatgacaaactagaggagaaagtgagaggaaaactatgataagggaaggaaatgtgagaaataaataaatctattagaaataagaaaggttgttatccaaaacaggtaaggataggtagggagagaggacctgtgacaggataaaggggctgccttatttaaacctggaaggaagaacgacagtataagcttccaggatattaatatcaggctaacatggacagttaagagcctttgccaggaga

SEQ ID NO: 15846 - DNA, 603 bp, Homo sapiens
taccaccaagtgatctcctatgatgtcagtaaagcagaagaatcgcctagctgagcccagtctaaattcctgatccataraattgtgagatataataaaataattattgtattaaggtagcaaaagataactgtaacagcacctttacttgtttgagcagttgggaggggcatgcattctctctttgccccatcctactttcacaacgaggaaggagttcaaggcagtgggtgggtaaagagttttagatttggactataagaagaagccacaatacatttgtaaagaagaagcaaggtaaattaaaattgtctttttttccccataaggcacatgtttgcatgttttaaagccagagtatgacaaactagaggagaaagtgagaggaaaactatgataagggaaggaaatgtgagaaataaataaatctattagaaataagaaaggttgttatccaaaacaggtaaggataggtagggagagaggacctgtgacaggataaaggggctgccttatttaaacctggaaggaagaacgacagtataagcttccaggatattaatatcaggctaacatggacagttaagagcctttgccaggaga

SEQ ID NO: 15847 - DNA, 550 bp, Homo sapiens
aagtggttcacgaggtgtgcagaattgatgaatggtccgctgtattcgcaaggagccacgaggaaggctgattttagccaggggctgaactcatccgaatttgtcactctgcacaaggacctctaatccacagggactcacatccctccagtccattacccggataacctggccttgggcggacgaataactggagaatcgattgttttctttgacactgagcagggcttcagggatacccttaatgaacgagggaatgactgaattaacccacacaaggacgccacggctctctcgggctggggttataagtcgatgctccaagcaaaatgtgtgtgtagtccaaaccgccttggagaaatcccttasatgggccagagagaagcaggacaaatgtcaccctggcgggggtttcttgcagccaccgttacagtccccgtcacgggctttacttcatcactcagaagggccgtgacttgctcagctccagctgccaaaacaaaatgccgcagactaggtggcttcgacctgttaatttctttttcttttt

SEQ ID NO: 15848 - DNA, 550 bp, Homo sapiens
aagtggttcacgaggtgtgcagaattgatgaatggtccgctgtattcgcaaggagccacgaggaaggctgattttagccaggggctgaactcatccgaatttgtcactctgcacaaggacctctaatccacagggactcacatccctccagtccattacccggataacctggccttgggcggacgaataactggagaatcgattgttttctttgacactgagcagggcttcagggatacccttaatgaacgagggaatgactgaattaacccacacaaggacgccacggctctctcgggctggggttataagtcgatgctccaagcaaaatgtgtgtgtagtccaaaccgccttggagaaatcccttagatgggccagagagaagcaggacaaatgtcaccctggcgggggtttcttgcagccaccgttacagkccccgtcacgggctttacttcatcactcagaagggccgtgacttgctcagctccagctgccaaaacaaaatgccgcagactaggtggcttcgacctgttaatttctttttcttttt

SEQ ID NO: 15849 - DNA, 1901 bp, Homo sapiens
cagccacatcaccttgccctagggctttctctgaagctgttctacatctagggcattatcacctcctagaagtcgtcctcagtgacttccaggaattagtggataaattcatgagcctgccctcttggatgggtaactctgaagcacttatgccacattccagagagttctgcagtaggccatccttcattgcctactggggtaactggcttaacaacacactctttactggccaccttccctcctgtatgacttcgctagggctgccatagattgagtggttaagcagcagcaatttattttctcacagttctgcaggctggatgtccagatcaaggtgccgtcagggttggttcctggtgagggcttgctttccggcttgcagatggccgcctgctagctgcatcctcccatggccgttcctctgtgctctcgaggagggagagagagagattctggtttctcttcctcttattataaggacatcagacctgtgagattagggacctacccttataagctcatttaaccttaatgaccttcttaaacgccctgtctccaaatacagtcttattggcggttagggcttcaatatataaatttcgacagagacagtttagtccaaaatacctyccttgtttcagtgattcccctgaaaatgcttcctgggatcacctcccaggaaacctttaggaccctgaacctttgtcttggatctgctgtaagacaatgcttctcagactgtcctttctagactgcaggctcactgacaacagataggggtcctcctacatgagggtcctcccacaaatgctccgcaatacgggtgacaggccagtggggtgttccccagctcctaccaagggctcacagtctcgggcaatctctatcctcccatctttcagcctctgctgcattctgacctcttcattaaccccatcggggagttgtccccccaagggcaggggaagccatccaggggctttcattatccgggtctcaaatctggggccagattcagccaatgggtagggtacaagaaggccttctacgtcccatcctggagggcagaggtctgggccgtggctggaagaaagcctgctctggtgacccctctcaggccctggcccaccccagtcctgcccttgacgacaaaagagggtgtccctgtctctcaggggtctaggatcctggacactgtgtctgctttgaagggaaagacgcctctgagagcggtctgtggcttcacatttattattgatgcaggcttcagcagccctctcttgggcatttccattctatatgtaaattccaatcggatttcagagcaacagtggcccagcgcaggcctgtgtaagctgtggctgcttagacaaggctggaccgagggggagacacgttcctacctgaccccaaaggaccttgctgtttggattttggagactcaaattacaatgcatctgtgccctgttttgttttattctatttgtttaattttttgagatgggggtgggggtctcagtacattgtccaggctggtctcgaactcctgggctcaagtgatcctcccgccttggcttcccaaagtgctaggattacaggtgtgagctagtgtgcccagcctgtgacctattttattttggactgacttttggggaagattcctttttgccacccagggtcacttgtggctggtgggtggggagggaggctgattgcaataggtgcctgcaagcccctcccctcccctggtggtctgcctggatacaggtcaccctcttgagttctggtgttgaggggaaaatgtcaccctgtggtttgtgaatagtttgggatgggatggaagaggagagggctgaagatacgtgcccatctgcctgccatggaccatatgtgacttt

SEQ ID NO: 15850 - DNA, 608 bp, Homo sapiens
cattttcatgctgctgataaagacataccgagactgggaagaaaaagaagtttaattggacttacaattccacatggctagggaggcctgataagcatggtggaaggcaaaaggcacatcttacatggcggcagacaagagagaatgagagccaagcaaaaggggtttccccttataaaactgtcatatctcatgagatttattcactaccacgagaacagtatgggggaaactgcccccatgattcacattatgtcccactggctccctcccacaacacatgggaattatgggagtacaattcaagataagatttgggtgaggacacagccgaaccatatcagggatacaataaaggccatatgcacctgcaggcacaagtgggtgttgcatayggtacaaatgtcaaatggtttttactggacagctccacccgtaagccaaaaatcaagacccaattcctcacggcagcaccagcctgaattatggcaaacatttctggctccaggttgatctttggagacagaggctcatgtgtcttagaccagtgagagatcacagtcctgcttgaataatagcaatgatagtaataactggggatggcagta

SEQ ID NO: 15851 - DNA, 608 bp, Homo sapiens
cattttcatgctgctgataaagacataccgagactgggaagaaaaagaagtttaattggacttacaattccacatggctagggaggcctgataagcatggtggaaggcaaaaggcacatcttacatggcggcagacaagagagaatgagagccaagcaaaaggggtttccccttataaaactgtcatatctcatgagatttattcactaccacgagaacagtatgggggaaactgcccccatgattcacattatgtcccactggctccctcccacaacacatgggaattatgggagtacaattcaagataagatttgggtgaggacacagccgaaccatatcagggatacaataaaggccatatgcacctgcaggcacaagtgggtgttgcatatggtacaaatgtcaaatggtttttactggacagctccacccrtaagccaaaaatcaagacccaattcctcacggcagcaccagcctgaattatggcaaacatttctggctccaggttgatctttggagacagaggctcatgtgtcttagaccagtgagagatcacagtcctgcttgaataatagcaatgatagtaataactggggatggcagta

SEQ ID NO: 15852 - DNA, 517 bp, Homo sapiens
cgggagttcaagaccagcctggccaacatagggaaacctgtctctaccaaaaaatacaaaaattagtgggggcgtggtggcacgcacttgtgatcccagctactcgggaggctgaggcaggagaatcacttgaacccacaaaacagaggttgcagtgagccgagattgtgccactgcactccagcctgggtgacagagcgagactccgtctcaaaaataaataaataaataaataaataaataaataaaataggagctaagacaccaccctcccccgcccctctatcaattaataggttcttctggaacacaggacccaagaactgagacattctcaaagccagtgtgacattctccaaacatcacaaagttagtgaaagataattagatggggttggccacagcctcggtttctcgtcccgagactaaatttttccatctccctgccagggtcacggctgcctgggacctgcgaatctcccagaatgtacagggatccyatgggaatagacatgcc

SEQ ID NO: 15853 - DNA, 521 bp, Homo sapiens
caggcaggtggatcacctgaggtcaggaattcaagaccagcctggccaacatggctaaaccccgtctctactaaaatacaaaaattagccgggcaygatggcgggtgcctgtaattccagctactcgggaggctgagacgggagaatcacttgaacctgggagacggtggttgcagtgagctgagatcacaccactgcactccagcctgggcagctgaacgagactccatctcaaaaacaaaaaaaaaaagaaagattttaaccaaatttcagactagccagaaggaagcaacctgtaactgttcagacaatacaggtgacagttaaaaatcttcaatgatatctgttgcttataaaattctttagcccggcattcgaagactctgctccactataattaggctaatcattattccctactctgctccactataattaggctaatcattattccctacacttaacgcacccttctgatgtagtgttgactttctgcctcagcttatatgatgttcatgtca

SEQ ID NO: 15854 - DNA, 583 bp, Homo sapiens
cagcagatcacttgagcccacaagtttgagaccagcctgggtaacatgaagaaaccctgtctctacaaaaaatgcaaaaattagctaggagtggtggtatgcacctgtagtcccagctatttgggaggctgaggtaggagaactgcttgagcccaggaggtcaaggctacagtgacccgagattgtgccactgcactccagcctgggtaacagagcaagaccctgtctcaaaataagtaaataataaaaatatagacaatgatacagaaatcattctgttgataatgatggaaaggattaaaatctgaaagactatgtagacagtcaatctggataatatgtgcaattaaaatagatttttgaatttcacaactggaagggctcttagagsaaagttaataaatatctgtctaatgaatcagtcaatcccttgctctacacatctgataactgaagcccagagaggtcacttgattttcctaatgtcacacagctcactagcagcacacctgagttgataattcatgtcttctgactatcgagaggtacagtactcatgaactgggcataaaacagtgccaaa

SEQ ID NO: 15855 - DNA, 555 bp, Homo sapiens
ggaccaaagtaaactaratacaaagatgaattagttcaagagagatacatatatcttgaacaaatatgtatatgtaaaatatatatttacaaattatgtaaattaccaagtgattaattttgaaaactgtggagcatcttgatttttttgtaagtaaacaactgatgttaactcttctttacaggactgatagacttaagcaataagtttgtggtttcccacctcatctgtcagtatgcacaagtggttctttggttctctcattctgggcttttaccagaaggcataggtaaaatatttacttaatctataagtattaattaaaacattctgaatctttataattttgttattgtattctaatgctttgggtttcttttcttccacctcacttatttttctccttaatttaatttatgcttaaccttcttttcttacatttttccttactttgtatcttcatcctatgcctgacacacagtgctcatacatgtttattggattgaataacatttagaaggaaagcaaatttgagaaaacatagctcctgaaaat

SEQ ID NO: 15856 - DNA, 538 bp, Homo sapiens
ctcccagctccagagctgcctgaggcattttttggaacaccaatttcaaaagcatcacaaaaaatttctaggtaagagtttattaaatcattcttagagacacaatgttagatgatagttacaattgtaatttttaattatstttaacattttatagacttttaaattattaaatgaatattttaatgtttgctttttattatactttgggcagcagtaattttaggaaattttacatcaggtagtagtatacttaaaatttttgttcaataatttcagactgcttagtggacaggagtgaagtttgtctcatgagcaaactattaacttactttccttgttacctgcttgttagtagacctctgaatgagggttgtttttatacttaattacagattaatcttgggtagctcattgaagctttcttctgttgaacagtgcctactaaaatgtcttgtgttgcttcagatgcagcacgtttacatcttacctgtggtgttaagttgaagttttgtatccaagatgaaattgtgattgc

SEQ ID NO: 15857 - DNA, 538 bp, Homo sapiens
ctcccagctccagagctgcctgaggcattttttggaacaccaatttcaaaagcatcacaaaaaatttctaggtaagagtttattaaatcattcttagagacacaatgttagatgatagttacaattgtaatttttaattatgtttaacattttatagacttttaaattattaaatgaatattttaatgtttgctttttattatactttgggcagcagtaattttaggaaattttacatcaggtagtagtatacttaaaatttttgttcaataatttcagactgcttagtggacaggagtgaagtttgtctcatgagcaaactattaacttactttccttgttacctgcttgttagtagacctctraatgagggttgtttttatacttaattacagattaatcttgggtagctcattgaagctttcttctgttgaacagtgcctactaaaatgtcttgtgttgcttcagatgcagcacgtttacatcttacctgtggtgttaagttgaagttttgtatccaagatgaaattgtgattgc

SEQ ID NO: 15858 - DNA, 526 bp, Homo sapiens
tactgcattaagtaatattgaaaccaacccaatagtcacataaatagttcttttggataaaaatagaaattgacccttctggtatcaaagcctgaaacttataytcgttttatctgagttccttcttcaggaaaggacccccctcacccagccatgcctctcaaaaagcatccaagaactgagactcaccagatcactcacttagacatctcattttgtttccttaccccaacctaatttgtattttctaacacatggttaaatttcttctctgctatataaacccctaactcgagtcagttatggatctggagttgagactgatctcccatatccttggctgcagcacccgattaaagccttctttcttgtcaatactctactccttgcctcagtcattggctgtctgtgcagtgagctgcaagacctagattgaaccatcagtgtttcaataacaatgtcattggcacaggaagggacacctcaggtatctgggagtgagatataagtagctcagcctctgcac

SEQ ID NO: 15859 - DNA, 538 bp, Homo sapiens
acacttcttcccctkttcatctggttaacatttaggcacctttcaagcctgctgaaacttaacttctgcacaccccagtatagacctgtgagcctctttaattacactctccattgcacatgtaagaatttgtagtcctgtattttcttatgtttttatttctttaatatttgtcttcacaagtctctgaggcagagacaggactgacacgcaactgattctcactattatggcctttaaaggttgttgtatatctgttttgttgacaacagacacctagtacacaacacagtacctaaaacatagtagacactcagcacgtttgtttaacaaatgagagaatgaccatggatgctctcatggaatcaattgtcgtgaattcaattaatgcagcctttaccaaactcttattctgtgtagatcatgaacacaatggcttaaaaatcagcagcaccagtatctgctggagcatgacagaaagacagaatcttgagtccaaacctaaatgacaatctgctgtttaatgagacacatggga

SEQ ID NO: 15860 - DNA, 538 bp, Homo sapiens
acacttcttcccctgttcatctggttaacatttaggcacctttcaagcctgctgaaacttaacttctgcacaccccagtatagacctgtgagcctctttaattacactctccattgcacatgtaagaatttgtagtcctgtattttcwtatgtttttatttctttaatatttgtcttcacaagtctctgaggcagagacaggactgacacgcaactgattctcactattatggcctttaaaggttgttgtatatctgttttgttgacaacagacacctagtacacaacacagtacctaaaacatagtagacactcagcacgtttgtttaacaaatgagagaatgaccatggatgctctcatggaatcaattgtcgtgaattcaattaatgcagcctttaccaaactcttattctgtgtagatcatgaacacaatggcttaaaaatcagcagcaccagtatctgctggagcatgacagaaagacagaatcttgagtccaaacctaaatgacaatctgctgtttaatgagacacatggga

SEQ ID NO: 15861 - DNA, 742 bp, Homo sapiens
tatatatatatatatatagttatcactgtactcattaaaatgtttgacatagtattgagaaaataagtaaggcactaatttgtcttttaaggccccaaacccagaacttacaaacaaagtaccatatatgaattaataaattgaattttctattgcagtatttattgatgaagtaggctgatttagcttacttccattaaattttgtaaagattcgtgaacagagaagaactattttttaatgaatatgaattcagggcatccccaggtatagataaaagtgttcaaggcttcacaaaggaaacagagacagaggcagtacagtgtggaagttaaaccataagctttagagtcaacagaactagacacaagtcctggttcccatcattagcagtgagcctcatctatagattggcaataaaaattatctcagaaaggctttaaaggattaaagcaaataaccagataatgcatgagaattactgttaacaataaaaagagaataaagaatgaatattttaaaaatcatttagctttctggaaacttcaacagcattcacagtggaataaaakagccatcggaacgctgctcttaccagaggttagttttgcatagttcattcattcggttaatgtgtcttgattaagaacccgtactacattgtgctaattactagagaataaaaaaacacacaaacatcctgtgaaatggaacttagaacttaatagagataatactttta

SEQ ID NO: 15862 - DNA, 742 bp, Homo sapiens
tatatatatatatatatagttatcactgtactcattaaaatgtttgacatagtattgagaaaataagtaaggcactaatttgtcttttaaggccccaaacccagaacttacaaacaaagtaccatatatgaattaataaattgaattttctattgcagtatttattgatgaagtaggctgatttagcttacttccattaaattttgtaaagattcgtgaacagagaagaactattttttaatgaatatgaattcagggcatccccaggtatagataaaagtgttcaaggcttcacaaaggaaacagagacagaggcagtacagtgtggaagttaaaccataagctttagagtcaacagaactagacacaagtcctggttcccatcattagcagtgagcctcatctatagattggcaataaaaattatctcagaaaggctttaaaggattaaagcaaataaccagataatgcatgagaattactgttaacaataaaaagagaataaagaatgaatattttaaaaatcatttagctttctggaaacttcaacagcattcacagtggaataaaatagccatyggaacgctgctcttaccagaggttagttttgcatagttcattcattcggttaatgtgtcttgattaagaacccgtactacattgtgctaattactagagaataaaaaaacacacaaacatcctgtgaaatggaacttagaacttaatagagataatactttta

SEQ ID NO: 15863 - DNA, 742 bp, Homo sapiens
tatatatatatatatatagttatcactgtactcattaaaatgtttgacatagtattgagaaaataagtaaggcactaatttgtcttttaaggccccaaacccagaacttacaaacaaagtaccatatatgaattaataaattgaattttctattgcagtatttattgatgaagtaggctgatttagcttacttccattaaattttgtaaagattcgtgaacagagaagaactattttttaatgaatatgaattcagggcatccccaggtatagataaaagtgttcaaggcttcacaaaggaaacagagacagaggcagtacagtgtggaagttaaaccataagctttagagtcaacagaactagacacaagtcctggttcccatcattagcagtgagcctcatctatagattggcaataaaaattatctcagaaaggctttaaaggattaaagcaaataaccagataatgcatgagaattactgttaacaataaaaagagaataaagaatgaatattttaaaaatcatttagctttctggaaacttcaacagcattcacagtggaataaaatagccatcggaacgctgctcttaccagaggttagttttgcatagttcwttcattcggttaatgtgtcttgattaagaacccgtactacattgtgctaattactagagaataaaaaaacacacaaacatcctgtgaaatggaacttagaacttaatagagataatactttta

SEQ ID NO: 15864 - DNA, 742 bp, Homo sapiens
tatatatatatatatatagttatcactgtactcattaaaatgtttgacatagtattgagaaaataagtaaggcactaatttgtcttttaaggccccaaacccagaacttacaaacaaagtaccatatatgaattaataaattgaattttctattgcagtatttattgatgaagtaggctgatttagcttacttccattaaattttgtaaagattcgtgaacagagaagaactattttttaatgaatatgaattcagggcatccccaggtatagataaaagtgttcaaggcttcacaaaggaaacagagacagaggcagtacagtgtggaagttaaaccataagctttagagtcaacagaactagacacaagtcctggttcccatcattagcagtgagcctcatctatagattggcaataaaaattatctcagaaaggctttaaaggattaaagcaaataaccagataatgcatgagaattactgttaacaataaaaagagaataaagaatgaatattttaaaaatcatttagctttctggaaacttcaacagcattcacagtggaataaaatagccatcggaacgctgctcttaccagaggttagttttgcatagttcattcattcggttaatgtgtcttgattaagaacccgtactacattgtgcyaattactagagaataaaaaaacacacaaacatcctgtgaaatggaacttagaacttaatagagataatactttta

SEQ ID NO: 15865 - DNA, 544 bp, Homo sapiens
atggatgtcctaaataccttgatttgatcattacacattgtatgcatgtatcgaaatatcacatgtatatacaattatgatgtatcaaaaattagtgagttttaaaaaaagacttataaagcaaaaaaagattagccayggctttttggggttcttgtttgacttcctggactgttgctagacaaagcaacctgactttccacaagtctgacacagccggctggcttcctgggctggctactgtgttggcttcctgggcaggttgctgcaggctgtaggtcagagttctgtcttttaggcatggtctggctgttttctgtttatctattcagtctctcattagtgttgccagaaccaggaggtagaaccaggaaaggctaaaattcctgaaggcacagaagctcggactggattattcatccatttacatcatttcatgtgtcagccatcaaagcgaggttgatgcttgagtcttgggatcaagccctcactgacttaccccaccccagacaattggtggtaggttaggaagggcagctgttct

SEQ ID NO: 15866 - DNA, 562 bp, Homo sapiens
aggaaccccactattaccataagccaccgcagctgatgagcctctcccatctcacaagaaaggcaggcagggaggcacaggcccaagcagctccagcgcccaagggctcttggttctagtccagctggatactggctgatcctgcccagggcctgcagacacctggcaccgtcctcctgggccgcacccaccccgtgcttccacactgtgcccagagggaagatgatggctgacacagactcggtggaaaagccaccccaaaaccagaatttatttttaagctgaggtggaaggtcagctgcagggacacgctgccacctcccttcttgacatgagcctccttgagttggcaccaggatgtagcatggctcccacccttgcttcccctttggttggacmctctccaatgccagggtcatgcaccaacagagcagctccaagaaagagcattttccaaagcccagatgactcagagtggtgagtgtgaccggaggggaggttcagcacccagctcagacctttgtttgggagttaacgattcctccatgctgatttcacctgc

SEQ ID NO: 15867 - DNA, 607 bp, Homo sapiens
aattaagacatatactttttggctgggcgtggtggctcacacctgtaatcacagcactttgggaggctgaggtgggtggatcacctgaggtcaggagttcaaaccagcctggccmacatggcaaaaacccatctctactgaaaatacaaaaattagttgcacgtggtggcgcatgcctgtaatcccagctactcgagaggctgaagcgggagaattgaacccgggaggcagagattgcagtgagccaagatggcgccattgcactccagcctaatcaacagagcaaagactgcgtctcaaaaaaaaaaaaaaaaacaaaaggacatactttttttaggcatatgcatatgctattgcacacttaataaactacagtataacataaatgtaacttatatgtgcactggcaaaccaaaaaaattcatgtgactctatcatgatgcttgctttattgctctgatccagaactgacccctcaatatctctgaggttgcctatatcacagttcacattcttcttttttgtttcctttttattgctagttcgtttctttaccatggtcttaactggccagtcccagtggactgaagatgaattctattaaaaa

SEQ ID NO: 15868 - DNA, 523 bp, Homo sapiens
actggtgggccataaataaatgaaatacacatcctaaaaataatggtaaaaatgatcaagtaccactttcagatggttattcaagtatcaacttggtatgcaagtaagttcacccatgtcttcacctatgatttcatattcaaagcgctacatcttacttaggtactgataaatttagaaacctttataatcaacctcttaaagaaaatccagctttttcagatggtaaacttttctttactaactttagtgcctgtaactatttcgatataaccaaacaaaaatttttaaaaatatattccgtacagttcctgattaacttattttttgatgtattttgaggctagtaacacaatttagamcagaataggttttcatatatcaaaaaaaggaaaggaacacggagagcacagatgagacatatggaggctctatactatagacccatccttgctctgtgctggaatcatcacaggaatcgcacccattcgacttagattaggggcagctaccttagcaggtg

SEQ ID NO: 15869 - DNA, 530 bp, Homo sapiens
atcagacaagttttaggtctaatgaaaaataccttccatcttttcaaattaatacacactcatttttaggctacaagagatggctagtcagcatttgactgccttgcctatttattcatttttttagaggcaggttctcactatgttggccaggatggagtgtagtggctattcacaggcatgatctcactactgatcagcacgggagttttgacctgctccattttcaacttgggctggttcactcctmcctaggcaacctagtggtcccctactgctgggaggctaccatatactgatgctgaacatagtgtagacaaccgacgggcatagcacgacagcctagaactcctgggctcaagccatcctcctgcttcagcctcccgagtagctgggactacatggccactatgcccagcctccttacctttacaagagtgacctgatcctcctctatttatgggtcattaaaaaatttcaaagccaagctatactaatatatgccttactctgcattttagatggctcca

SEQ ID NO: 15870 - DNA, 530 bp, Homo sapiens
atcagacaagttttaggtctaatgaaaaataccttccatcttttcaaattaatacacactcatttttaggctacaagagatggctagtcagcatttgactgccttgcctatttattcatttttttagaggcaggttctcactatgttggccaggatggagtgtagtggctattcacaggcatgatctcactactgatcagcacgggagttttgacctgctccattttcaacttgggctggttcactcctccctaggcaacctagtggtcccctactgctgggaggctaccatatactgatgctgaacatagtgtagacaaccgacgggcatagcacgacagcctagaactcctgggctcaagccatcctcctgcttcagcctcccgagtagctgggrctacatggccactatgcccagcctccttacctttacaagagtgacctgatcctcctctatttatgggtcattaaaaaatttcaaagccaagctatactaatatatgccttactctgcattttagatggctcca

SEQ ID NO: 15871 - DNA, 282 bp, Homo sapiens
atggtagcaggcgcctgtaatcctagctgctccggaggctgaagcaggagaatcacctgaacccaggaggcagaggttgcagtgagccgagatcacgccactgcactccagcctggatgacagagtgagactctgtctcaaaawaataataataataatacgattttcaacattttcacattcaacataatctcactatatttttcttgattctcttttacatatttcaaaggtctttcctcttgaaatttgaagaaaaatacatattttttaaattagaaa

SEQ ID NO: 15872 - DNA, 1431 bp, Homo sapiens
ttctctagcgtagagataacctagtttctctatttgatcctcagaaaatactgtttcaaatttcttcactatcctggtcactcacttctgaattaactgttcttaaagaatgatacctggaattgagagcaatactccaggtagaatctaaccagcacagactagagtaaattattatcattttcttttgaaatattgttgtgataaaaaaaaataaacctagcactcctggtatgttctgcaaagggaagagtttctcagaattttatctgcttgaaattaaagaaaaaatgtaaagcttctactacttctatatatagagagagagacctgaaacatacaatgattttgttttgtttttaattagatcaattggtgctcctttttaaaaataatctggagtgtaggttgagaattaagatgttctgcataataacgtaacatgaaattttaaactttaattttgaaatatttttagagtcatgtagaagttgcaaaaatagtacagagttcagatgtactcttcacccagcttcccccaaagacatcttatataaccatagtataattatcaaaatcagaaaactgacattggtacaatactatttattaactaaactactgaccttatttggatttcaccaggtttttgtttgtttgtttgttttttgagatggagcctcgctctgttaccaggctggagtgcagtggtgtggtcttagctcactgcaccctcgcctcctgggaacaagcgattctccttcctcagccatctgagcagctgggatcacaggcatgcatcactactcctggctatggctaatttttgtatttttttcttttagtagagacggggtttcaccatgttggtcaggctgatcttgaactcccagcctcaagtgattcacctgcctcagcctcacaagatttcacagttattatatacaatccttaaaaaaaaatgtttgggggatgtatgtagttctacaggattttatcacatgtataaattcatatgaccattatcacatttgggatatagaactcccaaagaaactcccatgtgctagccgtttacagtcacaccccaatcctaacccctggcaaccactgatctgttttccattaccatacttttgttactttgagactgttatgtaagtggaatcatctagtatgtgaccttttgaaacccartagtttttcaacagttacctcaccgcacccccacagaagtctttagtttctattgttgccgtttttatgtccatgagtaccccatgtttagctcccacttataagtgagaacatgtggtatttggctttctgttcttgcattaattcacttaggataaaggcctccagttgcacccgtgttgctgcaaaggacatgattttgttctttttttatggctggatagtattctgtgg

SEQ ID NO: 15873 - DNA, 954 bp, Homo sapiens
aaataaaaccaaatgtgatctgtatattttttcctaaagatggcattaactatttaatctcaacattgtgaatttacttccactgagaataggaaatttgagggtaggaactttctctagttcaccactttactcagaatctacaataatatctgcataggcaagattctggataattgaatgaatctatttgaatgaacctaggcatagagagatgaacaaatgattttttgcstttattttaccttgttttcttccactccaccctcacttattgaggactgcattaaaaaaattaagtaccctatgtttgctctaattacaattagcatttctccaaccaaacatctaatgcttattcagtctcatcacttggattctttcttacaggcacctcaaattgaattcgtggtccttccttgctcctattctctccctccgctgcctcatcattgctactaccaatgtgcacagccatcatcaccacaatccaccagctattcagccatctttccttacatctccccttccttactccctagatccagtcaccaccaagttccatgaattttatttccaaaatctttctcaaatccatccacttttctctgtttccattgtcactaatccaagccactctttctctatctggacctggcaataggctttttactcatctccctgcattcccacctgccccactccaattcattctttgtacctcagccaggaagatctttttagaactcacactagatcaagttggcctcctgtttcaagcctttcaaaacctaacccacctttctcagtgccaggaccctgttcaacctctttttatgtcactgtaccttcatccatgaccactattgtgctacattcacaaagacagacagatattcaggattcaaactaaggacatttagatagccttaaggcttgcggcctggccaggaa

SEQ ID NO: 15874 - DNA, 527 bp, Homo sapiens
atacatatacgtgtatacataggtgtgtatgtgtatatatacataaatatacacacacatatacatacatatacatgatggagcaccagaaaaccaaccatagctcctcaatctataaaaccaatctacatgttagggcttttctcttgcctcccgaaacaaaaccacattagaagcttcctagattatgatccaccagtcctggggttttgggggaggasgaataggaggacaaatgccagaggtcacttggtatgtgtttacttttctaggatctccatacccaagtgtctactcaatgcaatggtagggataagcaaactttaatagtgcctttgctactatcctgccctttgaggctggctcctggcccaggtcaaagtcatcatcttccccaaagatctcaaaacatcttgtaccctccaacccctaagattccccatggttttcttggtcttttgcctctaattcctctagaattcattttggaggggagagcctgttacatctgctagatatgtattata

SEQ ID NO: 15875 - DNA, 527 bp, Homo sapiens
atacatatacgtgtatacataggtgtgtatgtgtatatatacataaatatacacacacatatacatacatatacatgatggagcaccagaaaaccaaccatagctcctcaatctataaaaccaatctacatgttagggcttttctcttgcctcccgaaacaaaaccacattagaagcttcctagattatgatccaccagtcctggggttttgggggaggaggaataggaggacaaatgccagaggtcasttggtatgtgtttacttttctaggatctccatacccaagtgtctactcaatgcaatggtagggataagcaaactttaatagtgcctttgctactatcctgccctttgaggctggctcctggcccaggtcaaagtcatcatcttccccaaagatctcaaaacatcttgtaccctccaacccctaagattccccatggttttcttggtcttttgcctctaattcctctagaattcattttggaggggagagcctgttacatctgctagatatgtattata

SEQ ID NO: 15876 - DNA, 572 bp, Homo sapiens
aacctgtcacacagagaagagaggcgcctctgttttcccatcagggatgagtacaggaaayggcagcatattttccacttgtgagtaattttttatctaatttttcaagttgagaaagatcaccatgctgtatgaaatataaccacaacacataagacatgttataaatttgaatgtgtgtagactaaacaatattatggggttttctaccattaccctctataagcatatctaaatatctaaaaagcctaaatttctataaagaaatacgtgtcagaattagagcaagaagtctatcaaatgcaaggaaaccttttattttacttgcgtaaatggttcagagttcctatgtacattctttacccggattcttccaatgataacatgttacattactgcaatacatttactaaaacttggaaactgacattggagcaatactgtaacaaaatcatagactagtgtttcacaagtttttatatgtactctttctctttttttttacagttatatgaaattttattacatagattctgaattagtagttgatgtaattagaaacaacaacaaca

SEQ ID NO: 15877 - DNA, 514 bp, Homo sapiens
cactggacacattcaccttattgtaatagcagacattttaataatacatcatacaacttttttttttcttttctttttctttttttgagacagtcttgctctgttgcccaggctagagtgcagtggtgcaatctcagctcattgcaacctccgcctcccaggttcaagcaatactcgtgtctcagcctcccgagtagctgggattacaggcatgcactaccacacccagctaatttttgtatttttagtagagacagggttccaccatgttggccaggctggtctygaactcctgacctcaggtgatccacccacctcgacctcccaaagtgccaggctttcaggtgtgagccaccacacttggccataaaacttttcttaatgttgtattctcacagacaattagaagacaatgaggattgtttgaagtttatgatatagctgtattgtaaaagcaacattttttgtttgtgagaaaagatgctcaccagaaatatgaggcttaggaaaaact

SEQ ID NO: 15878 - DNA, 515 bp, Homo sapiens
gagggccttgcagtggaagacatggtatatttaagggcttggaattttaggtgggaggaagcagggataagatgagggttgggagctgggatgaggcaggtgtggtacacagtctagaccttgggcacaaggacaagttttggaacacattctaagagagatgagggccatgaatgggcttaagcaaggatgataatccagaggtttgcaaccattggtagaatattgaaatctttctatactgctggataaatagctagaccctgagcctcctactccttaaccctttcccaaaccttccctgctcctagctccgccagaggccggcaggaccttctygtatctgtttcaattgttctgtggccaataccacctagattgctaaatatattaaatgctatatctggctttaagtaagatttcacctccttatgtttctccattacttatgcatttacagttgtgttcaggattgttaaagatgtcagaaagtattataatttaatgcagttaaa

SEQ ID NO: 15879 - DNA, 661 bp, Homo sapiens
tattttctgtgcatttataggtgacagaccatgcttttatactgagtaacacttagttgagaaaaaagtatgcagtgggctcttgttgcaagaaaaatgtaatctgtgactcrtctctatattcactcctccagagtagttcagctgtatgaaatgctgagttattgatcattaaagaactattctctgtctactccattttattctctattcttcagccagagtaaatattctaaagttaaaatctaggccagacgcagtggctcacacctgtaatcccaacactttaggaggctgaggcaggcagatcatgaggtcaggattttgagaccagcctggccaacatggttaaaaaatgtctctactaaaaatacaaaaattagcctggcatggtggctcacacctgtagtcccagctacttggaagactgaggcagaagaattgcttgaacccgggaggtggaaattgcagtgtgccaagatcgcaccactgcactccagcctgggcaacagaatgaggctccacctcaggggaaaaaaaaaaaaaaaatatatatatatatatacacacacacacacacacacacacgcacacaaattagctcggcgtggtggcacccacctgtaatcccagctattctggaggctgaggcacaagaatt

SEQ ID NO: 15880 - DNA, 565 bp, Homo sapiens
gggctgtcatatggatgaggaattagacggttttataggagcctaagggatataactaaaacccatagtggaagtacaggaggattcaatttctgctcagggtaagaaacattctccagtcagcacaattgccatggcagataatagatgcttctyattggagatcttcattgaatcattcacttattccacaaacatttattagctcccaccaactgccaagctccagactatgcagacatccaacgaagaagatgcatttcctgaatgcaccttgaataagacaagcaaacaaacaatttcaataaagtgctaagtgctgaagtaaccaatgacccccaaacctcagatatttctttcttgctcatgtcacatgtaggaggccacagctcaggtcccatggttccatgtgccttctcattcttgggaccaagccgaaggaacttggcacaggaaaagagcaatgaagctggtaaaaacttataatgcctttgaaaacttcctctcagaaggaactaatctgctccccttccgttgactgaagaatgtcacttggccaagcctg

SEQ ID NO: 15881 - DNA, 550 bp, Homo sapiens
agctaggggaattggagtcaaagagagggccatgagagaaggattccatgccctgtggctggttctgagaggtagggactctatgtaaggacagagcaaatgtcttctaggagttcagggtggccccagttagcaaccagcaaggacctcagtcttacagtcccacggaactgtcaagaccagaatgagcaaagatagtgatgcacccccagagctgccaccaaggaacgctgtcctgccgagacgttgattttagtcctatgagacccataggacttctggcccatagaactaaatgatagtgtgtgttttaagctgctaaagttttggtaatttattatagtagsaaccgataatagaaatggctataaaatggaatgtattttgtaactgaacataattttcttgcctctggtgtccctaatttccttggtggctggcagtcatagagaagtccttttccatggttagctgtgtgccagtgacggggagggcaaccttactctggtctcaagtgcttcttggcacccctgggtttacttttttgctg

SEQ ID NO: 15882 - DNA, 550 bp, Homo sapiens
agctaggggaattggagtcaaagagagggccatgagagaaggattccatgccctgtggctggttctgagaggtagggactctatgtaaggacagagcaaatgtcttctaggagttcagggtggccccagttagcaaccagcaaggacctcagtcttacagtcccacggaactgtcaagaccagaatgagcaaagatagtgatgcacccccagagctgccaccaaggaacgctgtcctgccgagacgttgattttagtcctatgagacccataggacttctggcccatagaactaaatgatagtgtgtgttttaagctgctaaagttttggtaatttattatagtaggaaccgataatagaaatggctataaaatggaatgtattttgtaactgaacataattttcttgcctctggtgtccctaatttccttggtggctggcagtcatagagaagtccttttccatggttagctgtgtgccagtgacggggagggcawccttactctggtctcaagtgcttcttggcacccctgggtttacttttttgctg

SEQ ID NO: 15883 - DNA, 558 bp, Homo sapiens
attttgcagctccagggctcatcagagccaccaatttgctgatggttctcaaccacaaggatggtgagtcagcacagtggttgactctcagcagagaggatgcagccttcagcagagctcctggtgggcagcctcctgatcagcctgtgctgtggtcctgcccctgcatttcttccagtcctggacgtccctggcctggctggcaccctagtcgcacacccaagaagcagttcagcttgctgagcacagtgtttcccaaaacygtggcataagaggtgaaggatagaccagggaggaagtcttcagcccagtctgacaaacacaggccaacgtttggccaacagcaactcaggctctttgctctaggccaaacttgaaacattagtgtgctggtaggtgttctgccttccctccctctgctctagaattcagatctggaagccaggtcctgacagctgggatccagacgcagtccccatcacagcatcacattctggccaaccaggcttccagtggcaggagctgccaccaggaatgggcaccagtcctctctcagtt

SEQ ID NO: 15884 - DNA, 558 bp, Homo sapiens
attttgcagctccagggctcatcagagccaccaatttgctgatggttctcaaccacaaggatggtgagtcagcacagtggttgactctcagcagagaggatgcagccttcagcagagctcctggtgggcagcctcctgatcagcctgtgctgtggtcctgcccctgcatttcttccagtcctggacgtccctggcctggctggcaccctagtcgcacacccaagaagcagttcagcttgctgagcacagtgtttcccaaaaccgtggcataagaggtgaaggatagaccagggaggaagtcttcagcccagtctgacaaacacaggccaacgtttggccaacagcaactcaggctctttgctctaggccaaacttgaaacattagtgtgctggtaggtgttctgccttccctccctctgctctagaattcagatctggaagccaggtcctgacagctgggatccagaygcagtccccatcacagcatcacattctggccaaccaggcttccagtggcaggagctgccaccaggaatgggcaccagtcctctctcagtt

SEQ ID NO: 15885 - DNA, 635 bp, Homo sapiens
ttttatttactcttaaagcaatgccattctgacatattttaaaattaagttttaatatcttaaaaatattttaaaatattttaaaaataagttttgtaattcaggtgttgcattttcattctcacaaatgcctttggttatgagctttccaaaagggagtgcaaaaaaggtgaaaagggaagggagccccttggcccagcactaccgtggctrctttagcttcctccatcaggatctgtgtttgtgtacctagcagttcacttcttctcaaacatatcattatcctgtgcttatccatttccatttattggaaataatgtttgtttaaagggaatattaaaatttgttactgggtgcattgacttaatttgatatttattgaatgcccactatctgcctattgctgttattaaaaagaaagacaggtttttgcttttgtatagcttacattcatgtgagagtgtgtgtgtgtgtttgtgtgtgagtgtgagtgtaagagagagacagaccagtgccattagtgacatgaaatatgaaaaaagagatggagaccaactaggggctgaggacaaaaatggttttagacagggtcatcaaagaaagatcaaattaaatttgatctgagtcctgagttg

SEQ ID NO: 15886 - DNA, 635 bp, Homo sapiens
ttttatttactcttaaagcaatgccattctgacatattttaaaattaagttttaatatcttaaaaatattttaaaatattttaaaaataagttttgtaattcaggtgttgcattttcattctcacaaatgcctttggttatgagctttccaaaagggagtgcaaaaaaggtgaaaagggaagggagccccttggcccagcactaccgtggctactttagcttcctccatcaggatctgtgtttgtgtacctagcagttcacttcttctcaaacatatcattatcctgtgcttatccatttccatttattggaaataatgtttgtttaaagggaatattaaaatttgttactgggtgcattgacttaatttgatatttattgaatgcccactatcygcctattgctgttattaaaaagaaagacaggtttttgcttttgtatagcttacattcatgtgagagtgtgtgtgtgtgtttgtgtgtgagtgtgagtgtaagagagagacagaccagtgccattagtgacatgaaatatgaaaaaagagatggagaccaactaggggctgaggacaaaaatggttttagacagggtcatcaaagaaagatcaaattaaatttgatctgagtcctgagttg

SEQ ID NO: 15887 - DNA, 558 bp, Homo sapiens
gtttttgcatgtttgttaaacgtttgttaaaaatcagttgatcatatacatacaggtgagcttatttttgattccctgcatgtctattctttgccatgctgtctggattactgaagctttatagtaagtcttgaaaacaggtgttagtatttggttattctatgtcttcgattttccrtatgaatcgtgttgttttctacaaaattttctgctgagattttaactgggattccattgaatctatagattatttgatgaggatttaaatcttaatatcaaaccctccaaaccacaaagattatatacttcttcatttatttttctttgatttttttcatgattaatttgtaatttttaggatatgttttacgactgttgtgttaaatttatacctatgtatttcatgtttatgttttctggtattattttaaaactctttcaaattcaacctctaattgttcattaagtatagagaaatacaagggggtgtcagttgcttgtcagaaggcaaatcctacaagatggagtcatatataacataaaataatcatgggagtg

SEQ ID NO: 15888 - DNA, 534 bp, Homo sapiens
tccataattttagacgactctatcaaattatgcaaaaatagttgcatcaaacaaatttgaggaaatgtaagaaagaagccataacctaatggccttttttttctaacttcttaagattattttattgaaagaaatactgccttgttatggtgtcactgagaggaaatgtcaataaacttcataggaacttttattttgcctatacctgaagaaatttgccaaacattagaaattactcttgatttataatttatttcctcttatatttaccagccagtttctttttwtaaaaaaaaaaaaacgaagtcagagcctcactccatcatccagactggagtgcagtggcaccatctcggctcactgcaacctctgcctcctgggttcaagcaattctcctgcctcagcctcctgaggagttgggattataggtacataccaccacacctggctaattttggtatttttagtagagacagggtttcaccatgtttgtcaggctggtcttgaactcctgacctcaaatgatctgatctc

SEQ ID NO: 15889 - DNA, 534 bp, Homo sapiens
tccataattttagacgactctatcaaattatgcaaaaatagttgcatcaaacaaatttgaggaaatgtaagaaagaagccataacctaatggccttttttttctaacttcttaagattattttattgaaagaaatactgccttgttatggtgtcactgagaggaaatgtcaataaacttcataggaacttttattttgcctatacctgaagaaatttgccaaacattagaaattactcttgatttataatttatttcctcttatatttaccagccagtttcttttttwaaaaaaaaaaaaacgaagtcagagcctcactccatcatccagactggagtgcagtggcaccatctcggctcactgcaacctctgcctcctgggttcaagcaattctcctgcctcagcctcctgaggagttgggattataggtacataccaccacacctggctaattttggtatttttagtagagacagggtttcaccatgtttgtcaggctggtcttgaactcctgacctcaaatgatctgatctc

SEQ ID NO: 15890 - DNA, 534 bp, Homo sapiens
tccataattttagacgactctatcaaattatgcaaaaatagttgcatcaaacaaatttgaggaaatgtaagaaagaagccataacctaatggccttttttttctaacttcttaagattattttattgaaagaaatactgccttgttatggtgtcactgagaggaaatgtcaataaacttcataggaacttttattttgcctatacctgaagaaatttgccaaacattagaaattactcttgatttataatttatttcctcttatatttaccagccagtttctttttttaaaaaaaaaaaaacgaagtcagagcctcactccatcatccagactggagtgcagtggcaccatctcggctcactgcaacctctgcctcctgggttcaagcaattctcctgcctcagcctcctgaggagytgggattataggtacataccaccacacctggctaattttggtatttttagtagagacagggtttcaccatgtttgtcaggctggtcttgaactcctgacctcaaatgatctgatctc

SEQ ID NO: 15891 - DNA, 540 bp, Homo sapiens
aaagcttatggatagatcttaaaagattagtactacagataaaaagaaagtaacccaggggaaggaatggtaaaacttcagagactcaactaagcatagttgatttaaagaggtgtgggctagagatctggttaaagcagatttacattgggtaccactaggagataaaccctagataggaattttagaaaaagattaaaagccagatgtgaacatttgagtttatctyatataaaaggtcaatatatgaataaatgaaaaataactacaaaacatttataatgatcatttgaaggagaataaaatagaagaaaggagaccacttggaaacgatatggccattaaaagtgttagctaactaggaatagaattagggttatggccctgaaaatggaaaataattagtacattactattgttttctgccttttatctgggaaattatgtttaatgtctgaaaaaaattactgatttgacatgagtgtagaacatggaattttgtatttaaaataaacatttgtgattatgacattaagggca

SEQ ID NO: 15892 - DNA, 540 bp, Homo sapiens
aaagcttatggatagatcttaaaagattagtactacagataaaaagaaagtaacccaggggaaggaatggtaaaacttcagagactcaactaagcatagttgatttaaagaggtgtgggctagagatctggttaaagcagatttacattgggtaccactaggagataaaccctagataggaattttagaaaaagattaaaagccagatgtgaacatttgagtttatctcatataaaaggtcaatatatgaataaatgaaaaataactacaaaacatttataatgatcatttgaaggagaataaaatagaagaaaggagaccacttggaaacgatatggccattaaaagtgttagctaactaggaatagaattagggttatggccctgaaaatggaaaataattagtacattactattgttttctgccttttatctgggaaattatgtttaatgtctgaaaaaaattactgatttgamatgagtgtagaacatggaattttgtatttaaaataaacatttgtgattatgacattaagggca

SEQ ID NO: 15893 - DNA, 648 bp, Homo sapiens
catcactaccatggtattttcatgaccctagctctaaatttcagacattacaatttggaggaaataagatttacctctcaagtatgtcaatgtgctacctaatgcagtttgtttattttgctatatatttgcctctttctggtaacactgatattaaaatcatcatcttggcataggagttggggagaagagaacctccttactccaagtattaccttacagtacagtctattaatataaacaaatacatatgtatatattagtctaaactctttggttgcaagtgtcacaaatccaaatcaaattagcttaagaagaagaaaaaaatctattagttcatttaactttaaagtccaaatgaggtgtaaaaagtccactttgattctaatgactcagtgatataattagaattgtgtttcatttcatccaaatatgaactctaatttcttttggattcattgagractaatcaagctctccacacagacaaacaaagagggtcaacagatttctggcttaccctatacttatgtttacaggttccagagtgaagaaaagagctatttctttataactctgacaggatccttgaatgacttagaaacagttcactttttattatgtgctcatccttcaatgactcacttt

SEQ ID NO: 15894 - DNA, 517 bp, Homo sapiens
agagaggtaacacatgctgcccagacatactgctgctaggtgacaatgcaatgcctccaaccccgtccccttgactcaggccaatgtccctcttctgcaagccagttggctaggcagccagggccatgtcaggcagaggcagactgagagttctgggtactgtttctgtccaacaagtatggccggttctcctctagggctgccagtttgcatgagggcctcatgtctctccactggcaggggctggtgagcatccagtccatctgtaggagggacacacggtggctgtcttctgcagtgtgggcaggcctggagtgacggcccaagcagctgaccccacttgccaggggaacgcagggaggtgaagttacatctagtgtagcaaagcgaaggccrtgtgggacgttgatctccaggttccaagatgggcccttggcaggagcccttgtgaacatggatgtggcctgttgggatggggcctcccaccacgcctcctgttctcccacctccattaggg

SEQ ID NO: 15895 - DNA, 628 bp, Homo sapiens
agggtagagggttagaagggccacttctttacctagatgcttcatagccacttcctagctatttattttcctacctggggttagagatttatcctccaaggccaacagttacactagttaaaattgtggaatagggacaatatcctttcagctttgctctcctgtcatttaatatccttattaagacacacaatttgggccaggtgcagtagctcacatgcaattccagcagtttgggaggctaaggcaggaggattgcttgagtccaggagttcaagaccagcctgggcaacatagtaagaccacatctctatgaaaagttacacaaattagctgggtgtggtggtgcatgcctgtggtcctagctacttgggaggctgaagtgggagaatcacttgagcccaggaggtcaaggatgaagtgagccatgatcacaccaccgtactccagcctgggcgacagagcgaaaccatctcaaaaaaaaaaaaagacacacaatttgttcaaccaaataagtgtattcttagtcattcgttkgctcatttaaccaacatttgttaagcaccaggctttatgtgcctggcattatgttggtgactagggttaagacctctgctataaagtgact

SEQ ID NO: 15896 - DNA, 530 bp, Homo sapiens
ctccagactcaagcaattctctaacctcagccttccaagtagctgggactacagatgcacaccaccacacccagccaattgttttgatttctagtagaggcaaggtctcgctatgttgtccaggctattcaaattcctgagctcaagcgattctcccrccccagcctccctaagtagtggcattacaggcgtgagccattgcacccagccaactaccctattcttcatcaaactttcacccactgattttagtatccattgatggttttgtgtgaatctgttatttctgtgataattgcaaaatggtgattttctaactccaatccattttaactcaaagtttactacaattttaaaaaaaattttttgtagacacagggtctcacttgttgcccaggttggtctcgagcccctggcctcaagcaatccttctgcctggtacaagcacagattacaggcataagccacctcacctagcccccagcttttaagtgacccaccttttctgagtttttccaaaacattcagct

SEQ ID NO: 15897 - DNA, 663 bp, Homo sapiens
ctctaggtggtactattatgagttcctcctattttctttgatgtacattccttttgtgaaaaagaaaaacaaaaaacaataggaaaaaacccaagtgttaaagtataaatcagaaactgggagaaatatttgaaaccaataaaaaacagtttaacatccttaatataaaattattatacataaacatgtaaatatattacatatactatataaagtcagtatatccaaaatatgtaagatatctaccaaaaaataaatatcagaaaggctgagaacacaaagttagcaaaaatactgtgttggaaaaagyacattaaaagtaagcataaaaaatgtttcaccacattcgtaataaaaaagaaaaaattaatactctaaggtacaatttttccaaatcagcaaagatttaaaataacaaataacagtaaaaattaataaggatccaatcagttggacattcccatatgttgctttaaatgatactgcaagcccaaatcctttatctgaaatcattagagatgtgcttcagactttggaattctttagaattttttttaaaagttacccgttatgtacattaagcagaaactgcagccaggtgaggggcagtacatcataatcagacacattaatatctctgcagttaaacatataaatattcac

SEQ ID NO: 15898 - DNA, 1259 bp, Homo sapiens
tcataataccaatatatatttttaaatgatattttgattctgaatagaatacaattagattcaaaaatacattgtaagaatacatggcaaatttggccaggcgccatggctcacgcctgtaatcccagcactttggaaggccaaggtgggcggatcacgaggtcaggagatcgagagactatcttggataacacggtgaaaacccctctctactaaaaatacaaaaaatcagccgggcgtggtggcgggcgcctgtagtcccagctactccggaggctgaggcagragaatggcgtgaacctgggaggcggagcttgcagtgagcctagattgcgccactgcactccagcccgcgctacagagcgagagtccatctcaaaaaaaaaaaaaaaaaaaagtaaatttaaaaaaacctaataaacttgtgcatctccaagcccacataataggatagtcttcagttaatatagactattgtttatattgagtactatatagcactctgaatatttccatttgtggcaactacaaagtttaaggcagataaaattacttccacaatattccaaatgttgggcgttttaagtttagagttctaagcctaattttctatatagggaacctatcaaagtgaatttctataaaatgaagtgtacaagaataaatatatttgacctattttaatgtgccattcttattcaccactgaaaattgcttgtaaatataaatttaagtgtaaagtaaaaatcatccttcttcaaaccccactctttctatttattttatagctctaggcactcatgaaaagcttttcactcaaagagcaagccaacggaataaagatcagaattttactattattattaatcttgtgaatattcactattaggaagccccctaagaatacattgccttatcaaatatacaaagtcaaagttgatgcgaagagtttataatgtaggtcagaaagaggtctttttttctttgcctgttatgagcagagacctctcctgctttctcagcaatccccttgccttgcattaaacatggcttacttttgcttcatcagggtttgtagcatcagcattattgcttgctctccatcagggttcttgctggtttgcctccggcatccctggtccaagagtgaagtgctggagagtttgttagctgtgactctgactttcctgtcaaggcgtttttatatttgcgaatagttatttccttaggtacctggaaagtcattgtttatgtgattc

SEQ ID NO: 15899 - DNA, 1259 bp, Homo sapiens
tcataataccaatatatatttttaaatgatattttgattctgaatagaatacaattagattcaaaaatacattgtaagaatacatggcaaatttggccaggcgccatggctcacgcctgtaatcccagcactttggaaggccaaggtgggcggatcacgaggtcaggagatcgagagactatcttggataacacggtgaaaacccctctctactaaaaatacaaaaaatcagccgggcgtggtggcgggcgcctgtagtcccagctactccggaggctgaggcagaagaatggcgtgaacctgggaggcggagcttgcagtgagcctagattgcgccactgcactccagcccgcgctacagagcgagagtccatctcaaaaaaaaaaaaaaaaaaaagtaaatttaaaaaaacctaataaacttgtgcatctccaagcccacataataggatagtcttcagttaatatagactattgtttatattgagtactatatagcactctgaatatttccatttgtggcaactacaaagtttaaggcagataaaattacttccacaatattccaaatgttgggcgttttaagtttagagttctaagcctaattttctatatagggaacctatcaaagtgaatttctataaaatgaagtgtacaagaataaatatatttgacctattttaatgtgccattcttattcaccactgaaaattgcttgtaaatataaatttaagtgtaaagtaaaaatcatccttcttcaaaccccactctttctatttattttatagctctaggcactcatgaaaagcttttcactcaaagagcaagccaacggaataaaratcagaattttactattattattaatcttgtgaatattcactattaggaagccccctaagaatacattgccttatcaaatatacaaagtcaaagttgatgcgaagagtttataatgtaggtcagaaagaggtctttttttctttgcctgttatgagcagagacctctcctgctttctcagcaatccccttgccttgcattaaacatggcttacttttgcttcatcagggtttgtagcatcagcattattgcttgctctccatcagggttcttgctggtttgcctccggcatccctggtccaagagtgaagtgctggagagtttgttagctgtgactctgactttcctgtcaaggcgtttttatatttgcgaatagttatttccttaggtacctggaaagtcattgtttatgtgattc

SEQ ID NO: 15900 - DNA, 1259 bp, Homo sapiens
tcataataccaatatatatttttaaatgatattttgattctgaatagaatacaattagattcaaaaatacattgtaagaatacatggcaaatttggccaggcgccatggctcacgcctgtaatcccagcactttggaaggccaaggtgggcggatcacgaggtcaggagatcgagagactatcttggataacacggtgaaaacccctctctactaaaaatacaaaaaatcagccgggcgtggtggcgggcgcctgtagtcccagctactccggaggctgaggcagaagaatggcgtgaacctgggaggcggagcttgcagtgagcctagattgcgccactgcactccagcccgcgctacagagcgagagtccatctcaaaaaaaaaaaaaaaaaaaagtaaatttaaaaaaacctaataaacttgtgcatctccaagcccacataataggatagtcttcagttaatatagactattgtttatattgagtactatatagcactctgaatatttccatttgtggcaactacaaagtttaaggcagataaaattacttccacaatattccaaatgttgggcgttttaagtttagagttctaagcctaattttctatatagggaacctatcaaagtgaatttctataaaatgaagtgtacaagaataaatatatttgacctattttaatgtgccattcttattcaccactgaaaattgcttgtaaatataaatttaagtgtaaagtaaaaatcatccttcttcaaaccccactctttctatttattttatagctctaggcactcatgaaaagcttttcactcaaagagcaagccaacggaataaagatcagaattttactattattattaatcttgtgaatattcactattaggaagccccctaagaatacattgccttatcaaatatacaaagtcaaagttgatgcgaagagtttataatgtaggtcagaaagaggtctttttttctttgcctgttatgagcagagacctctcctgctttctcagcaatccccttgccttgcattaaacatggcttacttttgcttcatcagggtttgtagcatcagcattattgcttgctctccatcagggttcttgctggtttgcctcyggcatccctggtccaagagtgaagtgctggagagtttgttagctgtgactctgactttcctgtcaaggcgtttttatatttgcgaatagttatttccttaggtacctggaaagtcattgtttatgtgattc

SEQ ID NO: 15901 - DNA, 1259 bp, Homo sapiens
tcataataccaatatatatttttaaatgatattttgattctgaatagaatacaattagattcaaaaatacattgtaagaatacatggcaaatttggccaggcgccatggctcacgcctgtaatcccagcactttggaaggccaaggtgggcggatcacgaggtcaggagatcgagagactatcttggataacacggtgaaaacccctctctactaaaaatacaaaaaatcagccgggcgtggtggcgggcgcctgtagtcccagctactccggaggctgaggcagaagaatggcgtgaacctgggaggcggagcttgcagtgagcctagattgcgccactgcactccagcccgcgctacagagcgagagtccatctcaaaaaaaaaaaaaaaaaaaagtaaatttaaaaaaacctaataaacttgtgcatctccaagcccacataataggatagtcttcagttaatatagactattgtttatattgagtactatatagcactctgaatatttccatttgtggcaactacaaagtttaaggcagataaaattacttccacaatattccaaatgttgggcgttttaagtttagagttctaagcctaattttctatatagggaacctatcaaagtgaatttctataaaatgaagtgtacaagaataaatatatttgacctattttaatgtgccattcttattcaccactgaaaattgcttgtaaatataaatttaagtgtaaagtaaaaatcatccttcttcaaaccccactctttctatttattttatagctctaggcactcatgaaaagcttttcactcaaagagcaagccaacggaataaagatcagaattttactattattattaatcttgtgaatattcactattaggaagccccctaagaatacattgccttatcaaatatacaaagtcaaagttgatgcgaagagtttataatgtaggtcagaaagaggtctttttttctttgcctgttatgagcagagacctctcctgctttctcagcaatccccttgccttgcattaaacatggcttacttttgcttcatcagggtttgtagcatcagcattattgcttgctctccatcagggttcttgctggtttgcctccggcatccctggtccaagagtgaagtgctggagagtttgttarctgtgactctgactttcctgtcaaggcgtttttatatttgcgaatagttatttccttaggtacctggaaagtcattgtttatgtgattc

SEQ ID NO: 15902 - DNA, 534 bp, Homo sapiens
agtgattcccctacttcacgcgttctctcacactcacatccagtctgttaggaaattctgttgactcaaccttcaaggtataaacagtagctgcgccctttgcactgcttccattgctgtcatttcagtcctggccatcatctcccacctgaatcaccatgataacttcctgctggtcttcccgattccaggtcccccagcccccacctggcccctgccctgccccaatctatcctcaacacagcagttggtctccaaaaggagttgctgtctttaaagcaactcctttaataaaarcataagtcagactgtgtcactcctctgcttagaaccctgtaatgaccctttagagtaaaaacagattcttttaagagccttcaaggctttttgtgatctatctctctcttactcctctgccacatgtcctactagccccgcttagctcactcccctccaaccacattggcccctgagctgtttctcaggaacattgggtatgtctaccttaggacatttgagctagccttctctctg

SEQ ID NO: 15903 - DNA, 697 bp, Homo sapiens
acatgagtttttgctcatcattgatctctaagagataattgtgttatcttttgctaacacaattgctagcacatttgctgaatgctagtaggcattcagcaaatatttgttgaatgtatgaatgaatgaataaatcatgatggcragaaaagaaacatcattgatcaatcatgatccttgttccctgtaggtaagacttagcctcataattctcaccccaatattctaggcagccaccaccagtctgtagggcttgatagagaagatgaggcctgtgtgtcaactgatgaccacaaaatggcaccacgccctttcttgccacattgcaagacacttttacagagtgactttctccatggttgaactaattggggtggcggcaattttggacttttattccaaatttttttaccttcttctagttcaaatctcctccaatttcttgggctctttttgagtaaaatgtcactgagttctcagaagtagcagagattgcttgctgttatgaagggaatccgtccatttcatccctgaaaactcctgagtatctcataaatcaatttgcctagaaatgttttaactcttgttaaacatctgtcaataaagctaaaagtgatatgaaatgagttcagaaattccaattgtgcttaacaataaaagaatctttgtgatgctcttcaggtgttgacatttgggt

SEQ ID NO: 15904 - DNA, 568 bp, Homo sapiens
tacggaagcatagaataagggtgcctaacccagcccaaagctcccccaagtttcctactgcttggcagccactctaatctgcttgacaagaactgctcttaatgtttctcctcctcagaagatgagactgagtctcttatacttttccagtatcagcataaattaggacaagaactttagaaaggctgggcgtggcagctcaccctgtaatcccagcactttgggaggccgaggcgggcggatcatgagttcaggagattgagaccaccctggctaacacggtgaaaccccatctctactaaaaaatacaaaaaattagccaggtgtggtggtgggcgcctgtagtcccagctactcgggaggctgaggcagragaagggcgtgaacctgggaagtggaggttgcagtgagcagagatcctgccactgcactccaccctgggccacagagcgagactccatctcaaaaaaaaaaaaaaaagaaaaatttagaaaatttcttgacagaatctattaaagctaaacatatgtatgcaaagcagttccactcctgcatatatagccagaaa

SEQ ID NO: 15905 - DNA, 568 bp, Homo sapiens
tacggaagcatagaataagggtgcctaacccagcccaaagctcccccaagtttcctactgcttggcagccactctaatctgcttgacaagaactgctcttaatgtttctcctcctcagaagatgagactgagtctcttatacttttccagtatcagcataaattaggacaagaactttagaaaggctgggcgtggcagctcaccctgtaatcccagcactttgggaggccgaggcgggcggatcatgagttcaggagattgagaccaccctggctaacacggtgaaaccccatctctactaaaaaatacaaaaaattagccaggtgtggtggtgggcgcctgtagtcccagctactcgggaggctgaggcaggagaagggcgtgaacctgggaagtggaggttgcagtgagcagagatcstgccactgcactccaccctgggccacagagcgagactccatctcaaaaaaaaaaaaaaaagaaaaatttagaaaatttcttgacagaatctattaaagctaaacatatgtatgcaaagcagttccactcctgcatatatagccagaaa

SEQ ID NO: 15906 - DNA, 1370 bp, Homo sapiens
ctgaatgtctgtgttttcgcaaaatttatatgttaaaattttaacctccaaggtgatggtattaagaggtgggccttctgagaggtgataaggtcatgagagcccactctcgtgaatgtgattagtgctctaagagacttgaaggagcttattcaccccttctgtcacatgaggccacatccagaagttgccttctaagagccaggaaacaggtcctcaacagacaccaaatctgccagctccttgatctgagatttcccagcctccagaactgtaagaaataaatgtttgctttttgaagccacccagtctaagctattttgttatagcagcctaaatggactaaggacgtcctccaagcaagtgattcttaacctgttagagtggtgctgtccaatagaaatataatttgagccacaaatgcaagccacttacatattaattaaaaattttctagtagttacattaaaagctaaaaagaaacatgttaaaatgattttataatacattgtatttaacccgatatatccaaaacattctaatttcaatatgtaataaatatggagctattaataccaagccttcaaattttggtgtgtttgacacaacacatcttaatttgtactagccacatttcaatagccacgtgtggctaatggcttacatgtaggacagtgtggttttagagcctctgcattctcagaatttattcctccagagtaaagcggtgaagttcacagtatttgataaactctttcaggggattgttgggacagcccctgaagcccattcttggagctctggtaaagatttcttgctcttaagatccctcgagctccaaaaggatacgatgctcctgtctccagcaaacaacaataaagtagcctttgcatttgtggaacacatgtggagcatcctggccaatgagagcattgaagtgtgatgcttctcctcctgcttctggggtctcagtgctagcaccccaacaccattacccsctacactctccctgttcttatttcacctacaattgctacagatgtggaggaaaaaagaaaaaaaaaagaataaaaagaattagaatgaatagagacttcttgttctagcctgccagattaaccagcatggcctgtgctaggtgttacaaagacaggggtttatggataagtaagaaagaggatttgtacttaaatatcagaaatattctaatgcttgcccggttatactgttcatgcttttatctcttacattgtccttctccaaatcatttgtcctctggtgaatcttgacaaagcgcctgcacaaaattaacaggcaagcaaagcctggatgagcaaaattgatttgcctataatgtgtttgtgaagaga

SEQ ID NO: 15907 - DNA, 713 bp, Homo sapiens
taaaggaaatcatgggtagtaagatgtttggagacatatgaagagaacaatttacaaaagggcaacatgaaagagatgaaaagtaattaaaggaataatagaccatttcactcagttgaagaaagacttgtatgcagagcacagcagtatccccaagtgcgaggcaagtctaaggagaaaaaagaaatcatatctaaatatatttttgtgggccctgctggggtgatgcatgcttagaactgcagcactttggaggccaacgcaggaggatcacttgagttcaagagctcccggttaaagtgagctatgatcatgccactgcattccagcctgggcaagagagaaagactgtctctaaaaaaaaaaaaaaaaaggattttaatgaagaaatatatccttgtgaaatctaagttttaatastaaaaagtatacaactagttccaaataaaatgtggctttcaaaggcaaagctaacactctaacatcaaattttcaacctgcaagtcagaagactgtaaaatatacttgtggtctataatgagaaagaaactactatctaagaattctgaacctagccaagataatgtttgcatacaaagcaacacaaaaatatgtttagttatggcaagaaacacaccaataacaaaaagaaaaaatagtgcttgaacataatataaacaggcaaagttcatcaaagaaatgggaaaaagaaa

SEQ ID NO: 15908 - DNA, 534 bp, Homo sapiens
tgccctctcttgcctttctaccttttgtcatgagatgatgcagtacaaaggccctcaccagatgccagtgtcatgcacttagacttcctagcctccagaactgtgagtcaaataaatttctgtttcttttaataaattaaccagactgtggtattccattatagcagtgcaaagggactaaggtactactttagccacagaaatttagaaattcagtcatttcattatattcaaagtatactaggatggatgatatgtagtttaaaccycataagaaataattttaaatttacaatatgtgtatatgtaagcaaatgcctatggtcttttgtttattgcagtaattttctagtttagattcctacctaaattcactctgttagatctccctgattataaaaaaaagaacaaaatatattaaatgtttactatgtaaaaatcactgtacaagcatgtaagaaatacagagatatgtatgacacagacctctcccctttaagaatagtaaaaaattatcaatagcatatgcacaca

SEQ ID NO: 15909 - DNA, 546 bp, Homo sapiens
ctttgaattctgagacttcttatttgcaactctgacaccatcacaatacccatcaygttgaaggcggcccatgatatctttctggccagtgctttaggcagagcacattcacaagtgtcttcaactataataatgttgaatagccaaaattagtttatgacagtgtggcagcctggtctatgctgttgaaacatagcttacaacagctgttactccattgaaagaggagagatgatcattcaaacctccactttaatatccgtaattcactgataggactcacattagaagacagtcagtggaatgatatctaagagattctagatttcttgctgttgtcttcaagtttacttatctaagttccacttaaccatatatatgttatttgttccaacccttcgcaaaatccacttttctatatcaaaagttagcatgcatgtaaagcttaaaacggaaacagcgtgacccaatgtctgtcttctttgttactgagtgactctctcctctcatattataatgcctcctcagccatatgtttatttcaca

SEQ ID NO: 15910 - DNA, 546 bp, Homo sapiens
ctttgaattctgagacttcttatttgcaactctgacaccatcacaatacccatcatgttgaaggcggcccatgatatctttctggccagtgctttaggcagagcacattcacaagtgtcttcaactataataatgttgaatagccaaaattagtttatgacagtgtggcagsctggtctatgctgttgaaacatagcttacaacagctgttactccattgaaagaggagagatgatcattcaaacctccactttaatatccgtaattcactgataggactcacattagaagacagtcagtggaatgatatctaagagattctagatttcttgctgttgtcttcaagtttacttatctaagttccacttaaccatatatatgttatttgttccaacccttcgcaaaatccacttttctatatcaaaagttagcatgcatgtaaagcttaaaacggaaacagcgtgacccaatgtctgtcttctttgttactgagtgactctctcctctcatattataatgcctcctcagccatatgtttatttcaca

SEQ ID NO: 15911 - DNA, 570 bp, Homo sapiens
tgctagactttttcccatgtctgaaattaagttatttatatactcacttacttgtttgttttctttgttttccattttatccccggtgtttagcacacagcgtacactcaataaatatttattgaatgaacagatatgcatttcagtattttatcttatgagtatattttaatctaaattgaatatcagatcagttcagtaattctacctctttttttttttttttttttttttttgagacagagtctcgctctgtcggccaggctggagtgcagtggcatgatctctgctcactgcaacctccgtctcccgggctcaagcaattctcctgcctcagcctccygagtagctgggattacaggcatgtgccactacgcccggctaatttttgtatttttagtagagactgggtttcaccatgttggccaggctggtctcaaactcctgatctcaggtaatctacctcggcctcccaaagtgctggaattacaggtgtgagccaccacacccagccaattctacctcttgatagaattgtataactgtgtaaatatagaatgtggacaataa

SEQ ID NO: 15912 - DNA, 710 bp, Homo sapiens
tcaggatatcaaaatcctatggacaagttcctgaagaaagtattccactgatatgagaataatgcctttgggctaaaacatactgtcttttgactgagtttcttgaaatctctgtactaaatactgatactccacaaataataaaccataacaagatctaaactgaaaaggttttataaagtatcacattaaaaaaacgcaagggttgttcagagtctttttcatccattaagacagaagcttctccagaagctgaggaatccacgtgtagggaccattcaagaagtcctggcaggatttggagaagagtgaagaggcagtttccctgggaacatggctgaagcacttccagaaaaaataaactcagrgggcctacatcaccaaaggcaagaaattaaaactaatttttttcattttgaaggctatttttctaaaactaaataaaataaattgaagtatattaaaatattaactcacacacaaaaaaacgagtgagataaggtgtcagatacccctaataaatgcaagtgggaaatcaaagggagtctcagacaggcaggcaaaagactatgctgactttaaattaagtttgtccccagacagcgatttgtagacagagaaacaacattaatgttatgcttaaaacaatacagtaaatcacccagtctaaatattgaagaaaatagggcccattgaggctgttttccaag

SEQ ID NO: 15913 - DNA, 1234 bp, Homo sapiens
cttagtcccagagcaatttcattttttttagttttcaaattcaaccttcaaagttagttgaatgttaaaaaatggggaaaaaatataaagtttasttattttcacaggttttgttacttgaaaaggaattaaaatttcaaaaaaaagaaattccaaaagtgatgagagttggtaataaggtgtttgcccaagtcaactgaagattatgtgaatcagataatgaccttggtcaatcaagactggggatattttagctgttaaggattttagtttcattaagaaaccaaggtcacccaaacaagagataattcttctaaaaaggaaagaaaataaacatattacatcgaaaggccattacattttcagagaccagggaattcatcagggcttatggccccatgaaaagttatctttcagccattcagtctcatcagtcctgaggatcacctttgtccaaaagtagaatttaagaaatgaaaacaaaggatcacaatcccagacttacaaaaataaaatcaaagttccaaagtcttttattgatgtcttaaaaatgatatgcagcttcacacacaaaagagatttcttgacttactccacactgggtttttgaaatccgtatattaagtaagtgttcaaagcttgctctatcgaagacacttgaaaaactattctatatatggattctaccctccataaacttataatttataattcttaagccttttttttctttcttgggaaggaatattcctttccctttagctggtgtcttcaactaagttaaatgattatgatgttgaaaacaaaattatactaaagttgcacttggttctatttttggggaaaaaaagtatccaaataatattttgaggttatcctatggttgatttcaaaccaaaatctcaatttctcaatttagggtaatgttgagtaagctccagcattgaacctgttcttcaaattacttgttaacttctggatgattcatgctgatttttgtttgtttatttatatttttttcccatttgtgcttttttttttaatgagagaatggctttcaaaatacaaagttattcctgttcttgtttttgtgatatctataagtatctttagctattgaatataggttataatttagcttaacgtagaaattcaagtaatctatgtaggaattttggtgtgtggcatggtgatatggtctaggaaatactctgtatcccaggattagaggggg

SEQ ID NO: 15914 - DNA, 1234 bp, Homo sapiens
cttagtcccagagcaatttcattttttttagttttcaaattcaaccttcaaagttagttgaatgttaaaaaatggggaaaaaatataaagtttagttattttcacaggttttgttacttgaaaaggaattaaaatttcaaaaaaaagaaattccaaaagtgatgagagttggtaataaggtgtttgcccaagtcaactgaagattatgtgaatcagataatgaccttggtcaatcaagactggggatattttagctgttaaggattttagtttcattaagaaaccaaggtcacccaaacaagagataattcttctaaaaaggaaagaaaataaacatattacatcgaaaggccattacattttcagagaccagggaattcatcagggcttatggccccatgaaaagttatctttcagccattcagtctcatcagtcctgaggatcacctttgtccaaaagtagaatttaagaaatgaaaacaaaggatcacaatcccagacttacaaaaataaaatcaaagttccaaagtcttttattgatgtcttaaaaatgatatgcagcttcacacacaaaagagatttcttgacttactccacactgggtttttgaaatccgtatattaagtaagtgttcaaagcttgctctatcgaagacacttgaaaaactattctatatatggattctaccctccataaayttataatttataattcttaagccttttttttctttcttgggaaggaatattcctttccctttagctggtgtcttcaactaagttaaatgattatgatgttgaaaacaaaattatactaaagttgcacttggttctatttttggggaaaaaaagtatccaaataatattttgaggttatcctatggttgatttcaaaccaaaatctcaatttctcaatttagggtaatgttgagtaagctccagcattgaacctgttcttcaaattacttgttaacttctggatgattcatgctgatttttgtttgtttatttatatttttttcccatttgtgcttttttttttaatgagagaatggctttcaaaatacaaagttattcctgttcttgtttttgtgatatctataagtatctttagctattgaatataggttataatttagcttaacgtagaaattcaagtaatctatgtaggaattttggtgtgtggcatggtgatatggtctaggaaatactctgtatcccaggattagaggggg

SEQ ID NO: 15915 - DNA, 533 bp, Homo sapiens
agtcctggggtctgggccatcatctgtggctcggaggactgcagtgggtccctaggcctccagcacccctggtcctgtcgcccactgcttgtgtccagcacatggaggactcaaggcagcaggtggaccttgtcactcaccggctccacgtggccagaggcttttcctgcattgtgagcataggccaccacacaggccacgacgggccaccacacaggacaccagactgccacacaggccacggcgagggccgccacacaggccaccaygcagggcacgatgagggccgccatacaggctgccacacaggccatgatgtgaggctgccacacaggctaccatacaaaggccacgacctgtggccgccacacagacggccacataggccatggcaagggctgccacacaagccaaaacatggggcccatagtgcagaccgtgataccagccacgagaccacgacgcgggctgtcctacggtcctctcctccttgcacgtctccacccggcccctctggccctggtactgctact

SEQ ID NO: 15916 - DNA, 783 bp, Homo sapiens
aaaaagaaaaagaaaaagaaaaggctaaaagtctgatggcaagtgccccccaaaggcattaaactcagaaaagccgaggtgcagagacaccttcggacagcgcagcgcccaccgtcagtggagatcctctcttccccgtctgagtggcgcccgccagcccgagtgggcctcactccaaggctcagggagacacattctgtgatggatgtgtcagctcatcaaactctgggctccacgggccccagaggaaccattcgtgatggagagtgagggtccccggcagtgtctggggcacttcccgagccaaggccatgcttgtcacctcctggcaggcatgcccctccccagctctcaggagtgccttccaagcctttatgccagttttaatgacatcagttacagctttataagcaagataaaggtcaccgtacgacctcgggggcctcgggaaccgagaggctgagccagcccgggacgggatcgggcagcttgaccgctctggagggaaattccaattcattatctttttacggcggactcaattagactccctagtcacctgtgtagggcaccaggcagcaggcagggatgctgcccgaatcaacaaggctgctcgggccaggccagccccaagaatagccgcggcaggcgcaggacctggccagggggagggcaggccgaagcagaaacgttgacttcgtttaagtggattaaaaacataaaacgttattggccctaaggggacgagaacagtctcgtttggaggygaccagacacagggca

SEQ ID NO: 15917 - DNA, 665 bp, Homo sapiens
tggctgagaggtggcttcgtggggaagacgtgagggcgagcggaacagtgtggaggcagatcacagagggctctgtgtaacttacgcaagacctgagcaccaggcggagccgtcaagggaaatttaggttgagcagagatacaattgggtttggaatatctctctayagcagcagtaaaataccatgcaggtgacaagactgggagccgggagaggaggcaggagggtgtgggtggttcagaccagggatggacagtggggccgaggggaggagacattggagtggcaccatgtggacaggggcaggtcttgggaacacataaaactgaaaggagatgtggaaacatccaggcccacaatctaggggtccaggggctgtggccactggagtgccattcaaagacttctcccaagcccaccccaggtgaagcccctcccctgcctgtgctggcttggtcctgggagccagggcccctccctcatcgcagctgctaagctggaccatccaagaagtaaagcagcacccgcctaccatggcccacgcctgagtttcccggcctgagccttcattctcaaagctgtttcttgttttaaggccatttcctcatggtcctcccctgcctgcgatgctcagccctgaattcttcaccagactcttaacagtg

SEQ ID NO: 15918 - DNA, 549 bp, Homo sapiens
aggcccttcaacctaaaaaggataggttctattttaacttataagaatttgaattatgtttttattacaaaatttactcacataaaatttcatccatatttcacacatacttttaagtatcataaggctggatatttgcatgtaagcttaccatggtataaaaccactttttattcatattctaaattataayttttttctgtcatattaagcatgtgcattttcttgcctgtgacaaagacttaggacacatgtttgctgcttatgacatacatctcagagtttcctggagaagaaataccagtttgaccaaacattggaaggttccacccttctcactaatatgtaaatatacatcattttgaattgttaggcttttgttccaaatcccattgcattcccttcaaagctaggctgaaccatgagaaaacaccaaggattgtcttccttgaagctggttgacctacagcctataagaaacatgctgaacatcttccttgtctctttttttagggcctaactctaatatcagtccctccagatcttacc

SEQ ID NO: 15919 - DNA, 544 bp, Homo sapiens
acatcagacttcaactttattgtgattaggcataagtaactaaataattagacttaatgatgggcaactgttcttacttttttttcctagagattttcagtatatgttaaaaagactggttaactttgaattaattagctttaattcattacaaagcaagttattcctcccttgaggagaggaagtccatgctgttttattttgcacattgtatgccctgcatcaccaataatatctgtgtaacttacacaaactacaatcagtattgtacaacaaatgtcagtagccattgcttgttattgctattggtaatttctaaagaaagcttttgcagccatccacttttctctactgatttaaagttatttttatgactcaataatctaaatagcttgtcataaagcgaaaacttttaaacyagattttccaaaattattctgttattttaatgtttaatgactcctataatatttgaattttatacaaagtggatcaacttaattagatgagaccttgggtgctaaattctcctgtgcattgctgt

SEQ ID NO: 15920 - DNA, 503 bp, Homo sapiens
cttttctttttttccccctcctctctaccactccagccttgctatattcttcttcccaagtcataagcctaccagcaacactcaaaaatacatttggttctacctggtgaaggctctaaagaagctgtcagcttctcatacctagagatgtcagggatgggtgaatgatggtactttctccaggcatgtaaaaggttatkcatttcagagttcccggaaaccaaatggatcagcacagtgcacagtgagtgcttttaattttatgctgcctcagcatccatttttaaatataagtcaacccggctcaattgcccttgacatagtttccagtactacagcctacccaaatggttccagccagtggccaggaataaaaacttggaggtatctctcctgcctcatggactgggcttcctgctttctagccgcttcctttaaatggacccttacggcatctgcctgtgactcacatttcattacccaaaatagaatgctacttgcca

SEQ ID NO: 15921 - DNA, 520 bp, Homo sapiens
aaaaaaaaaaaaaattagccaggcatggtggtgcgcacctgtaatcctagctactcaggaggctgaggtaggagaatcacttgaacccaagagatggaggttgcagtgagccaagatggcaccactgcactccagcctgggcaacagagtaagacactgtctaaaaawaataataataataaataaaataataacaataaaaaaagatgcagactatgtgggaggtgagaaaacaaatgtcttctctaatgaagagtggaaggaaaatgtggtgggagatgcatcagctgccccagattttagccttagggtcatgcctaagtggcacagagagagacaaaggtgccaaccttgctatgggagtgtatcaatggatgagctggaggtagcgctctgggctcctgtgggctgcatctgtggccaagggaccattaatacctacatgctccagtaagaggactcagagtttccaagggaaacttctgcagagaagcagaagtctaaggatggagcaaagcaa

SEQ ID NO: 15922 - DNA, 520 bp, Homo sapiens
aaaaaaaaaaaaaattagccaggcatggtggtgcgcacctgtaatcctagctactcaggaggctgaggtaggagaatcacttgaacccaagagatggaggttgcagtgagccaagatggcaccactgcactccagcctgggcaacagagtaagacactgtctaaaaaaaataataataataaataaaataataayaataaaaaaagatgcagactatgtgggaggtgagaaaacaaatgtcttctctaatgaagagtggaaggaaaatgtggtgggagatgcatcagctgccccagattttagccttagggtcatgcctaagtggcacagagagagacaaaggtgccaaccttgctatgggagtgtatcaatggatgagctggaggtagcgctctgggctcctgtgggctgcatctgtggccaagggaccattaatacctacatgctccagtaagaggactcagagtttccaagggaaacttctgcagagaagcagaagtctaaggatggagcaaagcaa

SEQ ID NO: 15923 - DNA, 529 bp, Homo sapiens
gatattctcatgtgctgtttatatatcgatagggtccaaaggagaagcacggtacagtacaaagacctgggctatgctgtcttattggggatttctgaactcccaataattggcaatttttaacaagcgcccaagataatctggtaaagttcggcagcactgtcttctcaaggcatgaatgcacaatgagatctcatggtgagctcagcaggagaagctggagaaaagataaagaaagggaagaataaaggcagcgtagttagttctaggacagaaagagtaggtgccatgtggctggtaagggagctcttgactcagtgtaaataccagggatgaaaagaaatacacttaccagtaatcaatctttatgcttctttgttcttctctttctttgggagagatatcagatgyaaaagattaaggaaggctttaataaaattaagaagagatgtatttttgttttctaatagtagtgatggtaataatacttggaagattggttataattatcatttttatgactcaggct

SEQ ID NO: 15924 - DNA, 586 bp, Homo sapiens
tggaaaaatggtgctaacagacttgctggacacggttgccacaaaccttcaatttataaaaaatgcactgtctgcaaaggctattaagttaagcataataaaataagatgaagtctgcatgtgtaaataaatgtaatatttaactttaaagcatacagaagatagctttaaaatgtatagtaatgtgttctttggtatcgtttatataacttacattttgatatgtttcatttctctgctcaaatatcgaagcagggtataactktatatcttgacccccataaccacatatttctgtaggacaccacttacgaagaatgcatatgtaaaaagcgatggatgtcatcaaatcacccttacttttttatatttacataaaatgtcatgataatcagggtgtgagttcctctttagacatccttctgagaactattttatgacaacttccccacaactgataggccagcatgagttgtcaagagaatggaaaagctgcccccacatcatctatgccttctgtgtcctttatggtctaactacatcctccaggtcctgccatttcacacttggcctatgtgcaatgttc

SEQ ID NO: 15925 - DNA, 586 bp, Homo sapiens
tggaaaaatggtgctaacagacttgctggacacggttgccacaaaccttcaatttataaaaaatgcactgtctgcaaaggctattaagttaagcataataaaataagatgaagtctgcatgtgtaaataaatgtaatatttaactttaaagcatacagaagatagctttaaaatgtatagtaatgtgttctttggtatcgtttatataacttacattttgatatgtttcatttctctgctcaaatatcgaagcagggtataactttatatcttgacccccataaccacatatttctgtaggacaccacttacgaagaatgcatatgtaaaaagcgatggatgtcatcaaatcacccttacttttttatatttacataaaatgtcatgataatcagggtgtgagttcctctttagacatccttctgagaactattttatgacaacttccccacaactgataggccagcatgagttgtcaagagaatggaaaagctgcccccacatcatctatgccttctgtgtcctttrtggtctaactacatcctccaggtcctgccatttcacacttggcctatgtgcaatgttc

SEQ ID NO: 15926 - DNA, 576 bp, Homo sapiens
  misc_feature (1)...(576): n = A,T,C or G
tgttggcctggctgctctggaactcctgatctcaagtgatctgcccgccttggcctcccaaagtgctggaattacaggcgtgagccaccgcgtccgcctgcaaatctgcattttacataagataaagtaaacataaggtaaagaaagaagtcaaatatgcatttgtcttgtctagtgccagtgaagataagcagttagtttacattgtcagagygagggggggccacttggggagatccgtagccttctatcttgcagctatctgtttaagaacaaaaggaaaggtagttttttgtatggctcagttttcaagcttaacgtttccctttgccatagtgtttgcggccccaacattttattttcctttcacaagacacaccccaagcaataacaatcaagaacctagaaaagtgactggcacagcgcacatgctcaataaatatttttacacaaattttaattaatattgattttaaatgttgaaagatattgccaaattggccttctaaagcttttttgactgttatttctttcccaanagacagagaaaaatacacaaaataaaaccacaatagt

SEQ ID NO: 15927 - DNA, 553 bp, Homo sapiens
actattttccttttgttctcaagtgtggccaagttacatgcaataatttataaaattatattatgcgccaggtgcaatgtcccatgcccataattctagaactttgagaggctgaggcaggagaattgcttgagtccaggagtttgagaccagcccgggcaacaaaataagaccccaattttacaaaaagtacaaaaattagcctggtgcgggggtgtgcacttgtagtcccagctacttaggaasttgaggcaggaggatcccttgagcccaggtatattttaaagactgcatgagctgtgatctcaccactgcactccagctgggtgatgagagagtggaagtcgtccagtgaccctcaaacagaccaccgaagagaaaaactccttatctgaggaatttagaagggaataaagaccccctggtcacatctggttccagcctctttcaacttttataagtaattaaagtttttatgcatctctggaatgccatgctgaaactcattttgcaatcttaagctcccgcagtaagatccataaatacccctaag

SEQ ID NO: 15928 - DNA, 762 bp, Homo sapiens
agggacttggattccatttatctttggtcccagaaaaaagttaaataaaagtgaacaccattgtgtgttagggttttctccctattttctcagcattatcctgactcccatttcaaccatttattttatttttatttttatttttttatttgatttttaaactccttagatgtagttgactaatcaagaggatgccagtttgaaaattcaacagatgctgtaatactaaaaggcaggcaaaagggtatttctgggggagtttggctagaatgctatattttcaccaaaaagttccagaaattgaactcataaacttactgtgtttcaattctttattacctaaattaagaaacaatatggaatggaatgttcatcttayagccttgttgcatttgaaaattaagagtaataagggaaggagctggtcttatcatttataaagacatattaagttatactaaatattgaatcttttaccagacaaataaaagataaactaatggaacattatcatcagttgatacattaaccccataactgttaggactctcatattttaaaaattttattaaaaatgtataatatattatacttgtcatttgttaatgttatttgttgtttattacaattaaaaatagacctaccatatgatccagcaatctcactactgggtatatactcaaaggaaaggaaatcagtatacctatgagattccttcagttccatgttcattatagcattattcacagcaaccaagatatg

SEQ ID NO: 15929 - DNA, 559 bp, Homo sapiens
tgctaatattaatatattctctagacagcacccagagcgattctttcaaatagaagtaaagtcatgtcatttctctgttcaaactctgctatggtttgcatttcactcagaatgaaacctggagtccttaccaagggcccacaaagccctttgtgatttgtcccccaaccccccacctcccacctytccattatcttctgccagtatcccgtcacttcatttggtcctctaattttgtctggccaagatagtggtttatttttgtctttttctatgtaatagggaaaaggcaatgaatacaactagatgggagttacgtttccttgcaatacaagcactaattgtcttattcttttgttaagcattcatatacctgtggggcccctgccagccttggagtattcctacaatgtaggaggcaaatgtaaagccaccgaaggttttaaacaggtcagatttgcgttcagatggatgattttgcattcatcatggagaatgggcttaagctgaactccactggaagcaaagactgaaaaaccattaaaaagtttttacaact

SEQ ID NO: 15930 - DNA, 588 bp, Homo sapiens
aaacaaaatgtggtatatacatacaatgggatatcattcagccttaaaaagaaatgaaattctaacacctgccacaacatggataaaacttgaakacattatgctatgtgaaataagccagacacaaaaggacaaatatcttataattccacttatatgagatacccaaaataatcaagttcataaaggcagaaagtagaatagcagttattagggtctggggcagggagaaacaaggactttttgtttaacaggtacagagtttcagtttgggatcctgaaaagtttctggagatagatagtggtggttgcacaacaatgtgaatgttcttaatgccactggactgtacccaaaatggttaagatggtcaattgtatattatgtgtacttcactaaaataaaaaaaatgaccagtgactctgttgggcaaatttaccctatttcttttatcagttataaagtagccattgtaaccacttagttttaataatagtttattctccacctgatgactaccaagagcgcatctcaagttgaacaaattgaacttatcacttgttgcgctgagtgagaatgtgcatcatggg

SEQ ID NO: 15931 - DNA, 486 bp, Homo sapiens
tctagcacgtttatctctgtcaaagaccaaaaaagtcatacayttattctttttatattatatttttttccttagtttcttcataggaaacagcaccgggtgctgagtaattaatacaattgtggctttgctttttgtaacggacatttgttgaaagaaatgctcatcagtagaaaggataattttgataaattgcttcagctttcatgcttacctactctcttctggtggcaccaaatcccggttttaagtctgaataaaactaagctgaatgacttttccagtggagcttccatttcccactgattacttacagagtttttctcttatacccccttttggagtctgttctcttttatcacttcacaggtattaatcccctttttatcccctactgtctacctttatttctacccagatttcaggctttctgtgttcgttaatgctttccttcattcctttctctccccttgcttctgatcttcc

SEQ ID NO: 15932 - DNA, 518 bp, Homo sapiens
gttggccggttcaaatatgaataactttctgccagttcaacagtaaataaacatacagacacacaaagtggtgatccaggtaaaggtgatattaatagtaagtaggtgttgcttttaagtttttaaatttaaaatatacaaatatattttaaattttcacttactcattataagattacatttatgtgcaatttgtatatttgaaattaaaacttttaagagaaatacctacatagtactcaatactatagaaatacttagatttaaaagttataagctcttyttactctctaacctcacctccccaaaagtaaatactactatcctttttgttcttatccttctaaatatatgtatacatatatacactatcaacccacctatccacacacacacacacacacacacacatacacacattttaaaatgtaaatagcattatgttggtcacattactctgaaacttgtttttttatataataatatatcttaaaagattttccccatattattataca

SEQ ID NO: 15933 - DNA, 530 bp, Homo sapiens
tctctctcccccctctccctcccgagttctccggctctcggggcaggcggggccgtgcaacaaayaaagggcacaaccccgcccacacacgcgccgcacggggaacatggtctgccaaggaggaaggatgcggcggcactgccgcagcttcacccccgcggcttcgctcttctcagttaatgatccctcagcaggttcacctaccgaaactttgttaggacttttacttcctctagatagtcaagttcgcctgtcttctcagtgctctgccagggcagtgggctgacctggcggggcccatccaagggcctcactaaaccatcctatcagtagtagcgacgggcagtgtgtacatagggcagggacttcaggtaagcttatgacccacacttactggaaattcctccttcatggggaataattgcaatcccccatccccatcatgaatggggttcaacaggttacccgcctctgccacatagggtaggcacacgctgagccagtcagtgtagtgcacgtgcagccccgta

SEQ ID NO: 15934 - DNA, 530 bp, Homo sapiens
tctctctcccccctctccctcccgagttctccggctctcggggcaggcggggccgtgcaacaaataaagggcacaaccccgcccacacacgcgccgcacggggaacatggtctgccaaggaggaaggatgcggcggcactgccgcrgcttcacccccgcggcttcgctcttctcagttaatgatccctcagcaggttcacctaccgaaactttgttaggacttttacttcctctagatagtcaagttcgcctgtcttctcagtgctctgccagggcagtgggctgacctggcggggcccatccaagggcctcactaaaccatcctatcagtagtagcgacgggcagtgtgtacatagggcagggacttcaggtaagcttatgacccacacttactggaaattcctccttcatggggaataattgcaatcccccatccccatcatgaatggggttcaacaggttacccgcctctgccacatagggtaggcacacgctgagccagtcagtgtagtgcacgtgcagccccgta

SEQ ID NO: 15935 - DNA, 530 bp, Homo sapiens
tctctctcccccctctccctcccgagttctccggctctcggggcaggcggggccgtgcaacaaataaagggcacaaccccgcccacacacgcgccgcacggggaacatggtctgccaaggaggaaggatgcggcggcactgccgcagcttcacccccgcggcttcgctcttctcagttaatgatccctcagcaggttcacctaccgaaactttgttaggacttttacttcctctagatagtcaagttcgcctgtcttctcagtgctctgccagggcagtgggctgacctggcggggcccatccaagggcctcactaaaccatcctatcagtagtagcgacgggcagtgtgtacatagggcagggacttcaggtaagcttatgacccacacttactggaaattcctccttcatggggaataattgcaatcccccatccccatcaygaatggggttcaacaggttacccgcctctgccacatagggtaggcacacgctgagccagtcagtgtagtgcacgtgcagccccgta

SEQ ID NO: 15936 - DNA, 530 bp, Homo sapiens
tctctctcccccctctccctcccgagttctccggctctcggggcaggcggggccgtgcaacaaataaagggcacaaccccgcccacacacgcgccgcacggggaacatggtctgccaaggaggaaggatgcggcggcactgccgcagcttcacccccgcggcttcgctcttctcagttaatgatccctcagcaggttcacctaccgaaactttgttaggacttttacttcctctagatagtcaagttcgcctgtcttctcagtgctctgccagggcagtgggctgacctggcggggcccatccaagggcctcactaaaccatcctatcagtagtagcgacgggcagtgtgtacatagggcagggacttcaggtaagcttatgacccacacttactggaaattcctccttcatggggaataattgcaatcccccatccccatcatgaatggggttcaacaggttacccrcctctgccacatagggtaggcacacgctgagccagtcagtgtagtgcacgtgcagccccgta

SEQ ID NO: 15937 - DNA, 539 bp, Homo sapiens
tgaatgaagtccttgtcagtggataataacctgtttaaaaatgatgtgctgtacatcatgggtaaatccttagcaaggggatttgctctcataaactccagtgaccaataatttcacagataatagcaaataaaactaaatttaaatcctctattctgagataggtactgcaaattagtgaaatgcatgaaactatgaagaatgctgactttctgactggtggacaaagatactctatattatagtgcttaagaaggttatagtgtaggctgcacagtaaagagaaaaggtgaaacatcctttttcctagacgtagactaggaaacagtgaaatgatttagcaccagaagcaaaaatgtacacaccaagcaaagttcttttcaaaactggtaataattaatgcctccagagggaaagaatacttgactaaaactgcaacattaggaaggaattatagcaacaaaacagcttcaattacagcaacaaggtatgtagtygaggagtatctcttagtgattcctaagaggccaataaggaaa

SEQ ID NO: 15938 - DNA, 609 bp, Homo sapiens
agtcctcatacattactggtggaactgtaagatgctatagtgtttagaaacattatccaggaggatatttttaaataaaattaaatgtgcttattatatgctcaagcaagtaatattatttttggaaaattattctgcagaaataaatttaactgtaaacacagaataaacacacacacaaaatcacatgcaccatatttggcgataataaaaactagaattctcataggaaaattattgaaacacattacataagyatataatgaattaatatcagtaaaatatgggttaatttaaaaaaatagttactacatgcctcctgttctaaaaatagttactatatgcctcctgctttcaataggcccaccatttgaggccttgattatacaataatgattaaaataagtggttgaactgtaaggccgtaccaatactggttagtgtgagagcatgcaatatctcattgccacagacataggagggttcacgtctactctcaggctctgctccaatgacctccactaggggctcatgagaaagaatgaggttgggggcaggttgggagactggagaaagttggttccacagagctgtaccggagaaggggag

SEQ ID NO: 15939 - DNA, 625 bp, Homo sapiens
ttttgcttatttccttggttgacttttgttgctgattttaaagaaattatttgttttgatcattcatttttttcttttcttttcaattgtttgtttttcagacctgagtcagaactccatcacaggggaacacagccaactgttaggtatagtattactgtggggattgactttatccaaagtcacccttaactcatttatcctaacagacattactcccktctctgattctattttctatcccctccttttctacttcccacccaacaacttttttcctgctgtttctattcccaacttgccaagttttaggaaactacttctataattgattactaagactcagttaaattaaaaagtaattttgcatggtttatggttaaaaaaaatctaagaactagaattttttaaagataatttggaaaagaagatattataatagctttgtaatatctgactttgcagctaattttccctttttattacttttcttggccttttgatcccctttttaattattgaaagtacttcataaacagtatgtccttaagcagtccttagaatttggtgttccagttccttatctatgaaacaaattatggaaatgaatttacttcctctgggt

SEQ ID NO: 15940 - DNA, 786 bp, Homo sapiens
atattttcatctctagttgtctggaaacggaaacactccaacatttaaagatggttttgatggcgaaaccactggaatgaaacacacatcatcgggcaattctgtgtgttgagttccatccctctttgtttatcattttaaataatttcccgacaaatctagaaggcaggtcttgtcttaactttgcaacgaggaggctggggacaggtagctgagctgtgggttgcctaagagcactcggctgtgatggggcagtgctggcctttgagtctgagctggagagagtgtgaggtccgtgttctgtccctgtctcctgctggggcccattttgtatcagatttgtttttaacagggtgggcatgactaggactcatgaccactggtgggcacgtaaaggtgctaattttcaacacaagccgagagactgatggctggcatcggagagtcgtggaaatgccacagatgacgtgggccctatacagcgatgggaaaagggtctgggagctmgccctccaggaaggtggctgacgtggttggtgggacactaaggtgttttccattttgcacttgaagccaacatggattcttagcacttcttgtccctagaatcaactgtgcagagagacgtttggtcgtgaaactctcaggcaaagacagttctgaggaaactcttattagtaaatagtgagtcggagaacactattgacatttaggattttcagttgagatacatatgtactgtcatgcatcacatgacattgttttggtgaatgatagcatatatga

SEQ ID NO: 15941 - DNA, 479 bp, Homo sapiens
gtgtgaaatggttattcttaggagcttacgtgatacgctytcaaatgtgctcagtcagccaggggtgtggagcgatgttgccaggaatggcagctgccagcaggcctgtgccatgtgcctcctggaggttgatctagatgacatggtctcagggctggcaattgaatcagcaaggaagtaaaactgcctttgcaaaaattataactgaggaaattatgacattgaaagagatcagacctaaccgactccatcttgcttctaacttttaagctgtccttgtttattcctgggcataggcccatctaaccttgagaaggaattcagtttatggtttgattctgaaacaaaattgataacagcccttccctaaaagacccccttcttgcctggggacaagtctgcctttgtaggactaagaaactagctacaagattggaaattatcatttagggctcatacagcctctggctgcaagagtc

SEQ ID NO: 15942 - DNA, 638 bp, Homo sapiens
acaggtgtgagccactgggcctggcggaggcatactcttcttgactctatcaatgtcaatatcttggtcataatattttctaagatgttatcattggcgaaactgagtaaagggtacatgggatgtctgcattcatttttgcaactgcatctaaatctgcaattatctcaaaatttaaaaaaaatttaaattatacagcatatttgctgaaaaatactagtgacaacagtggctagaagagtgattattagtgtattattattacatttggagccagagagatatacatttttgcctttttctacttctttattgtctagaaagttattcycccagacactctcatgcttcccccactctcttcctttagctcttcagtcaaaaatcatgtcaggagaccttccttgcccaacttatataaaattgcaggcttccccatcccccaccagtattacatattccccatccctaatcaattttcttttctccttagaacttatcacctctaatgcattctatattttatttattaatcttgtttctgtgtcttcctcctagaatgtatgctgtaagagggcagggatctttgtcagttttgtctcagcattgcattctcattgctattaacagtgttggac

SEQ ID NO: 15943 - DNA, 638 bp, Homo sapiens
acaggtgtgagccactgggcctggcggaggcatactcttcttgactctatcaatgtcaatatcttggtcataatattttctaagatgttatcattggcgaaactgagtaaagggtacatgggatgtctgcattcatttttgcaactgcatctaaatctgcaattatctcaaaatttaaaaaaaatttaaattatacagcatatttgctgaaaaatactagtgacaacagtggctagaagagtgattattagtgtattattattacatttggagccagagagatatacatttttgcctttttctacttctttattgtctagaaagttattctcccagacactctcatgcttcccccactctcttcctttagctcttcagtcaaaaatcatgtcaggagaccttccttgcccaacttatataaaattgcaggcttccccatcccccaccagtattacrtattccccatccctaatcaattttcttttctccttagaacttatcacctctaatgcattctatattttatttattaatcttgtttctgtgtcttcctcctagaatgtatgctgtaagagggcagggatctttgtcagttttgtctcagcattgcattctcattgctattaacagtgttggac

SEQ ID NO: 15944 - DNA, 514 bp, Homo sapiens
gccaggctgctcttgaactcctgggttcaatcaatcctcctgcctccacctcccaaagtgctgggattacaggcatgaaccactgtatcygggctgtacttggatttcatttctttgtttttctcactgtgcagctttggagaagttcttaacgtctctgtgaaataaatacacacctattatatcctggttctggaatataatacagtctgattttgcaatatgtgaccagacaatccagaaaagttacatataaattgaatgtattgtaaacaggattctggtcccctctcacccccccattctgcctatgggcttttggaagtactcaatattgatttttgagtaatcttttattgatagagcctcattacaatgacttctttcctttcttcatattcttccatttctctgtggtggtcaatagtgtaatcttctagctccagggagttctagagttaaaagagcatgatgatgagtcagaagttgagtagttcacaatcatctaatcatt

SEQ ID NO: 15945 - DNA, 514 bp, Homo sapiens
gccaggctgctcttgaactcctgggttcaatcaatcctcctgcctccacctcccaaagtgctgggattacaggcatgaaccactgtatctgggctgtacttggatttcatttctttgtttttctcactgtgcagctttggagaagttcttaacgtctctgtgaaataaatacacacctattatatcctggttctggaatataatacagtctgattttgcaatatgtgaccagacaatccagaaaagttrcatataaattgaatgtattgtaaacaggattctggtcccctctcacccccccattctgcctatgggcttttggaagtactcaatattgatttttgagtaatcttttattgatagagcctcattacaatgacttctttcctttcttcatattcttccatttctctgtggtggtcaatagtgtaatcttctagctccagggagttctagagttaaaagagcatgatgatgagtcagaagttgagtagttcacaatcatctaatcatt

SEQ ID NO: 15946 - DNA, 536 bp, Homo sapiens
ccttttgggttcttggtcatgaaatccttgcctaagccaatgtctagaagggtttttccaatgttatcttctagaatttttatagttttaggtcctaggttgaaatccttaatccatcttgaattgatttttgtataaggtgagagatgaggatccagtttcactctcctacatgtggctagccaattatcccagcaccatttgttgaaaagggtgtcctttccccactttatgtttttgttatgttcagttagctgtaagtattttggtttatttctgggttctctattctgttccattggtctatgtccctatttttttttatagcccaaaggtcttttttttttttttttttaacacctattatgccatgaattcacagggaataggttccagcagctcaggctccttcccattggctctcacaaagtgtgcttctctgggtggagcaggctggcgcttgagttgaacccaggtacctttctcttcsgcttctttctttttctgatcattttccttcatgcatttcaggaagc

SEQ ID NO: 15947 - DNA, 542 bp, Homo sapiens
tgggagaaatgaccacagtgaggagaagtgggaagggaaactggyaggatgcttccagtgtagcatggtatcaggcaaatttgttttacaaagagtatttagggaattaagctctcaggattgatttctcctctgggcccacatacaccttggtaaatctttgtccacctttaatgctacagtttgaagattgctaccttagagggtaatttatagagattatgttaactagattgtcacatatgtgattaagtggacaagatgattgtagcgaacatgtgttgtttttttctacctcttccttttccattccaggtggttctggcaggactgtcaatgatacaacctcatctcctacaggcagcctggcctggccaatcatattaaatctattcccatggatatagtagtttgtccacagtacgcataaaaaccaagcagatcgataaaagtctttccctggaattggtatataaacattggggaagaaaagtttactttctttgtattaggagctgctgagctgggaatatgtgactcta

SEQ ID NO: 15948 - DNA, 499 bp, Homo sapiens
tcagacatatgctgcacactctgcctttgtgaaccttgagacagtatgtttacttctatagtagcaccactaactctgtgcaagagactctcatagagattctcactaactctgtgcaggagattctcaaccctggactttttgtttctagtcctttgtatctcactgcatatataatctcgccacstggatacttagatacttagatatccccgtcatctcatactggacccattataatctttcccccaggtgtgtcttttcttctattgtctcctgtcacatatcagtgacattcttttgtgtctcagactaaggactctatagtcattcttcatttcttccctttcttcaccttcacactcacatgaccaccacattctgtcagttttaccacagatttatctcctggatctaagcttcctctctgtccttggcatggcttgttttattctggccctggctaccttgtatctggattatttccagaatcttctta

SEQ ID NO: 15949 - DNA, 605 bp, Homo sapiens
tagggaaaaactgagaaaatctgaagaacaagcatgaactttagttaataataatgtatcaatattattttattaattgagacaaacataccatactaatgcataataataataggggcaactggctgtagaaggtacaagggacttctgtactacttcataatatttctgtaaattttacccagcataaaataaaaattttattaaaagraagaaaggtgccataaagtaaatgttcaacacaatgaatgaaaaatacagtaaagcacatctttacacaacttataacactgagaaatttcatcatactcttcaacaacgatactgaatatgttatgaaaatggaacaatatttttttactttcattatgctcttttctatttagaaagtgtaaaaatagcagggtgaaggagggatagtgccctgattcatgtagatctcataacttacaggggaattgataatctaatccatctttatctgatatctaaacaaatgtttccaaaagcatgttctgcaaagcaaatcacttgtcaggagatattttctaaagaaaagactccatggtcaaattaatttataaatgatgagtaaaacagtggta

SEQ ID NO: 15950 - DNA, 585 bp, Homo sapiens
cactattttgcccaggctggtcttgaactcgtgagacgtgaagatagtttttactcttctatagcaacttaacctgcaatgaactgaagctgaagagatgaaatgtgatctcagagtgctactggaatttcactgtagcatattcatttccatttgcattttaggaatctttgtcaggaagtcattatttttctgtcaaaatattgcaacttaattttgatcagccatttctgcacaacagggaaacagagatgaagttaaaagtttaattaggttcagggactacctagcctctgtgctcactatggtcttaaatataaaatgacataccgtgtattagtacttagtcctggttggtcaggttgatgtagttgagaattctggacctagtttgagtttcacttgcattttatttttttgcctttaaatatgtggaagggaaataacatttagtgtgcaccagctatatgttttgccctgtgyaagagatttttatccacatcaatcatttactcagcacaaaaaacctggaaggccattgtaaaggaactttagtttggtcactcaggaatggtctttatttgc

SEQ ID NO: 15951 - DNA, 280 bp, Homo sapiens
tttttttttttttttttttttycaatttgagagcaggtactgtttattaaccaaccagcttagaaaaataatcatggtagacaccttagttcattcttctaataagcctgttgatctggtcctccctgttgccagcatctccaccttctacaaaatgggtggtctttttcttcattccacctcgtggagaagacaatttgaagggccacaggaagttatttgcctctttgaagcgttttccaacagtatagatctcatgaatcaaatcctccatgcagat

SEQ ID NO: 15952 - DNA, 561 bp, Homo sapiens
agctattggcttggggcttctttcaccaatatgtaattctctcctatattggatctctggtttcctagatcccatatcttctttcctgatatattccctcatcrggaaatacaccttccagaaggttccagagaaaaaaatccataggaaacacttttttttaatatattgtgtattcagagatatgtttattctattttcacatgttattgatagtttggaaagcaatgctttttctcagtactgtacttgtaaactttatactatgtctacttggagggggtgtcataaagataaaaagcatatactttttactcctgctctccagctactgagttccatgttccagaggcaaaccatcttaccagttaattacatattttttcagagatgttcaaagacatatattgattatatatatatagtttttcttttgattcaaaagtggtaactattatgcacactattctgaaacattttttcgactttaaaaatttacatcttagagatctttccttatcagtatgtttagagctgcctcattctttatatacacctgca

SEQ ID NO: 15953 - DNA, 575 bp, Homo sapiens
attggacatactctgcttgagttaccctcaactgactaaaaaggctaaaaagaaatgtaaaagtccgttgtatccataaggtagcaatcacatttgtttatccaattgtccagggaatttttctctggctggattcaagttcctgtgatataataatttggtctattccatgattaatggcatttaatattttggaaagatctttgagatcaaattgaacacattcatttcatggatgaggaaaaygctgcccagagaggtttaatgatttgtccagagttataggaacatacagaaatacatccaggacatggacacagagttcctgattcttagtcaaattctttaggtaacacattccccagggtcagattcgacataatttacagtcacttgattatagagaatgttataatttcaatatatatcaatgcatatattctgcctgatatagttgggatacttgtccctccaatctcatattgaaatgtaatccccaatgttgaaggttggccctaatagaaggtgtttgggtcctgcgggtggatccctcatggcttggtgctgtccttgca

SEQ ID NO: 15954 - DNA, 575 bp, Homo sapiens
attggacatactctgcttgagttaccctcaactgactaaaaaggctaaaaagaaatgtaaaagtccgttgtatccataaggtagcaatcacatttgtttatccaattgtccagggaatttttctctggctggattcaagttcctgtgatataataatttggtctattccatgattaatggcatttaatattttggaaagatctttgagatcaaattgaacacattcatttcatggatgaggaaaatgctgcccagagaggtttaatgatttgtccagagttataggaacatacagaaatacatccaggacatggacacagagttcctgattcttagtcaaattctttagrtaacacattccccagggtcagattcgacataatttacagtcacttgattatagagaatgttataatttcaatatatatcaatgcatatattctgcctgatatagttgggatacttgtccctccaatctcatattgaaatgtaatccccaatgttgaaggttggccctaatagaaggtgtttgggtcctgcgggtggatccctcatggcttggtgctgtccttgca

SEQ ID NO: 15955 - DNA, 575 bp, Homo sapiens
attggacatactctgcttgagttaccctcaactgactaaaaaggctaaaaagaaatgtaaaagtccgttgtatccataaggtagcaatcacatttgtttatccaattgtccagggaatttttctctggctggattcaagttcctgtgatataataatttggtctattccatgattaatggcatttaatattttggaaagatctttgagatcaaattgaacacattcatttcatggatgaggaaaatgctgcccagagaggtttaatgatttgtccagagttataggaacatacagaaatacatccaggacatggacacagagttcctgattcttagtcaaattctttaggtaacacattccccagggtcagattcgacataatttacagtcacttgattatagagaatgttataatttcaatatatatcaatgcatatattctgcctgatatagttgggatacttgtccctccaatctcayattgaaatgtaatccccaatgttgaaggttggccctaatagaaggtgtttgggtcctgcgggtggatccctcatggcttggtgctgtccttgca

SEQ ID NO: 15956 - DNA, 491 bp, Homo sapiens
aaacgaaacaaaacaaaatacacacacacacaatatggaaagcagaagttactatccctgtgacaatacctaagtttatttttaggaaataatatgattggttatatggaaaaagacaaaacattttaagggaactcagcataaatatagataaataaatatcaagttttgattgacgtatctgcttttgaaaggataaagcagttgtactatgtaaaagctatcgattaacctccttttcagatatctatacagtgtcataccttgcttagtgacaggaataccttctgagaaattcgctaggcaatttcattgttgtgtgaatatcatagagtgtacttacgcaaacctgatggtagagcctgctacatacctaggctaygtggtatagcctattgctcctaggctacaaacctgtataacatgttatgctactgaatgttgtaggcagttgtaatacaatggtaagtattgtgtatctaaatatatct

SEQ ID NO: 15957 - DNA, 680 bp, Homo sapiens
ccctttttatttattttagaataaatgatctatagaaatgagtaggcaattccaatgttggaagaggcaggttagctttgttgattttttagttcaagtgctctcttctcagttgctatgaagataaactattgtttttaaaaatgtgaaacctctgtgcataattgtgtatttcatatttcagacctttacacatttcagagccttctcaatcagccctgtgtgctcattctttcactggccactgttaccaagcagagtggctcctgtcttcccaagtgatccatttgcttcagaaactgtttttgttcgccttttgagatctgtcaccggtgagatgctgaacgttgtattacttttcctctcatgtctctaagtattttcccttttttcaatctcagcccawctcatagcagttctaaataaagtggagtgctcttattttagagtgtacattttctggaaacttacgacatcttcctctactagaccctttctcttcttcaaattcttttctgactcaatatcactgctttggtttattgctttatgagttcttacccagccctgatggtcttaatagctttatatagcattttcatatagttcgtattttttgtttttttctgttctgtaatttggccaatcaagcagtttgtggtttactattcactgtgtgg

SEQ ID NO: 15958 - DNA, 292 bp, Homo sapiens
tattgcattatttcaattatatcaatgtcatagacaggcaaaactatgataatggaagtcagattcttgattgcttctgcggacaagggggttgctgactgaaaagcagcctgaggaaactttccagagcattggaaaggttctgtacattaattcagtggagagtatatggatgtggagatatataaaataccattgggcagaacatgagasttaaacattatgcttcacgtaaatcataccttaatgaataaagcaatgaaaaataacaggaaaaaataccttgtattca

SEQ ID NO: 15959 - DNA, 596 bp, Homo sapiens
tacattattttgcacactgtaggcaacttaaggtcactagaggaggcgggtgagaaagtgacaagagaccagcagtaagtttcctcacataagttccctacagtgactggaacctatcagcttggcttctttattgctggtattgagataaatcgccacacagaaacatcatctaggagttaatcagaacagaaaactcaggaagattcaggacccacactggataccattattgtcataagtcaagcagcatttctccttcattagtaccatatttcattacagtatatcaccacaatgtttagtaatagttttacaagaaaatagacttcaaagctttgtgcctttggtttctatgtagtgaatttctcattataactttttatctttgcttaaactgaaaagtgaacgaattgacctttatgagtcagtgtgcactccggtgttttaccaagaaataatacctttaaaatgatatatttgcgtatgcatagaatattccagaaagatatgcaaaactgattatatctagagtggcsgggagatgagagaaaggtggaaggggccttttcacttagacatttttgtgaatttta

SEQ ID NO: 15960 - DNA, 518 bp, Homo sapiens
ctgcaagctccgcctcccgggttcacgccattctcctgcctcagcctcccgagtagctgggattacaggcgcccgccaccacgccaggctaatttttctgtatttttagtagagactggrgtttcaccgtgttagccaggatggtctcgatctcctgaccttgtgatccgcccaccttggcctcccaaagtgctgggattacaggcttgagctaccacgcccggcctgcctttttataatacatttaattttttaaaaatgctgataaagacctctagtttgatatataattctcagagttgcgctatcgtctaactacaatttttcactcatacccttcctgtcaattgaaagctaagggacaggtaataaaagactacacttgcattaatagtaaaacatactagggaaaagtttttcagttacagtttcagaaagttgttcagttgctatgagagtggaaactaaatatttgcttccttctattacaaacacagcagaccaacctaacctaagtc

SEQ ID NO: 15961 - DNA, 570 bp, Homo sapiens
tccttgatcagcagtacaattccagctgctattctagacctttgacatgctctgtgtcagtggaagaaagacgagattcataaatttggaaaggaaagctttgattctcataaaacattgcaacatgcaggctgagaaccatagcttacaaccaaaacccagaaacaggaacttcaagggtgttttactgtaccaacccccgtaaccccacaaacacgcrtaagacagggattcatgctaaattaggtggccagatatacatattcaataagctacagaaggagtcatgaatatttatgagaggagaagcatgctcatgtgcaagtcagcttcatgcttccctgtgagactatgttaaaaaaaaatgcagccttagcatgatgcaagggtcatgcgagttttaggacctctgatgtcaaaggtgaagcagaggacacgaaagctctcactgcactcctccctagactggacagaaccaccccgttgtctgtggtctctcatcaggagggaatgtggggttgttttgtcaaaactgcaaaagggtttagcagcaccaggtggttggttgaa

SEQ ID NO: 15962 - DNA, 570 bp, Homo sapiens
tccttgatcagcagtacaattccagctgctattctagacctttgacatgctctgtgtcagtggaagaaagacgagattcataaatttggaaaggaaagctttgattctcataaaacattgcaacatgcaggctgagaaccatagcttacaaccaaaacccagaaacaggaacttcaagggtgttttactgtaccaacccccgtaaccccacaaacacgcgtaagacagggattcatgctaaattaggtggccagatatacatattcaataagctacagaaggagtcatgaatatttatgagaggagaagcatgctcatgtgcaagtcagcttcatgcttccctgtgagactatgttaaaaaaaaatgcagccttagcatgatgcaagggtcatgcgagttttaggacctctgatgtcaaaggtgaagcagaggacacgaaagctctcactgcactcctccctagactggacagaaccaccccgttgtctgtggtctctcatcaggagggaatgtggggttgttttgtcaaaactgcaaaagggwttagcagcaccaggtggttggttgaa

SEQ ID NO: 15963 - DNA, 570 bp, Homo sapiens
tccttgatcagcagtacaattccagctgctattctagacctttgacatgctctgtgtcagtggaagaaagacgagattcataaatttggaaaggaaagctttgattctcataaaacattgcaacatgcaggctgagaaccatagcttacaaccaaaacccagaaacaggaacttcaagggtgttttactgtaccaacccccgtaaccccacaaacacgcgtaagacagggattcatgctaaattaggtggccagatatacatattcaataagctacagaaggagtcatgaatatttatgagaggagaagcatgctcatgtgcaagtcagcttcatgcttccctgtgagactatgttaaaaaaaaatgcagccttagcatgatgcaagggtcatgcgagttttaggacctctgatgtcaaaggtgaagcagaggacacgaaagctctcactgcactcctccctagactggacagaaccaccccgttgtctgtggtctctcatcaggagggaatgtggggttgttttgtcaaaactgcaaaagggtktagcagcaccaggtggttggttgaa

SEQ ID NO: 15964 - DNA, 570 bp, Homo sapiens
tccttgatcagcagtacaattccagctgctattctagacctttgacatgctctgtgtcagtggaagaaagacgagattcataaatttggaaaggaaagctttgattctcataaaacattgcaacatgcaggctgagaaccatagcttacaaccaaaacccagaaacaggaacttcaagggtgttttactgtaccaacccccgtaaccccacaaacacgcgtaagacagggattcatgctaaattaggtggccagatatacatattcaataagctacagaaggagtcatgaatatttatgagaggagaagcatgctcatgtgcaagtcagcttcatgcttccctgtgagactatgttaaaaaaaaatgcagccttagcatgatgcaagggtcatgcgagttttaggacctctgatgtcaaaggtgaagcagaggacacgaaagctctcactgcactcctccctagactggacagaaccaccccgttgtctgtggtctctcatcaggagggaatgtggggttgttttgtcaaaactgcaaaagggttkagcagcaccaggtggttggttgaa

SEQ ID NO: 15965 - DNA, 1254 bp, Homo sapiens
cccatcaaaaactgtaagagaaaaggggaaagtggctttcccctcccttgttttcaggcagtctttcagttttgcacctcgagggctcagtgcatcagtgacgtgcccaatcggagacttcagtaattgttattagaaggtgacagagctggcgtccatctggtgaaacagtatccagaaaaaggatctgtgcttccaagaagatgcagcaatacccagccggaacaagagcagagctcaagatgcatggcagttgcacagaggcaacaatgtccgctggaggctgcagcagtggtaccgtctctgcaagggagctgatctaaagtgatgtagacaattctctaatggatatgcatgctaaaacttgggcaaaaggagcttttcagggctttgaagtatggcataaatgatggcagccgcagcccgtctggagcagctgctgccatgatgctggctgcagtgggaggtgcggccggggttgcatgctccatggagtgccagccatggaagctgcttgcggtacamgtggtccagccgcagcctcacagggagccagagcccatatcagcggctggagctgcccaccctgccacagctggtgtgcctggctgtgcgcagtggccggaccccacatttgttcgctcacacacccctcaatgctccgtgcctggctcgtccttggcaggcgtgagattcgggctggtaccacgagcagagcacagcctgccaggctgagtgggcagaacgagcccggcaggcccaagtaaaaactcaggcaaaggcgtcactggccacagagatttctagctgatgaagtgacatccccaaatatcctgtgacataaacaaatagaggaaagagtcaaaaagtaatatgttgttcttcttatcaacatgaattcatggatatgcactggtggattaggactatgaaaacaaaacaatgttccctagtcaccaggtaaacacaaattaaagccaccatgagatagcactactcatttgcaaaaactgagaaaactgaacaccaaaacaaagagtggcccttgctttactttgcacagtttgactaggtgacctgggattcctttctttcacacaggcttccatgaacaatgggaaatggtacagaatctaatcacagaaaaagagccatgggaggaagccaagcgcacagacctcgcagcaattccctttaacaggctactggagcaaaatagcaagagaggatcactagcataccatgccaaggtgg

SEQ ID NO: 15966 - DNA, 547 bp, Homo sapiens
tgctgggaggaactagcaacactccacacctgactgctgaaagaatacaaatgtggtgtctgtggcaggtttaatttcactcatcacatagctctggaggattcaacctctgttctgaagacttgctttgcttactcttatggtggcctgagtcttccaaagcatgtattgcttttttctgaaagttttatgatttcactttattatgtcttttcaatcaataagcttcattaactaaaaaaatggtcctgcccgttggtatagtttccttttttccatgtatatcctatcagccagcatactgccacattaatccaagcagaaagcaatgactgctttgtttgatcatggtctgtggcattcactatttgtggaggtgaaatatctcccaagactgcctgcaaaggtcagtggcctaatttttaattgtatttaggcatataaacattgctatatgaaagagaccagataaatctaaacmcattttgtggtctcttttatgatgaacattgatgagaaatgtgaaaatgtgaaaatgttgaccctg

SEQ ID NO: 15967 - DNA, 529 bp, Homo sapiens
tgagaccttgtctctaaaacataaataaataaataaataaattaattaattaattwaattaaaacttagagtgctggtttctggagatgtccattttacagagagggaaacggacgggagacttaggggcacctcttatcctgggtctcctcaccttgttttcactgtgtcccatctgccaaagaaaatatttgtgtgtcaatccacccatgacctggtcactcactcccagggtggaaacctgccaaccctgacgatggtggcccccgagagccaccctcccccggagcctccgtcttggacatgcttgctgttaaagagggttggtgacaatcatctcttaattgcaatacctcctgttggcctgaataatagttgaaatcttgtgggcgcgttggctgggcattagggggtgtttctgttgtgcctcgagcaaagggaggctttattcacaccagcatctgttccagagaggtctgaaaagctcaattagtcagcagagcatgttggaaaaataaaaccccgaact

SEQ ID NO: 15968 - DNA, 541 bp, Homo sapiens
aatagttgataaaaaccaccagactcacttcctctcctgaaactgtaaacttctgttctggtgccgtgtttatgttgtaatcttctgtgcacggagttgcggggaggagaagtcatataagaagagccatagcagcyccgtaggtaggagatgcacatagagagaaatgtactgatgagcccagatctgtgagggatctcttggtgtcagatggaccccatcagcagcaaatatgtgtgcatgtgtctgatgagcaaaagtgctttaatgtggatataattaccatatgctccatggatgaaataatgtttctagcccacattatctgcccacatttacagtacacacagtgttaggtaatgcaatttatctcaacagcacaggcccttttttttgcaagcccagagcctgttctggctcttcactgggtgaatagagtttgtagacacttcttacatggtcccatatagccttcaacttaaatttaaaaatggctttgtttgcataattactattctttgcattatattttaaatcccca

SEQ ID NO: 15969 - DNA, 504 bp, Homo sapiens
agttgcttctaaaacgcataacatatccagccttctgatcaatgtatgttgagtctgcacatttaggaaaaaaaagaatgcaaagtggcagaactaagagtatccgctaacctcagaagagtagacagattattaagtacctgacatattttyttatctttctcataaatgtagttgtaaaacatcagtacattcttttaagtgacaatttcctgtatttaagataggtggtctgatttttcaagagaagccagaaatccagattttataaatattcttatattttaaaatagtcatcataaatttaacagttttgcagcatttcttgggccaaacaaagtacatctatgagttggatatggcctgtgacctgttggtttattactcttattttaaggacttcaagccaaaatgaataactaaggcataagcactctccttgtagtcacctaagcttccatataataataagaggctactttaaatgtttttgaaattatatcc

SEQ ID NO: 15970 - DNA, 556 bp, Homo sapiens
caaagccagccaatttagaatggatagtgccaagggaaataatgagtaccagttgtgacaccaagaacaattatagcaattgggactaaatgtatcctatcaatctcccgcttcgttttcatttaagaggtgctcactagaactctagaggaactgctccctctatgtggatgtagaagtttattcacatgatataggagtggaactgtagcaaccatggagatgcactccttggggcttcctcaaagtagggcagttagctaacaacctcaagactcaatgccttcagaagcttccttaacttttgagatgaggccrcattcttctcaggtagcccaagccaataaatgacccctgtaactccactacagacatgctatttctctctaatgtaggacatgtctgataggtgatcattctcaagttactcgttgggttgactttgtcagctctacattatggattgctgttgtagctgatcattctttcttatttcactctatctcatgtgtcatacctgcatcatggtctgaaggatttccctgcccaattcttt

SEQ ID NO: 15971 - DNA, 1048 bp, Homo sapiens
ttaatttttaattttagagatgggggggtctccctatgttgcccagattggtctccaactcctgggctcaaagaatcctcccagcttggcctccaaaagtgctgctgaattttcatatatccatgacgtgatggaaacatttagaaagtttcaatgtttatttccctcacttaaatatatttcgatttgaaaaaaaactattgtctagacttcaaagagtatattcatctagccctaaaagctagatgttcttataattaagacacttaaaattcaataattaaaaattttttacactgggcacagtggctcacacctgtaatcccagtattttgggaggcccagacgggtggatcacttgaggtcaggagtttgagaccagtctgggcaacatggtgaaaccccatctcaagtagaaatacaaaaattagctgggcgtggtggcacatgcttgtaatcccagctactcaggaggctgaggcacgagaaytgcttgaacccaggaggtggaggctgcagtgtgcagagatcacaccactacactccagcctgagtgacaaagtgagactctgtctcaaaaaaaaatttttttttctaaaggttttacttaatgtttttatttaatctttgctaattgtgaacccttctgcaatgggctttgcaggtacgatttcaacttcaaatctttctatttaagtgagagaaaggtaattgaaagattgttttatcaatatttttactttttctaccttaggttattcccttccaggtcaatttctcacataaactcatatctgcaaagcccataccaaaagggttcccaattagcaaagattaaataaaatattaagtaaaaccttttttaaatttttaattactgaattttaagtgtcttaattataagaacatccgacttttacggctaggtgaatattctctttgaagtctagacaatagtttttgaatactactcttcttagtaaactaatgtattcgttcattatcagataaatggaatgtaaaccagttatgtaaaaatatcacatat

SEQ ID NO: 15972 - DNA, 1889 bp, Homo sapiens
  misc_feature (1)...(1889): n = A,T,C or G
tgcattcattattgtcgagggtcaattttgtatccattatttggtactttccacagaaacctacatttgctgaatgcccgctgcgtgccagcccttgctagatacataatgctaacactaaaacaaagaaagggaaggcgtcataaaagtccagttggtagcaataactcaatttgaacaaaacttccccaataattaggtaataaataggacttccttggggaaatatttttgcacatctcaatttccaaagttggannnnnnnnnnnnnnnnnnnnnnnnnnnnnnnnnnnnnnnnnnnnnnnnnnnnnnnnnnnnnnnnnnnnnnnnnnnnnnnnnnnnnnnnnnnnnnnnnnnntttttttgttttacttctttattctttttcttttttttctgaaaaaagcagctaagctcaactaggtcaagatggttaaaaaataaaatcatttttagccagttagccagaatatttgttgaaagtgaattttctaccaccaagaaatgctgtgtaatactgcatttttttcagtacatggtatttggaattttatttcctggaacaaattcccagtggaggaaagtccccattgacttctttttcacattgctctgtttcgactcatctacttttaaaaatactgtcactcttactaatgtagaaatgtctaagtgtggattatgttaatgtgaattagagtaatccttgacataaattatcagacagcaaataatgcaaaataatgatttaattaatatgtattataaactgtgttagcattccattatttttatttaaaaacttaaatttccaaaaagaattaaggacataaatttgtttttttaaaatgacaaaatttggaacctggaaaactccaaattgtgtagtgctctgtggctgtgcccttggagacgtgaacatctagatatatttttcaataaaaaatgtaattaggagacatcataaaatcattatgtatttgagctgactggaagcaattctttgttcattttctctcttgcactctgggatattaaccttcagaatatttcccagcagactaaagtcattacttttatagaaaaggccaattcagcttagctgtgcagcgtggttctatatttaccactcagttgatgcagctctgggtggagctgagatgtttaaaggtgaatcaaacactgtcaagtctggttaaaggagatgcatcacccagcagggtgcttcttcaaggagcagcagcaaagctcacgtgtccaaccctgcactttgtcgcccaaaatgtctagacaggaaaggcaaatacggggctgaggggaactacgtgtgaagcttcctgtgggacaaaaagaccatgatgctttcagcagaggccaggtggcctgaaaaggggtgcaagtggacgagattatggatgtggggtagtggaggagagagatcaagggaaaggtggattgagacgcccagatcataggcctgggactgttggataggcactggtgttattaacatcagatttctaaaatacacttgaaggtactaaaagtctccaaatattagtaaacaagtcagtggcaaacacaacaaatcactcctacactgtagaactgcctcattgccatgagccacatctataccaatcctcaggcattgaaaattgtcatcactgaaaaaagggtgcgaggggaggagccaagatggccaaataggaacagctccagtctacagctcccagcgtgagcracgcagaagacaggtgatttctgcttttccatctgaggtaccgggttcatctcactagggagtgccagacagtgggcgcaggtcagtgggtgcacgcaccatgtgcgaaccgaagcagggcgaggcattgcctcactagggaagc

SEQ ID NO: 15973 - DNA, 1889 bp, Homo sapiens
  misc_feature (1)...(1889): n = A,T,C or G
tgcattcattattgtcgagggtcaattttgtatccattatttggtactttccacagaaacctacatttgctgaatgcccgctgcgtgccagcccttgctagatacataatgctaacactaaaacaaagaaagggaaggcgtcataaaagtccagttggtagcaataactcaatttgaacaaaacttccccaataattaggtaataaataggacttccttggggaaatatttttgcacatctcaatttccaaagttggannnnnnnnnnnnnnnnnnnnnnnnnnnnnnnnnnnnnnnnnnnnnnnnnnnnnnnnnnnnnnnnnnnnnnnnnnnnnnnnnnnnnnnnnnnnnnnnnnnntttttttgttttacttctttattctttttcttttttttctgaaaaaagcagctaagctcaactaggtcaagatggttaaaaaataaaatcatttttagccagttagccagaatatttgttgaaagtgaattttctaccaccaagaaatgctgtgtaatactgcatttttttcagtacatggtatttggaattttatttcctggaacaaattcccagtggaggaaagtccccattgacttctttttcacattgctctgtttcgactcatctacttttaaaaatactgtcactcttactaatgtagaaatgtctaagtgtggattatgttaatgtgaattagagtaatccttgacataaattatcagacagcaaataatgcaaaataatgatttaattaatatgtattataaactgtgttagcattccattatttttatttaaaaacttaaatttccaaaaagaattaaggacataaatttgtttttttaaaatgacaaaatttggaacctggaaaactccaaattgtgtagtgctctgtggctgtgcccttggagacgtgaacatctagatatatttttcaataaaaaatgtaattaggagacatcataaaatcattatgtatttgagctgactggaagcaattctttgttcattttctctcttgcactctgggatattaaccttcagaatatttcccagcagactaaagtcattacttttatagaaaaggccaattcagcttagctgtgcagcgtggttctatatttaccactcagttgatgcagctctgggtggagctgagatgtttaaaggtgaatcaaacactgtcaagtctggttaaaggagatgcatcacccagcagggtgcttcttcaaggagcagcagcaaagctcacgtgtccaaccctgcactttgtcgcccaaaatgtctagacaggaaaggcaaatacggggctgaggggaactacgtgtgaagcttcctgtgggacaaaaagaccatgatgctttcagcagaggccaggtggcctgaaaaggggtgcaagtggacgagattatggatgtggggtagtggaggagagagatcaagggaaaggtggattgagacgcccagatcataggcctgggactgttggataggcactggtgttattaacatcagatttctaaaatacacttgaaggtactaaaagtctccaaatattagtaaacaagtcagtggcaaacacaacaaatcactcctacactgtagaactgcctcattgccatgagccacatctataccaatcctcaggcattgaaaattgtcatcactgaaaaaagggtgcgaggggaggagccaagatggccaaataggaacagctccagtctacagctcccagcgtgagcgacgcagaagacaggtgatttctgcttttccatctgaggtaccgggttcatctcactagggagtgccagacagtgggcgcaggtcagtgggtgcacgcaccatgtgcgarccgaagcagggcgaggcattgcctcactagggaagc

SEQ ID NO: 15974 - DNA, 638 bp, Homo sapiens
aaagacagaaacagaggtctttgagccacatgcaggagaacagagacaattccccactgcctctgctcmctcatcctcatctggtccctcaggcaaggagaaggctttcaacattaacttctggctttgcacaatcacgctagtgacattttggggtgaaatccatgggcagcatctcccgtcactgagctgggcccaggggtctcctgggcacccgccttccactcttggccttgctccatttcttgacattgtttggctttgtttggcctgagcttcaggctgtccctcatcattcccaggtgctctttagcctggcaccgagagtgccatactcgggtgagagcttccacatctggctacttatttccattttttggctttggaggatggccatgttactcttctagaggccagaatgtcagagtgggtagaggggagcacagagagttttatggctgggaaatacacatgcattgtcttttgctgccctctaagagcaaaatttctcataatccatgagggtctgaggaaacgagaactttggagatatatatagcaaaacccttcaatatacacattcaataaaaatgtgtatatatctatatacactttttttctgctagaaatatattgga

SEQ ID NO: 15975 - DNA, 638 bp, Homo sapiens
aaagacagaaacagaggtctttgagccacatgcaggagaacagagacaattccccactgcctctgctccctcatcctcatctggtccctcaggcaaggagaaggctttcaacattaacttctggctttgcacaatcacgctagtgacattttggggtgaaatccatgggcagcatctcccgtcactgagctgggcccaggggtctcctgggcacccgccttccactcttggccttgctccatttcttgacattgtttggctttgtttggcctgagcttcaggctgtccctcatcattcccaggtgctctttagcctggcaccgagagtgccatactcgggtgagagcttccacatctggctacttatttccattttttggctttggaggayggccatgttactcttctagaggccagaatgtcagagtgggtagaggggagcacagagagttttatggctgggaaatacacatgcattgtcttttgctgccctctaagagcaaaatttctcataatccatgagggtctgaggaaacgagaactttggagatatatatagcaaaacccttcaatatacacattcaataaaaatgtgtatatatctatatacactttttttctgctagaaatatattgga

SEQ ID NO: 15976 - DNA, 558 bp, Homo sapiens
accattgttaatgccaactttcttatagtagaattaatgacctcttaatgctcgcctccctatctggaaaatgagctctttgaagagaaaaatgatgtcttattaattttatattcattcctctcttagtaccaagcacagaatcgggcactcaacagatgtttgttgaatgaataaaatgactgtttcccattcctcacctgtctgtgagggctgaagatgggaatgtttagggcagtgtttgctccttggaatttctgataagaacgaattcgttagtcaatccttattcactcggctgggagcggattgaatacacagtggagaagcttggagaataacttgcttgcacctcctggatttgatagcaaggcatttttttggaccataattagaaccatggaaacacgcactcaaaccctgggctgtgccttgacaaacacttgtactggaacgctgaatcagaggcctggctgggtgctttaaatttactacartgtaattttttggcattacccttttcgtttggttccgctaatgaaaatgaaatatgtaatt

SEQ ID NO: 15977 - DNA, 537 bp, Homo sapiens
tgtgtgaaaagaagcttgaaatctaatgatctgaactgggacccagttcaacagcagcttaggtatttatgaagcttcattaggtgtttaatatctgtgagtatctgtaggggaactatttgctatacattgctgtttggagtaaataagaaaacaaataaaagtgctttgtaaattgaaagactccatcattttcataaccttcatggttaacatatcctaagagccaaactcccagaaattgtgtgattttcctcaccgggctgaagcayggcttttagctaagaagactgcctgggttcacattccgcctgttactccctagctccaccccttcaggacctgagttagccctgtgagcctctgtttttcctcctaacagacggacataacaaaccatccctacttcttctggggttgttgccaagattaaataatttaaataaactagcaaaaactgtatagtgcctggtataaatctcattacctacccatgctggttatcattattagtacgactatattcttgaatttcag

SEQ ID NO: 15978 - DNA, 556 bp, Homo sapiens
acaggtcaagggtgaggatataataagtgataggtttttaatggtccccataaagtttagttaaaattccacggtttgtccaggtcactcatgcgtagttagtgataccaaggaaggagtttgttgaagagtctttttcaagtttcagaagacttgttcatgtttgggcccccacagaactyggtttcttattgaggactttgtcaacttataaagagctattataatctcagaataatttgctcccattgtctgcgatattcagttaaacctagaaataatcccaattttcattttgtaatgaatctaggataagcctacatagtctttagtttgtcatcagagagtggctttccctccttaggtaggttatttcctaatgcagagtatttcagcaaaattgtaatgtatattttgaaactttatgtcactttctgccattgctaagagcaagcatagatgtttttaaagattttcttattctctaaataaagtaggaaatattctacatattgtatcaaaactgaatcacagcagaaatctatcttttaaatct

SEQ ID NO: 15979 - DNA, 528 bp, Homo sapiens
tgggctgcctttctacatttctaacaagatcccaggtgatgctgatgctgctggatggtagwtcacactttataaagcaaggggctagactctagatatgcactttttattaaatagtacagcagcctgtagccacatgtggctattaatctttgaaatgtgggtagtctgaattgtgatgttctgcaaatataaaatataccacagatttctaagactgagcatggaaaagaaaatctccgtaattttttatattgattgtatactgcagtgataatattttggatgtatcgggttaaataaaattgactgatttcacctttttcctattttaaaagtggctactaagaaaattttaaattacttacatgattgacatggtatttttatttggcagcgctgctctaagctgttaatgaaaaatattgttggtgagctctgcttaggtaatatataggacacgagcagagaggaggcacgtgaacagttctggcgggagtaggcttcattgaggccgtgatgctttta

SEQ ID NO: 15980 - DNA, 1526 bp, Homo sapiens
ttatgcagcagaagattcttcactcctgaactataaggtctctgatggaaaagttactaggacagcatacaatttgtataaaacccattgcggccttcctggcatacctttcagtctctcatttccctgggttccattagatcccaggcttttattaccatatcatatccatcatggaagaataccttgtacttttccacctaaatcactggataccacaacaaaagtttggtggaaccagaatgcctatacacagccacaggattccagtttccatagaaaccaaaagcagttgcttgcctgctcagcaagttgaaactgaaggagtgcttccaaataaaagaaaaataacttgaggactgtaccatgggaaattaaatttaaaaaacagttataacaatgtttagtttagaaaagtttggtggttcacgcctgtaatcccagcactttgggaggctgaggtgggtggctacctgaggtcaggagtttgagaccagcctggccaacatggtgaaactctatccctactaaaaatgcaaaaattagccgggagtggtgacgcacgtctgtaatcccggctactcgggaggctgaggcaggagaatcggttgaaaccaggaggcggargttgcagtgagctgagattgcaccactgcactccagcctgtgcgacagagcaggacttcgcctcaaaaaaaaaaaaaaaaaaaaaaaggaaagaaagaaaagtttgaggggaaatatgacaaaaagatcagtaggcaagaggaacgtttttcccgtagtatcctcaagagttcttagagtgtcttgaaaaaatatgttggctacatgaaggaatgcttccactgaaacataatattatacttttcacccttaaagtttgaggaggatcttgataagttttaacattatcatggcagggaaatagataaaaaagaaaactatttttacattaaaccttttctaaagattttaaatagaaaaataatttgctgctttttttaacaagaacatttaccattatgtattatgttagttatattgccagcctgttgagactgactcaaaatgttaaatattgccactgttgaagataattacgagcattgcaaaccttgtttctgacccatttttacagtttttatgtactcctctaaaatgatgaatgttacaagttaaaattacataacttagttaagaaagcagtggaagggtttcagaagattgactgcaattttgaaagacgttttactgtgggtgaaatgctatcaaacatcattacatgctacagagtaacctttcaagaaaggaaaagtcaattgatgaggcaaactttacagttttcttttaagaaatcgctacagccaccacgacctttagcaacaccatcctgatctataagcagccatcagcattgagggaagatcttccactagctaagaccttccactatgacttgctgaaggctcaggtgatcattagcatttttttagcaataaaatatttttaaattaagatacatg

SEQ ID NO: 15981 - DNA, 573 bp, Homo sapiens
ttttatgaacaatagtcaaaatccttccaatattatactttggtgaatttacatgggatcccatataaatagatggttatattcactttataagtcattcgcatcaaaaatatttcttgtatcccaacctaaaatgaagcatagagttacaggaaaaatagagttgacaacttctttatttgttccctttgctgtctctagarcagagctccacaataaatttttccataactgaattataataatgtatttgcattcttgtcccttccacttttctgcacctcattgaggaccaactcagggtctgattcaccttcatgtatcgagcacttggacctgagtgtctcagtgcctgagacaataaatggtttgtgaacacataaataaaaacatcttgagaaacaaaagaggtaaagagagaactacagaaagctcacacatggtgcaattggggaactactgtaaggtgagtagtaatgtatgagatgatggtctgcatttttgagcatgagggttgggagaatttcaggtaagaaaaaaaataaacatttagggttaaaatggtctatgcag

SEQ ID NO: 15982 - DNA, 573 bp, Homo sapiens
ttttatgaacaatagtcaaaatccttccaatattatactttggtgaatttacatgggatcccatataaatagatggttatattcactttataagtcattcgcatcaaaaatatttcttgtatcccaacctaaaatgaagcatagagttacaggaaaaatagagttgacaacttctttatttgttccctttgctgtctctagagcagagctccacaataaatttttccataactgaattataataatgtatttgcattcttgtcccttccacttttctgcacctcattgaggaccaactcagggtctgattcaccttcatgtatcgagcacttggacctgagtgtctcagtgcctgagacaataaatggtttgtgaacacataaataaaaacatcttgagaaacaaaagaggtaaagagagaactacagaaagctcacacatggtgcaattggggaactactgtaaggtgagtagtaatgtatgagatgatggtctgcatttttgagcatgagggttgggrgaatttcaggtaagaaaaaaaataaacatttagggttaaaatggtctatgcag

SEQ ID NO: 15983 - DNA, 535 bp, Homo sapiens
gtaatacatgcaaataaattcctttagagtttagtactgaagtagagtttggcaarctaacattatgtaagggagtcgggaaggaaggtgtcagaagagaggatgagtagaagtttgttatggagaagggttacaagattctaggatgagcaatctaatttcatattacaaggccaggtgcagtggctatgcctgtaattctagcactttgggaggccaaggcaggcagattacctgaagtcaggagttcgagagcagcctggccaacatggtgagaccccatctctactaaaaatataaaaattaactgggtttggtggtgggcaccagtaatcctagctacttgggaggctgaggcatgagaattgcttgaacccaggaggtggaggttgcagtgagccaagactgcgccatagcactccagcctgggcaacaagagtgaaactccatctcaaaagtagtaataatgataataatttcaaattactagagatttgaagaagcagagtgatatcatttggctatgtccccaccc

SEQ ID NO: 15984 - DNA, 535 bp, Homo sapiens
gtaatacatgcaaataaattcctttagagtttagtactgaagtagagtttggcaaactaacattatgtaagggagtcgggaaggaaggtgtcagaagagaggatgagtagaagtttgttatggagaagggttacaagattctaggatgagcaatctaatttcatattacaaggccaggtgcagtggctatgcctgtaattctagcactttgggaggccaaggcaggcagattacctgaagtcaggagttcgagagcagcctggccaacatggtgagaccccatctctactaaaaatataaaaattaactgggtttggtggtgggcaccagtaatcctagctacttgggaggctgaggcatgagaattgcttgaacccaggaggtggaggttgcagtgagccaagactgcrccatagcactccagcctgggcaacaagagtgaaactccatctcaaaagtagtaataatgataataatttcaaattactagagatttgaagaagcagagtgatatcatttggctatgtccccaccc

SEQ ID NO: 15985 - DNA, 538 bp, Homo sapiens
tctctcttatctcatccttccttcactctcatccaagtttatctttatttccaaagtcagaagtgaaagttgatcccatatctactagcaaggtggccctttcattaatagattttcactactctgaatgtcaacctaccttccagaaattagagtgacattttattaaygccatatgtaatttttttagcacctattacatggcaagctctgtcatagctggcagtgggggaagcaatggccaagacaagcaagattcctgccttcggagaacctacgttcatgtgaaggaagacagacgatatacatataaagataatgatctcagattctccgtgttgtaaaaggcaataaaacaggaagatttggtagtcagtgatgcaggttttagaaaaggcaatctacagaaaggaggcatttcagctgacatctgaatgagtgaaagatctaggtatttgaagggcagaggaaagtgttcaaaacagagaaagcagaaaatacacaggcctaagggtggatgagctggacagtgcactga

SEQ ID NO: 15986 - DNA, 540 bp, Homo sapiens
aggtttctgttcctcagaattttcttcataatggccatgttaagcccttcttaacctgttgctagygggtctgttgcatttcaggttgcttatactattaaaagaccagacccttatattataccttgataaataattttctcccagtgattacttatttaccttattttagtttttcctaaatctgctaaaaacttaatgagcttttcattcaagcctgatatattgaccctatttttagtgatggttttaaaccacttctttgcttttctcaaggtaaccttggtgatattgttacatttgttcattatcattttttatgcagcaactatctctattgatttgtctgtggcctttgattcgatgaatcacaacatattgctatttgagtgtccctcaatttggcaaagtttaactacagtggaatggttctcaggctacattagtgaataaaccccagtcgttttgtttaatggtgttgaatctgaggtgaaaatgttacattcaaagttacctccggagctaattatggggcttttt

SEQ ID NO: 15987 - DNA, 540 bp, Homo sapiens
aggtttctgttcctcagaattttcttcataatggccatgttaagcccttcttaacctgttgctagcgggtctgttgcatttcaggttgcttatactattaaaagaccagacccttatattataccttgataaataattttctcccagtgattacttatttaccttattttagtttttcctaaatctgctaaaaacttaatgagcttttcattcaagcctgatatattgaccctatttttagtgatggttttaaaccacttctttgcttttctcaaggtaaccttggtgatattgttacatttgttcattatcattttttatgcagcaactatctctattgatttgtctgtggcctttgattcgatgaatcacaacatrttgctatttgagtgtccctcaatttggcaaagtttaactacagtggaatggttctcaggctacattagtgaataaaccccagtcgttttgtttaatggtgttgaatctgaggtgaaaatgttacattcaaagttacctccggagctaattatggggcttttt

SEQ ID NO: 15988 - DNA, 535 bp, Homo sapiens
tggaagaaataggctgctgcctgccacctactggctattgtgaatagtgctgcaacaaacatgcacgtttaggtactttttttttttttttttgagacggagtctcgctctgtcgcccagcctggagtgcagtggcacatctcagctcactgcaagctccacctcccgggttcatgccattctcctgcctcggcctcccaagtagctgggactataggcacccagccactaagcctggctaattctttgtattttttagwagagacagtttcaccatgttagccaggatggtcttgatctcctgacctcatgatctgcccgcctcggcctcccaaagtactgggattacagacgtgagcccccacacctggccatatatgtacttttttatacacctgttttgaattttcaataactagtattggaactgctgggttgaatcatacatttttaaagaaaggaatactgaacccagtgatttctacagttggtcaatagtagtaacctggtttcgtctcgtttgtttgatttaaag

SEQ ID NO: 15989 - DNA, 508 bp, Homo sapiens
acaaagatagtacattctagtagcaactttgattttacttattttcaaagaatatgcattctttgtccttaaagctaaycactcccaacacacatacccgttccttgcctttacaagagaaaaaggaaagaaaacaaaacagtcatcaagacagctagtggctgaactatactaagagtccttactccagcccaaggctgttccaatcaagttgtgctgtgccctgcaggatcaaaataatggtaatcctaaagttaagtacatattacaagttagtagaaattacacaatttacctatctgctcttagataaattctgaccaaatggtaaagggatagaaaagcaaggttaaagtctttagactcaaacaaaatcaagtctgtaccccattaatacttaggagctacatgacctaagcaagtcacattaaaattatttgggcctatttcctcatttgaaaaatggagtgggaagaggacggtattttaaggattagagcactgtata

SEQ ID NO: 15990 - DNA, 536 bp, Homo sapiens
aagtacaattattatttgtcagaaaaaataagtctaatgtattgccacacttagggttttcttttctttacttgttgccagaaaattgcttctgatgccacctagttccacattctcaccagagacaaatgaccagccactgtcctcccttccccttcctcttggagctctttgggagttactgagaggcaagacaccgaggaagagagcacctcccactgaagctgggcgtgaatttataagggttcctcttcctcttcccttaccccaatctaagcattgaaagcatggcggatctaggaaatgcatttgaatacagttcctaactgtggcactcatggaatcctcccatttggctctccttcaaaaaacctctacaaaacagaacaatttgggagtaattagaaaatgcagattaatattcatagaaatattttcaacacttctgtttattccctgtggatggacatgytttgtctgattttgatacatatgttcatctttcactaggtgactttagagaaagagaaaaaaag

SEQ ID NO: 15991 - DNA, 1374 bp, Homo sapiens
gaggctgaggagggaggatctcttgagcctgaatggtcgaggctgcagtagccatgatcgcaccactgcactccagcctggagagacagccagaccctgtttgaaaaaaaaaaaaaaagaagaagaaggaaaaagaaaaagaaaaagaaaaatatctggattcaggttcaaatgtcggccaagagaaaggaggacagtaagacctttcaaaaccttcatttctaaaacaggactattaatcctaaatcaaaggatgctggggtgatggagcaggttttgagtagttttgagtggagagcagctagcattgagccaagcccctagaacctgctcaagagatgagagtgtggctagtccctccctgctcgcttgcgacccccaagaccatcactgaaatacacagggaggtgagggcctcaagtacctgagacgctaagagtaagcacagagtgggtgaggagcctctgcctaggggtcaagtcagtgtcccgttgggttgcagaagctttttattgaataaagttccagggctccagtgatctgtcaatgctgcacctgcagcctgaggaagtaggaaaagctaggtgtccgcttattcagaggggcaggatagcccacccaacgcttgaaacgcatgtgcctttccagcgcagttggatctagctttggaaacttggaagactgatatgaagatggtcccaggctgctgcagtccttggcactagagggcaggccagcaggttccctgtctgcccgggtcaactgaacagggaccttggcaccgactgcagagtggctgctgtctacttaaacacacacacacatgcgcgcccgcacacacacacactctccaaagggaagcttaatatataaaaaatatagaattcatagaatcaaagtaaaattgaattcctcaggcagtttaactctttccccttgggcaggaaaaggttcagttttgacaaaacctcgaatacgcctccgctgagacctgctgtcacagctctgggtttgagcatccacagttcaggatggagggagaccccagagatagggccagacaggcctccgcccctccctctggcaggtccttcatctccccarccccagcttcctccaaggtgacatgtaaagacagcactgtccagttcctcctgtcatcatggagataacagataacatgcagcgtcctggaagacactccgtggtcaataactagcagcaatgactctgattatcatccacatttgcttcctggggatacagaaatatatcctccctggagcctcggttctcctggactcagagagggacatgagctgctgctctgagctgttcctggtgcaagagctcccaggctgcacgcgccaggca

SEQ ID NO: 15992 - DNA, 1374 bp, Homo sapiens
gaggctgaggagggaggatctcttgagcctgaatggtcgaggctgcagtagccatgatcgcaccactgcactccagcctggagagacagccagaccctgtttgaaaaaaaaaaaaaaagaagaagaaggaaaaagaaaaagaaaaagaaaaatatctggattcaggttcaaatgtcggccaagagaaaggaggacagtaagacctttcaaaaccttcatttctaaaacaggactattaatcctaaatcaaaggatgctggggtgatggagcaggttttgagtagttttgagtggagagcagctagcattgagccaagcccctagaacctgctcaagagatgagagtgtggctagtccctccctgctcgcttgcgacccccaagaccatcactgaaatacacagggaggtgagggcctcaagtacctgagacgctaagagtaagcacagagtgggtgaggagcctctgcctaggggtcaagtcagtgtcccgttgggttgcagaagctttttattgaataaagttccagggctccagtgatctgtcaatgctgcacctgcagcctgaggaagtaggaaaagctaggtgtccgcttattcagaggggcaggatagcccacccaacgcttgaaacgcatgtgcctttccagcgcagttggatctagctttggaaacttggaagactgatatgaagatggtcccaggctgctgcagtccttggcactagagggcaggccagcaggttccctgtctgcccgggtcaactgaacagggaccttggcaccgactgcagagtggctgctgtctacttaaacacacacacacatgcgcgcccgcacacacacacactctccaaagggaagcttaatatataaaaaatatagaattcatagaatcaaagtaaaattgaattcctcaggcagtttaactctttccccttgggcaggaaaaggttcagttttgacaaaacctcgaatacgcctccgctgagacctgctgtcacagctctgggtttgagcatccacagttcaggatggagggagaccccagagatagggccagacaggcctccgcccctccctctggcaggtccttcatctccccaaccccagcttcctccaaggtgacatgtaaagacagcactgtccagttccycctgtcatcatggagataacagataacatgcagcgtcctggaagacactccgtggtcaataactagcagcaatgactctgattatcatccacatttgcttcctggggatacagaaatatatcctccctggagcctcggttctcctggactcagagagggacatgagctgctgctctgagctgttcctggtgcaagagctcccaggctgcacgcgccaggca

SEQ ID NO: 15993 - DNA, 535 bp, Homo sapiens
tctgagaaatggtcgttccctgctaggcacatgggctggggtctgtggtcctgggtgcagagggagggcagggaggccactgagggtatcctatggggctgggagctcacctgtccctgggtatctgagctcactcaatttttgctggaaataaaaaaaaaaagagaaataggaggtcatgttctccagaaaccctcattcttccaactcaagatgctgggtgtagacggcagctgtcactgtttgctgaaggagctgcatttagggaagaggagagaatggtggttcttttgtgatccatcacgtgcccaccctctaagaaccctcaaatcatcacatctccagcccaggccaaggattttgtctcagtcactaggaaaatccttagagaaagcccaagatcccaggtctyttgtgggaccaaaatatcactgatgggacagatgtgggcccagttgcgcgggagagaggaacgcttccaacttgacttttcatcactagaacaacttctatgatgtgcatctttcatacttcc

SEQ ID NO: 15994 - DNA, 1357 bp, Homo sapiens
tatgattgtatgaccttgggaatacactaaaaaagccactgaattgcatactgttaaaaggtgaatttttttggtatgtgaattatatctactaaaaagataaaatttaaaaaaataaaacacacatccatggctctggatggagattgtccaggttcaaatcccagccctaccgcttctcagcttttctaagcctaagtttctacatgtataaaatgggagaaatgacaaatacctcacarggaaattagaggactaaataatgctacgacttttaggtacaaaggccaatttatagcgtgttttaaaaatattcttacgagacccttgaataaaacaatattagataccaaccagttctttgatttgagaagagccactcctggtctctaagcttaagtcattttgtctgcagaatgaaggggactggttccctacatgagcatcccataaattttcctattcttatgtaatccccacaatagttctataaaatacgtagaacattactgattttagagatgaagaaacatcagtaaagggcaaggaagttgctgagccactaagtggcagaggtgagattcgagaaatgtcagaatggaacctcacactcttgagtgacacaccactgcctcctgacccacatattaataacccagcatatgtacgaactgcttactgacttcttactatgttgcagaaactcagggacagtgccctcaagaaagtcattacctggccacttgcagtggctcatgcctgtaatcgcagtactttgggaggctaaggtgggcagattacttgaggcaaggagtttgagaccagcctgggcaacatggtgaaaccctgcctctaccaaaagtacaaaaattagccaggtgtggtggtgagcatctgcaatcccagctacttgggaggctgaggcaggagaatcacttgaaccagggaggcggaggttgcagtgagctgagctcctgccactgtactccagcctgagcaacaaagtgagtgagacatcatcaaaaagaaaaaaaaaaaaagaaaaagaaaagaaaagaaagaaagaaaagaaagcaagccattacccaagatgggagaagaacaacagtgcccagggattaaggaaattaaggaacaggtgtacacagtaaaagtataaaagtagatatttttaccatataattcagaaccttctgtctttagaaggggactttcctatcagggaaaatccagagtaactgggctgagaaaaaacattatgtagatgaacttttgagagtttctaagaaaataattaagagactgagtgctgtggctcacacttacgtataatcccagcactttggtaggccaaggt

SEQ ID NO: 15995 - DNA, 571 bp, Homo sapiens
tgataagagagatgataaaaagcagacccacttgatttcagatttccttaacatttacaaatatgttagtcttgtaattacaatcctgtttttaatattatagtctcatgttattgtctaatgatatttaaattcccttgtgcttaactctgtctcatttagttttattttctattattagatcacattgtgcattaccctctcgtgtyttaaagaactcattacacttttattctttaagaaaattccgtagctctatttcaattatgttgcattctattggtaatctatacaagtaattaatgctaaaataaataatctcatattcataaaaaagtgtcatatttctgagtagttgatttgccctatgcatagtccaatcatgttgagaagaaaaaaggttgagatataaatagcttataaagcacattttcccagctcatctataaagtgtttctagtgggaaaaagattccttatgtgtgactagttgaaaaggaacaaatgtaaatgattacactcaaaataaatgtattttctactgttctgtgcctccaattttttctgaaaaa

SEQ ID NO: 15996 - DNA, 571 bp, Homo sapiens
tgataagagagatgataaaaagcagacccacttgatttcagatttccttaacatttacaaatatgttagtcttgtaattacaatcctgtttttaatattatagtctcatgttattgtctaatgatatttaaattcccttgtgcttaactctgtctcatttagttttattttctattattagatcacattgtgcattaccctctcgtgtcttaaagaactcattacacttttattctttaagaaaattccgtagctctatttcaattatgttgcattctattggtaatctatacaagtaattaatgctaaaataaataatctcatattcataaaaaagtgtcatatttctgagtagttgatttgccctatgcatagtccaatcaygttgagaagaaaaaaggttgagatataaatagcttataaagcacattttcccagctcatctataaagtgtttctagtgggaaaaagattccttatgtgtgactagttgaaaaggaacaaatgtaaatgattacactcaaaataaatgtattttctactgttctgtgcctccaattttttctgaaaaa

SEQ ID NO: 15997 - DNA, 571 bp, Homo sapiens
ctcatccacagggaatagcaacccagccccagccccagagcggcctgagtgggaatcacgatcgctgtgcagaatgttggtggcaccaagacaggcttcgaggacaagtctaggggccagatgacctggctgcaggtcagtgaggaagcaggcagtgctggaaatcatgtcccaacacaacaaatatcatccgtttaagctaagtgaatgcctgaagccaacacagagcaactttcatcatccagagaagggtggagcaaagaacgtgtgtgcgggtgtgcacctgccttcaggtcctcgtattctctcctattctgctcccccagggggtggygaggatgtggggagggccagaggacagcaaatttctttgatcaaactaaaagactccctcctcaagtgattcccaggatctcaccctcctcaaatgccatctcaagtgtccccagaccccagccatttggaggtgtgggtgacaacccaccttccacttgaatctcagggccagggatggtccctgctaggtaaaggttttctgagtggagaaaagaagagtgggatctgaaagacg

SEQ ID NO: 15998 - DNA, 830 bp, Homo sapiens
cttaaacaaatttacaaaagcaaaacaaccccattaaaaatttggcaaaggatatgaacagacacttttcaagagacaaatatttagagtggaattaattcagaattcatttagccacatgtaagatgttctgttgaaggtctacttatccattgtgtttgtaactgctattcaaaaatgtagattatataattattagaacaaaacaaaagctaaccaaatattagaaaggagtcagatgttacccatttggaggctgtaaatattttttatgtttctgtataactaagtcttcctgaaaaattttagtacaatttgagaacagtgctaaaagacaaggcttagaacttaattaatgacttcatagccagtgagaacaccaaggagatttactactctagaggtatatgtttatattttcaaagcagcctgagatccctgggaccctatagatattcctgattggtaaagctggagactctagtcttatctccttcccttgaagagatttatttacattttaaagtataatattttaggatccttctcattatatttctatgaagactttctcrgaaggggaaagtggggacagcagtttcctctcattcctaataaatgcacagttcctacactctaataccaacttggtatattaggatgacatctcattttcattacatcatcctggaaggaataggagattggcaccctgacatggtggcacaggaaaactggtgcattatttgctgtgagcaaataatcatctgctctgtttcagaaaacttgcattggcatttagtataatattaataaatttttttcagaaa

SEQ ID NO: 15999 - DNA, 535 bp, Homo sapiens
tttctcccttccatygttagggttgtttatgacatgcattttagtttaatatatatgatactccagatatcattacagttgtttctggtcatagttcatattaatatattaggtggaattttatataattaccaatattctactattttttcctatatatatatatcaatttaatatggttcaacacaagatatcttacttaattctcagtgttttttttttcttttcttgtgcatttcaaggtttatgtttgatattattgcgtttcttcctgaagcactcgctttatttattttaatcaaggtttctggcaacaaatttctctttattttatctttacatttaaatatttttccctggatattgtaggggtggaaaaacctcatgtccattctcctaggatcctagctgtgtccaataattaaattaacatagcatagattaataggagaaaagtataatatgtttgacatggcacagggacccttataaagaaataaaggccctaaagaagcagttagggtgagttactaac

SEQ ID NO: 16000 - DNA, 519 bp, Homo sapiens
ggatcatatccaatactcatgcttagaggccgcatcagagatcagtatctagtgagcaacatgtacggtgaaaatctgaaaggataaaaaatgaagtgcaccagggaggcagcatgctatggtagaaaagtgcgcctctagagacctagaaagctgattgtttatcccatctttgccacttgctggttgtgraagttaggcaaagtctttaatctccatcaatctcagcttccttgtctgaaaaggatggagaaaaatgcctgtcacatagtgctttgtgtaaagcacataatatagtgctggggacaaatcaggtgctcaattggcatttactattagtattggtggcagttgtagcattgtaacttctatttttttctctactccccttgggccaaaatatatagtgttacttacagtatgcttgtataaaatattcttacgatgtgtacaatctgttaacaagtctctgcattacgggtcaagcagaatcaaaaagtttcagagcaagagaaaatc

SEQ ID NO: 16001 - DNA, 519 bp, Homo sapiens
ggatcatatccaatactcatgcttagaggccgcatcagagatcagtatctagtgagcaacatgtacggtgaaaatctgaaaggataaaaaatgaagtgcaccagggaggcagcatgctatggtagaaaagtgcgcctctagagacctagaaagctgattgtttatcccatctttgccacttgctggttgtgaaagttaggcaaagtctttaatctccatcaatctcagcttccttgtctgaaaaggatggagaaaaatgcctgtcacatagtgctttgtgtaaagcacataatatagtgctggggacaaatcaggtgctcaattggcatttactattagtattggtggcagttgtagcattgtaacttctattwttttctctactccccttgggccaaaatatatagtgttacttacagtatgcttgtataaaatattcttacgatgtgtacaatctgttaacaagtctctgcattacgggtcaagcagaatcaaaaagtttcagagcaagagaaaatc

SEQ ID NO: 16002 - DNA, 572 bp, Homo sapiens
caggcaaagagagagaacttgtgcagggcaactcccatgtttaaaaccatcagatctcatgagacttattcattatcatgagaacagcatggraaagacctgtccccattattcaattaccttccaccaggtccttcaagatgagacttcaagatgagaattcaagatgagatttggcgggggacatagccaaaccatatcagtgaggttacagtctgattacatatctggttaggttgtagttcattatgtatggagaaacttttaggccaaacttaaaatatataaggcagatttaggctaaacttaatttaacaaactaaatttaagtttgttaagctaaattaagtttaagttgttaaacttaatttaacaaactaaaccccaaataagctagtaagttggtttaatttgttagttttaagttcctctgcttcccagaaaaaaaaaggttctttccttcctcaggattaatcccaattcctaaaatataaatctcaaacctttattttccaccgaattttctgcctccaaatcatgtgggcttaaattgttgttatgactttgttcaa

SEQ ID NO: 16003 - DNA, 524 bp, Homo sapiens
agaacaaatgaagtactattttcacttttcacaaacgtacacttccctattatctaaagcacttgttgacataatatacctaagcttatttattatattataactgtcacatttatcttgcaatgtggactaattgcacatgtaattgtctttaggaatcaaagccctgtctaacagagacaygcacacacatatgcacgtgatatatggtttttcaggtatgttaaacaccgtgttcttggtgtacaaagaagaaaaagactagccctgagagtttaagtatagtggagacaacagaaaagttatatccaataaaactaatccagtaccatggtaacataaacaagtaagagatggatatgtgattcaataaggaaactatgggatgcaatgaaagaacatacaagaggaaactaccttggttagacactcaaagaagacactctgatagagatgatatggggacctgaggtatgagtagaagttattcaagtgaggatttggaggagaaatattccacaaaa

SEQ ID NO: 16004 - DNA, 219 bp, Homo sapiens
tttccaaacagacatcggctgtttctggtttcatcactgacggctggagtttcaggctctctctgaatcagtcctatggcccasctcatccagcggccatgtgtctaaaacaagttgcaacagacaagtggtgtgtgtgtgagagagagagagtgtgtgggtgtgtgagtgtaagagtgtgtgtgagagtattagcgtgtgggtgtgagtgtgagagtg

SEQ ID NO: 16005 - DNA, 565 bp, Homo sapiens
tggtgaaamcccgtccttccaaaaaaaaaaaaaaaaaaaaaaaagcaaaaattagctgagctacaggtggtgcatgcctgtagtcctagctacttgggaggctggggtgggaggatcacgagcctgggaggccaaggctgtaataagcagagatcatgacatgcactccagtctgggggacagagtgagaccctgtttcaaaaaaaaaatttttttaattaaaaaagttataataatcttacccaaggaaaggaacacaagatgatatgcaaggaattatgtagatttatatttcctatgttaacagaaaatcctatttttatgattgataatacccaaatgagttagtaaacagcaactttttttatacttttgctccaagtacctaaatagtaaataacaacattacattcttcagtttataagactttacaatttgtcttgcttctatagatacgactgaaggtgctctttgagtctctagagagaaacgtgttttaagtttacctattttaaggcctgattagtatttgcgtcaaatctgccaatatatttacaagctgac

SEQ ID NO: 16006 - DNA, 548 bp, Homo sapiens
cagccaacaaaatattttctttgaaatttggcaagaaaacagctctacaaagattgaactgtaaagaggagaaaacatgccaagtctagtacagatacagtcagagaaaacaatttacacaggataaatacggtaaagattcctgaaaaaatactctaaaagagagataatttggtttcttctgagttcctcactttttacttcactctacggaagcaaaggaacaggtaacagttcctaaggtcagtggttctcgtgcttcagtgtggatcagaatcacctggagggcttttagatcacaaaggtctggggtggggcttgataatttgcattcccaacaagttccaacaagtgaygctgatcatcgtgatttggagaccgcacttagaggaccagtgtactctcgaactccaggaaagttcaaagctttcataacaatccgtttctcttacacaaggaaaacaaaaagtgccatctacctttctcaaaatgacaacagtatctttcccccttaaaaaagaaaacttgaaatagaagccaaagcatta

SEQ ID NO: 16007 - DNA, 553 bp, Homo sapiens
aatctatgggtcatcaattttcaacctgtgttctacaggataaagtccagctttcttatcaggacatgtggagcccttagacatgccagctccactgccttgttgtctagcacttggcactagccgtttcacactccttgcaggtcattctgcatcacggacactttgtgtttgcctgtacaaaatgcagcctctttctagaatgtcctcctcctcctcctrggctaaggcacggcctcaagatggagcttcagaaggagccaaaccagcaaggacatgattgcaacagtggacaagagcccatcttcctggaaagaccagctttcaacagtgaaactgttcagaagctataagaaactggtcattaaaaatcaatacctggctgggtgcggtggctcacgcctgtaatcccagcactttgggaagctgaggtgggcagatcacctgaggttgggagttcgagaccagcctgaccaacaaggataaaccccgtctctactaaaaatacaaaaattagccgggcgtggtggtgcatgcctgtaatcctagttac

SEQ ID NO: 16008 - DNA, 525 bp, Homo sapiens
tattgtccacsctaggaggatcaacacctccccatccttccccagtccatagggagcaatatctggaaataacctgctgggaaagctctgtacctcaagctccctgaacagaaggtgggaagcctagcacctcacctggttcttgtccagaccatctctctgtgggttgtgcttccagtatcccttgcatcaactaacatggttcagatgcagctattctacatccacattatatctggaattacagccacctagaagtctttttcctgctgcttgccccatgtttagaatgcccaggagactgaagccagctagcaatggatcgtggcaaaaggaaactgcatagtggctaagaacatcccctgtgaaaccaagtggcttggccttggatcatgagtcccctcttctctgactgtgaaaccctgggcaagttaatgcccctcctttccaattttcccatcaataaagtgcgacacttgtagtacctactccacaagactgttgggaggattcagtcagataatc

SEQ ID NO: 16009 - DNA, 525 bp, Homo sapiens
tattgtccacgctaggaggatcaacwcctccccatccttccccagtccatagggagcaatatctggaaataacctgctgggaaagctctgtacctcaagctccctgaacagaaggtgggaagcctagcacctcacctggttcttgtccagaccatctctctgtgggttgtgcttccagtatcccttgcatcaactaacatggttcagatgcagctattctacatccacattatatctggaattacagccacctagaagtctttttcctgctgcttgccccatgtttagaatgcccaggagactgaagccagctagcaatggatcgtggcaaaaggaaactgcatagtggctaagaacatcccctgtgaaaccaagtggcttggccttggatcatgagtcccctcttctctgactgtgaaaccctgggcaagttaatgcccctcctttccaattttcccatcaataaagtgcgacacttgtagtacctactccacaagactgttgggaggattcagtcagataatc

SEQ ID NO: 16010 - DNA, 525 bp, Homo sapiens
tattgtccacgctaggaggatcaacacctccccatccttccccagtccatagggagcaatatctggaaataacctgctgggaaagctctgtacctcaarctccctgaacagaaggtgggaagcctagcacctcacctggttcttgtccagaccatctctctgtgggttgtgcttccagtatcccttgcatcaactaacatggttcagatgcagctattctacatccacattatatctggaattacagccacctagaagtctttttcctgctgcttgccccatgtttagaatgcccaggagactgaagccagctagcaatggatcgtggcaaaaggaaactgcatagtggctaagaacatcccctgtgaaaccaagtggcttggccttggatcatgagtcccctcttctctgactgtgaaaccctgggcaagttaatgcccctcctttccaattttcccatcaataaagtgcgacacttgtagtacctactccacaagactgttgggaggattcagtcagataatc

SEQ ID NO: 16011 - DNA, 525 bp, Homo sapiens
tgatgtcccactgcccccgctctgagctagtaatgaccttgttcaaaagataaccctgatgcaatggacacagaaaggagttagcatctggagacttgacttgaggttaaagcccaaaccccttcatgttcatccaaggacatgccccagtgataggaccccagcctacctttctaggtacatttctcccagcaccctctgctccagccttccttctctctgggctacagggatatcacatcgtgcttttccagaactctgaatttgtgtacatgagaccccagtgctagaatcctcctcctcctccttttggagaactccatctcccttcaaggctgagtccaatgtcattacctctgtgaaaccctccctgaccctctaagtcagaattctcttgccacctttctaacagttttaatccatcttcgaacgttttttaaaaatmatctttgggttgcaaatctcttaaaatgttcatgaaggaagtagaccccccaccccaggaaaacgctcataagacaggta

SEQ ID NO: 16012 - DNA, 581 bp, Homo sapiens
aggagctgtttaactcccttgtgcccacttacttgtaggtttaaaaagttgtgggaactgtggagggctgcacagaagttcaatgactccactgatggagactgtgaatggctttggtgatggctgcatccctgtattcccttagggctctgaagcaatggtcagccatctaatccaggctctgtagaccacacaccagacactccctgtgccctgtccaggaatgtgccctccccactggkatgcaagtttcatccccttctggctccaggcccgggagtctgactcatacacaatccatcttttagggtacctagactattgccattaaaagtaatggccaaactgcaattacttttgcaccaatctgatactagaaagagggaagggacaggtggaggctgagaaaccccatccatatcccatctggaccacccttccaccagggcctggctcctgtctgcacacccagatgaacgctggagctcatactgaaaggaaacaggggatttgctctcttgtttcaaatgtgttgctgattgtgtttattggcctattaattatctgtgtcttttaacagt

SEQ ID NO: 16013 - DNA, 581 bp, Homo sapiens
aggagctgtttaactcccttgtgcccacttacttgtaggtttaaaaagttgtgggaactgtggagggctgcacagaagttcaatgactccactgatggagactgtgaatggctttggtgatggctgcatccctgtattcccttagggctctgaagcaatggtcagccatctaatccaggctctgtagaccacacaccagacactccctgtgccctgtccaggaatgtgccctccccactgggatgcaagtttcatccccttctggctccaggcccgggagtctgactcatacacaatccatcttttagggtacctagactattgccattaaaagtaatggccaaactgcmattacttttgcaccaatctgatactagaaagagggaagggacaggtggaggctgagaaaccccatccatatcccatctggaccacccttccaccagggcctggctcctgtctgcacacccagatgaacgctggagctcatactgaaaggaaacaggggatttgctctcttgtttcaaatgtgttgctgattgtgtttattggcctattaattatctgtgtcttttaacagt

SEQ ID NO: 16014 - DNA, 2279 bp, Homo sapiens
taaaaatgcagaagacagataaaattgttgactgagccatggaagaaaataatctcttacactttgtgggagtgtaaagtggtagcacagaatctggcgaggctgtcaagtctcagattaatgggaaagagatttggatttccaaaggaagtcacagacttcaattgtcaagaaggccaatttaagtactttttacctaaatttcaaggctctgtacatatgtattcatgcgtcagtatgtgagtgtgcatgtgtgtgtgcatgcatctgtgtattaaaggataaatttaaaactactaacagtaattgtctgaggagtagtaataggaggaatatggagttattttcacatttctaactctaatttatgcatttgttagacaaggatgacatgttgacactttttagttttttaattttagacatgaaatataaaaatagttggaggcagaaaataatatgagacacccatgtttaaaatcattaacatttttacatattttctttagaactctttttctttaagaaatacaaactccccaatagatgagatttagatttcattttgctttccctttctgctttaaatttcgctttccctttctccttcctcagatggaatcactatcttgaatctggcggtagctttccttcagcatggttttatacttctctacacatgtaaatatccatgaacaataaattgtattgttttgctttatgaaaaccacatattttattgggaattttaatagcaaactcatggtcatgcctggctagcaccgtcttatatcctgagtttggggaactgacaaggttgctaattacccagccctcaggacatgtgttaataacaatggaagacaaatcggttgtgtttttctgccttaggtgcaaggatcctgaaagagaaacattggttgtgtttttattccttgggtataagaatcctgaaagagaaaggcatctgaaccttggaggcatggggttcatctcatcctcatccagcctgtgatgatggagctgttttcaccagaaacgtgaggagactcataccacttgaggtagtgtggatgtgtggcacagttttggagagggctattcccctacctttacatggaatccagtaactctctgaaaacatagcaatggcaaaagtccttttcgagactgcaaggaaaacaaacaactaccaagagaagtccaagcatcagggaaagaatgaagtggtgtggagaccatagccaatagctgctttatgagcacatttgtggctacccttggggacccaagaaataaccgggtaagaggtaactttccaagagaggttaaaggtcctacatggtggctaggagcaagaacaggttcagggatttcacttacttgttgaataaacatgtcttgtgcacctgcttcatgcagagactgtgttagttcaaagacatacaatagaaaaaaatacaacatatagtctgtgctttcatggagctcagtcatagaggcaatgaagaaaaaaagtagcaaggtcatgtgataaagagattcggagtaggggaacaacattagatatcatgatccgggaagacttccttgacgtgagcatgaatactatatgacaaggagaaatcaaccatgcatagctatggagaaaaagtgttggacacagaggaaacagcagatatagagacccagtggaggtggttaggttgctgtgttcaataagtagaaagaaggttagtagggatgaagcattttagatacgggtgggagaggaatgcagagtattgtagaggcagtaatatttagattttactaaaattataagggttattagtgtttaaatgaccattggaggagcctagaacatattacttgtagtgtaaacaattcttctgacatatgggtgattgtatcttgaaggtaaaggattttccctcattattgcacagctgaaagaggcagtcagtacaacagttacgattatggggtttagaattcagatttggttcaaatccaagctctacctcctacttattatatgtctttctcaggtctcaatttcatcatctaaacatggagataatacawccaattctttcttttttcttacctcacagggctgttgtgaggtattagtcatatgtaattgttttgtaaataatgaccttgaaatatgcaaatcattatatcacatgaacaaatttgtagaatagaatgttctaggactgattctgatgaaatatattacatgtttctgctgtaataactgtatagaatta

SEQ ID NO: 16015 - DNA, 508 bp, Homo sapiens
ttcttcaaatgattttatcataaaatcacacacactgcaaaataattagaaaatctttctaaatgtgaagaaattggaatggcatgtatttcattctcctggaaaggcaggaccttccactttggaatcatgatgggtttcattaatgttctccacagtcctctcttttcctttcattaggaaatgaaacttgacctaragctgacctcagtggcagcccattagatacatcctcgctattaaaaatattgctttgtattgatggtccttgtttataggcatgcaaccaaattgaagctgcaagactatcttgatcctggccaatttaattttgcaaatagagttttgtgaaactctgtcttactcttttcctggcaacagcctgaatattttctgatagcccaaagccaatccaactgacttccctcactcagcttttctgcaaagcatggtataaaagctacaatggatatatgaattgttggaccaaggaaaactaattggaaat

SEQ ID NO: 16016 - DNA, 508 bp, Homo sapiens
ttcttcaaatgattttatcataaaatcacacacactgcaaaataattagaaaatctttctaaatgtgaagaaattggaatggcatgtatttcattctcctggaaaggcaggaccttccactttggaatcatgatgggtttcattaatgttctccacagtcctctcttttcctttcattaggaaatgaaacttgacctaaagctgacctcagtggcagcccattagatacatcctcgctattaaraatattgctttgtattgatggtccttgtttataggcatgcaaccaaattgaagctgcaagactatcttgatcctggccaatttaattttgcaaatagagttttgtgaaactctgtcttactcttttcctggcaacagcctgaatattttctgatagcccaaagccaatccaactgacttccctcactcagcttttctgcaaagcatggtataaaagctacaatggatatatgaattgttggaccaaggaaaactaattggaaat

SEQ ID NO: 16017 - DNA, 583 bp, Homo sapiens
ttgatggagtttctttcatgttgcccaggctggagtgcagtggtgcgatctcagctcactgcaaactccgcctcctggattcaagtgattctcctgcctcagcctcccargtagctgagattacaggcgcccggcactacgccccggctaatttttgtattttagtagagatagggtttcaccacgtgggtcaggctggtctccaactcctgtcctcaggtgatccacccgccttggcctcccaaagtgctgggattacaggcatgagccaccaagcctggatgagaaatctttaaagagtaacatcccgcttgaaagctacactactataacatttactgactacacataaaaacctatttgaatgacacaagagaaactgttgtctataactgcacgctgacatatggttacatacgcaatattacttattttgtccagtgctaatttttaatgacaatggagtttctataaagtgtgccaggaggaagtttctttggtgtatattagtctgttatatttatgcttagtttggctggtgagttttcattacaccctacatcccagtacatgaaaaatggaa

SEQ ID NO: 16018 - DNA, 583 bp, Homo sapiens
ttgatggagtttctttcatgttgcccaggctggagtgcagtggtgcgatctcagctcactgcaaactccgcctcctggattcaagtgattctcctgcctcagcctcccaggtagctgagattacaggcgcccggcactaygccccggctaatttttgtattttagtagagatagggtttcaccacgtgggtcaggctggtctccaactcctgtcctcaggtgatccacccgccttggcctcccaaagtgctgggattacaggcatgagccaccaagcctggatgagaaatctttaaagagtaacatcccgcttgaaagctacactactataacatttactgactacacataaaaacctatttgaatgacacaagagaaactgttgtctataactgcacgctgacatatggttacatacgcaatattacttattttgtccagtgctaatttttaatgacaatggagtttctataaagtgtgccaggaggaagtttctttggtgtatattagtctgttatatttatgcttagtttggctggtgagttttcattacaccctacatcccagtacatgaaaaatggaa

SEQ ID NO: 16019 - DNA, 548 bp, Homo sapiens
tgactctaagttatgcctcagggagtgcagaggaatgaatttgcttttggaaatatcatctgggttatctaagagagtcttgaatgacacagtatggcaatggggaacctttgtaagtttttgagtaggttagtagtatcaaaaagagttgagcttgatataagacatgcatttaggagtcatcttcaaagagctgagagttaaagcaatgggcatgtttatgatgcctaaaacaaggactgaaggtggcatgacctcacaacctgatctgcccagaacactgcaggtctattatgtattgtcctaatgtcccctttgattagtrcccctgtctgtttcagaaatgtcacagtttggatcataatttatatggtcacccaaaacagagaaagcacaaatggctgggtgcattggctcacgactgtaatcccagcactttgggaggccgaggtgggcggatcacaaggtcaggagatcgagaccaacctggccaacatggtgaaaccccgtgtctactaaaaatacaaaaattagccaggcgtggtggt

SEQ ID NO: 16020 - DNA, 519 bp, Homo sapiens
agccaytttttaatctttctctgagatttttctcttcaatttttttgttcatttttctattgggtttaatatatttttgtattttgatgaatttattttctaatataatactttgttacatatttccccctaaatgcaacattcactgcattccatgtattaattttattttagtattttcattattattctgttcaaataataatttggtattttcacatttctggcattattttctctcagaaatgatgtcaaagttgcttcttttttggtaatattctaaatgactttttaaaatacatatattattgcatttttgttattcatgtttttacctaatttctttgagtcatgaaatattttctgtatgatattaattatttaatatttactgagataggagttgtgacctccttattttttaaatgtgcacatgaaaggaatgtgtgttcttcaatatttgcatgcagtgtttcatatattccaacagatgttcctcaaaaataactcgtttcttta

SEQ ID NO: 16021 - DNA, 519 bp, Homo sapiens
agccattttttaatctttctctgagatttttctcttcaatttttttgttcatttttctattgggtttawtatatttttgtattttgatgaatttattttctaatataatactttgttacatatttccccctaaatgcaacattcactgcattccatgtattaattttattttagtattttcattattattctgttcaaataataatttggtattttcacatttctggcattattttctctcagaaatgatgtcaaagttgcttcttttttggtaatattctaaatgactttttaaaatacatatattattgcatttttgttattcatgtttttacctaatttctttgagtcatgaaatattttctgtatgatattaattatttaatatttactgagataggagttgtgacctccttattttttaaatgtgcacatgaaaggaatgtgtgttcttcaatatttgcatgcagtgtttcatatattccaacagatgttcctcaaaaataactcgtttcttta

SEQ ID NO: 16022 - DNA, 519 bp, Homo sapiens
agccattttttaatctttctctgagatttttctcttcaatttttttgttcatttttctattgggtttaatatatttttgtattttgatgaatttattttctaatataatactttgttacatatttccccctaaatgcaacattcactgcattccatgtattaattttattttagtattttcattattattctgttcaaataataatttggtattttcacatttctggcattattttctctcagaaatgatgtcaaagttgcttcttttttggtaatattctaaatgactttttaaaatayatatattattgcatttttgttattcatgtttttacctaatttctttgagtcatgaaatattttctgtatgatattaattatttaatatttactgagataggagttgtgacctccttattttttaaatgtgcacatgaaaggaatgtgtgttcttcaatatttgcatgcagtgtttcatatattccaacagatgttcctcaaaaataactcgtttcttta

SEQ ID NO: 16023 - DNA, 609 bp, Homo sapiens
  misc_feature (1)...(609): n = A,T,C or G
ggggaccagatgggactcagccctgctctccctgccccgctccacacagtcctcaccacatactctggagctgagtctgtttcagttggggaactgggaatgagcacttagaccaggacaacagtatgagcaggggccccgcgcctgaggggctggcagcctccatgcagctctggtgtgggcaggagggaggggtgagngaggggttattaacagagagacacctggggaagcgggagccggggcatgtcagtgaatgagcacgtttcaaatacatacaaatgaataaatgggcagagacaaacttcaggagcagatgggcaaataaatggatgacaggtgcataaaatattctgccgcatacgtgaataaatgatgcagcaatgggctgacccattaatgggttggcagttataaagcacatgaagcctgggcgcagtggctcacgcctgtcatcccagcactttgggaggccgaggcaratgggtcacttgaggtcaaaaatttgagaccagtctgactaatatggggaaaccccatctctactaaaattacaaaaattgcccaagcgtggtggcaggcacctgtagtcccaactacgggggaggc

SEQ ID NO: 16024 - DNA, 571 bp, Homo sapiens
tctcaccaatgtcagtaggtatcatcccagtgcattttgcaaaagtgcagaattgggtgaatttgctctccacttgagctggaagattcattttctcttgcccttggagtcagtgttcctggttctcaggccctcacgcttggactggaactataccatcagctttcgaggacctgctgcttgcagatggcagatcatggaacttctcagcctccacagtcacctgagccaatcactcataatgaatctctttctgcatatcattatacttcctactggttctatttctctggagaactctgacaaatagacctctacattcatgatttcaaggatgatgactctaacttgtttgaaatatgtcattatcacacatatcttcttaaacacaaagcacatgcactgaggcttttttttataatataacaaaatccagtgcataattatgttcacttccctaggtataaacagtcataatatttatcrcataattaaacaggcaagatttactcctttgggcatctaccagaacatatttaaatgttgtctttgaattgtgctgtatacacaa

SEQ ID NO: 16025 - DNA, 595 bp, Homo sapiens
tgtaatgccacttattaatcaatagaaattagaatcagcctaaggactgaagggaaaatgacaagttgaatggagatgytgatgcagaggtgactatggaacccctcagcaaagataatggaaaatgcaattcaacaagcagctttgctacttagaagaaatgactttcaaagttcctatcccagacatcagtattgtcatcaataaaaccaaaaggtattaatttactcgtcaaggtctcaaaccattatagactaagactggtttcttgacttggctacaactctacacaaaatagctagtgttacatttacagaaatattaagaaaatataggtatatgcattaaactcaatttccccttcatattctggatgtatttgagattgccatatatctacatagttttaaatatttaaacctaagtaactatttaatattcaataaatgtgtcacattttatcttgtcttatatcagatgttttgctgttagtttgttgcattttatcattaatgtaattcattttcacagagtaatgcctacattcataaaaagaaaaatcactacttgaaagacttgatgttgtcatgtttgt

SEQ ID NO: 16026 - DNA, 595 bp, Homo sapiens
tgtaatgccacttattaatcaatagaaattagaatcagcctaaggactgaagggaaaatgacaagttgaatggagatgttgatgcagaggtgactatggaacccctcagcaaagataatggaaaatgcaattcaacaagcagctttgctacttagaagaaatgactttcaaagttcctatcccagacatcagtattgtmatcaataaaaccaaaaggtattaatttactcgtcaaggtctcaaaccattatagactaagactggtttcttgacttggctacaactctacacaaaatagctagtgttacatttacagaaatattaagaaaatataggtatatgcattaaactcaatttccccttcatattctggatgtatttgagattgccatatatctacatagttttaaatatttaaacctaagtaactatttaatattcaataaatgtgtcacattttatcttgtcttatatcagatgttttgctgttagtttgttgcattttatcattaatgtaattcattttcacagagtaatgcctacattcataaaaagaaaaatcactacttgaaagacttgatgttgtcatgtttgt

SEQ ID NO: 16027 - DNA, 572 bp, Homo sapiens
tatactttaattcagtagcaagaaaaatattttaagatgcatagctagatattattcttcaaaaagtactttcaaggaaaaaaaaaaatactrtagctgtctcaagaactaggtcagaatttggctattcacccaaaaagattgaggggttaaatatatccaggaagtaaaggcctacagagtttttaatatctgaaatcaatacaagccaggaattgccaatatttttcatttcaatttaacactacccactaggcaaagctgttcaacttatcccaatttgcttagaaattcagaactacagatgtcccaggaatgcgaaaaaaaaaaaaactagagtgtcatgtacacaattcactaagaccctccaaagggaatatctaatcttccctgtgaactccgcagtagaaactgcagccttgttgctaactgaataaaacccaaagagaagatgatagaattctctatacacgctactctgtccatttttggaacacaggtagtttcatggaagaaggaaggtgccagccacaacttggatgatcactgaactcaatatcaaggtgagatag

SEQ ID NO: 16028 - DNA, 572 bp, Homo sapiens
tatactttaattcagtagcaagaaaaatattttaagatgcatagctagatattattcttcaaaaagtactttcaaggaaaaaaaaaaatactgtagctgtctcaagaactaggtcagaatttggctattcacccaaaaagattgaggggttaaatatatccaggaagtaaaggcctacagagtttttaatatctgaaatcaatacaagccaggaattgccaatatttttcatttcaatttaacactacccactaggcaaagctgttcaacttatcccaatttgcttagaaattcagaactacagatgtcccaggaatgcgaaaaaaaaaaaaactagagtgtcatgtacacaattcactaagaccctccaaagkgaatatctaatcttccctgtgaactccgcagtagaaactgcagccttgttgctaactgaataaaacccaaagagaagatgatagaattctctatacacgctactctgtccatttttggaacacaggtagtttcatggaagaaggaaggtgccagccacaacttggatgatcactgaactcaatatcaaggtgagatag

SEQ ID NO: 16029 - DNA, 545 bp, Homo sapiens
gtactcagatcaatatcaatgcctatatttatatttatctagcatctctctagagccttatattagtgtatatcgtctagatctacacgcatgtgcgtagatacataggactattatgagggaaccctctcatttcatcttatacccgctcttgtgttttcaaatagtttcttctagattcgctaatgtgtaatcatcttagacgtactgtggtcacaccctttagtcttatccctgggaaaggtgtatgtatttttttcccccccaaatagaccttaagtcagcactacatttagaataagaactcaggttccctgtctcttagcaaagcgctctttctaatctattgaaataaaggttagaaygctattcagagggaacaagttattaccagtgttgtatttaatttgggagtttaaggcacattaatactaataggccagtgtcatagctagcatgaaataataggctggcatcatagcttcatagatcaacataacagtcaaagttataagccagtcaattcctctaaacccagcaaactc

SEQ ID NO: 16030 - DNA, 536 bp, Homo sapiens
tttttattactaatattatctatgacaatgacaatgatgatccttttatgaaaatgtaaactaaggtatataactcatgtatggagaaatttggatttgaactacacagtctagtacagagtccacmttttacatggcactgtctcacataacagaactgtttaaacagttgaaggtctgttatgtcaaaagggtagtagattttataaataggacaacttatgccagctcatcttagtttcagaactagatggaacccaaaggaagagaaacagtgacctgttggggccagcctgtctgaccaagaaagcaggatcaatactttggggcaaggtttctcaacattggcactactgacatttgggactaaaaaattctttgctgtggaggtctctatgtacttcaggatatttagcagcatctctttcctctagcccctagattccagtagcaacccctcaatcatgataactaaaaatgcctccagacattgccaaatgtgccctagaggtcaaaatcaccttcactgagaatca

SEQ ID NO: 16031 - DNA, 574 bp, Homo sapiens
ctgagcagcagccctctgggcctaggctgtgggcccgggatggtagggaaggttgtcaagggggcaccaggtaggctggaaccaagaaggctggacagatggccatgatggtgactgcacctgccccaccagggggccctggggcagtggcaattgtagccatgctggtcttttgccaggaggccatatgcagtagacccaggagttggctggtgaggtgagcagacggtagggcrtgcagtttgggtggggaggggctctcttttggagaggacgctctgactctacatggacacctgtccctgggtcccttttcctctcatttcacagataaggtcccggggtaggcgatgggggcaggggccagctgaagcctgtctgaccccgggggcccctttcccactgccctgtgctgccttcctcacccccttcgctggtggaagggacgtcatctttcctgttccaaggggagaagtcccagggagctgccacaccgcagcgaggggagaggagggcagatacacgtggctctagagggcgtgagaaatggcattctttattcataaataaaaac

SEQ ID NO: 16032 - DNA, 536 bp, Homo sapiens
gaagagcaaagtcacataagatttacagacgagggactgtaactgttcaaacaaaaatattcataggaaaaccactagtttctgaggaaaaggaatctctaggggcaaaccaaagtccaacaaatcccagaaggcgcccaaataaatgagaaagaacagaaattgtcccaccctcacaaaaaaagcctctgataagattatagcttacaactaatcatgccaaatgtaattcataaaccctggttgatttctttttaaaaaataaattctgctgtgtgtatttggggattacaacatgatgttatgggatatatacagacagtaaaatggttatagtggttcttgagttaaaaaaaaaaaccctaaaattggccaggtgtggcggctcacgcctgtaatcccagcactttgggaggcggaggcagacagatcactaggtcaggagatcgagacaatcctggctaacacggtgaaacrtcatctctactaaaaatacaaaaaaattagccaggtgtggtggcgggcgcctgtggtcc

SEQ ID NO: 16033 - DNA, 1680 bp, Homo sapiens
ggcactccgcgattctgatccggcctttagtctctgttagcggctcaggtccgcagtggaggccacatcaactcggcgccttgggaaccgctcgagcctaccaggtgagatgccactgacatggaagaatagggtgaagggcaaggggacctgtagggaaaaggttgccctcctgacctcggggcagagagagcaccaagaagaaagtcatggctaactgggagcagcagtaagtgaaggaaattaacgtcagtaatttgaggaaagggcgaagaagaaaacctttgagttcagcaaagggaaacggggcaggaggttctgggcagaggacacctggagcgctggaggctctcggagtcatagtttttctctcatattaagagttggggtagacaccattcccagcctgcttgcctttctaaagacgaggaagactggattattttccccaattagtaatggaatttgggacagtttatctgtggttcagattttactcagttggaattagcaattcggagagcactgtaatgacagcaagctatctataaacaggtggcgccagttaactcccttgctgacaggcgtgcttcttgataggccaaaaccgtaactatctttccaaaacatagaccgccctaaattcttgtataaatatgactgtcctagatctgaaaaatacagtgatgttctctgtgcacaggtcattttggaagccataggctacttatccttaacttatgaatgtagctatggttgtagtgcctcctaaaatttgagtccattattacctctcactcaggaacggttttttaaaaaattatttgtacttaactgtactaaagtatatctttttattttctgtgtattgacaagaggtttaattgccaccacgtatttatcactatcactttaaaatattgtcagttttgtatgagaaacaacctcttaaattttgattcttcatctacaaatatttaacgtctaccttgtacatagccctgtgctagatgatagggtactaagagagacatacagttatgccttcaaggattgtacagtttagttaaggagattggatctatgcattacaaaaataactgaaaaacacagtggtgggttaattagcaaatgaatagtatgtacaataaaggctataggcatccagaggaaatagtgataattaaggaccaggttataaagagtatttcatgctggtgatagaactggggagaatgttctgaacagggagaatagggaatgacactaagcatgtggaaggctgatggaatgacatttataattcattcagkaattattgaacacctctacaggagcaaacaaaatataagtcctgtctttaaagagcttaaaatctagtgggaaatatgtaaattaatcggcaattaaaatatagtggagctgtgtaataatgggaaaggtacaaggtatgggacagtatatgtgaggggtattaagtctaattgtaaggtagtgaagattgccttaagtaactgatatctaaggcaagagctgaaaaattagaagttagccagttaaagaaggaatcgcatgtgcaaaggcccacaagtcagagagaacatggaccttttctagaactgcacgtagtttagactgtagtgagtcattcaagataggaaatagcagattaggctaacg

SEQ ID NO: 16034 - DNA, 602 bp, Homo sapiens
gaagccccaggggcccccggaagatccttcaagctggcatccttggcctcgctgcgggggcttagctacctgtgggaacccacgtagcaagggtgactcaaagggttaacaagcagtggcgccgcaragtggcggggagtgcagccaatagggtgtctaggcaggcagtacgtctggtgtgggcgggagtgagccaaagtgtgctaaaggaaaccaacagcggcctaggggtgaaaggacagccagggttagatgttctgaggaggcgggagcaaccgagagagcacgtgagcatctgtcctttctacccgttcctctttatctttagtgttcagtagcagcggggatagcccggggcccggtgtatggccacggagttacagtgtccggactccatgccctgtcacaaccagcaagtaaactctgcctcaaccccaagtcccgagcagctgcgacctggcgatctgatcctggaccacgcagggggaaacagagcctccagggccaaggtgattctcctcacggggtacgcccattctagcctgccggccgagctggactctggggcctgcggcggctccagcctcaactcagagggcaac

SEQ ID NO: 16035 - DNA, 506 bp, Homo sapiens
gtctcttatgtaaaattctacactgcaaatcagggatcccaagaggctacataaaagaacaataagagttaatgggggatggagaactataaaactgcrgattttctcctctgggatatacacttgtactcctaattcctgtatctgtttcctcatatgtcccttgctgtaaaatagtggctttattgattgataaatttgggaaagataaactatgtaagtctgattctttctctcttttcttggctacaggctgaaagaacaagcacattttcagtttgtcttacatatttttcacaaagggcaggtcaccacgaggtacatgggtttgcaattgtgttacactggctgcatttgggagaatttgtctaccaggggcagatatttaggtcttggcaccccagttgcgttcacatataagccacatatcaataatgtaatacagtactgtggtctctatttgagaactttaggccttatttttatattagttcagacttcaggag

SEQ ID NO: 16036 - DNA, 540 bp, Homo sapiens
aattattttgaagcaaataacaggcactgtctgatctcatttttgttttaagagccaagctgtgacctggggaaggaggggcagtgaaagggatcaaggagagatactcgaggatcttcaaacgtatctgtgatttaaaaagaaaggatgaagtatatggatggtaaaagttatggtttaacaaagataggtcatgagtattcagatacgtgatactctgtatgcttgagctatttcatcaccatcatcatcatcaaaaagccaagttggaactcacgtggaagttactgtgccaggcctcgcttacctgtgcttatcttgaactttgggtttatgcataatttaaaacacttaaacattatttctgtgcaatatttatcattgagctttattgaataccagcagtgctgtagagtcatgggacctttaaaaggtcaaaagaaagctgaggatcattttagtctagtcycctcagaaagcttagctcctgagagaagtagcttgatttgagctcatatcaagtggcccagtgcttcctgt

SEQ ID NO: 16037 - DNA, 522 bp, Homo sapiens
ttcttgaaaaagctaaagctacctctgagcaaacagctcatttcctgggcactatgccagccttatgcagatttggaatttttctctgactttttaagtagctattcttaataataaattgggaataactataccaaatattakcaaatctttgactgtgataatcattgtttattatctgaaatatctcatttccttaagatgagtaagtaattaaagtctggaaatcacagaaatcagaagaaataggattacagctctaatttaatctcatagctgtccttgtgtgatagcttaataatatgttaatcgtttttgctttggtcacatactgccaggttcaagaaaacatacaccacgtctctgcacatgagtaaatctataaaaaggtttttgcttctagaggctgtactgaaatatattgatttttaaatgtataaggttgcttttaatgcagttagcacatcatttattctatgaatgtaatggagcactgttaatgaagcatgcaagacctaaagt

SEQ ID NO: 16038 - DNA, 617 bp, Homo sapiens
gcagttcgcttgagccttctcacatagaacatgccaattaaagaggctaattaggcttcagttagatcgcagtgggatttattaaaggaaaatctcataaaacattttatcctagaacatgtatttgtataatccagaagagtgatttaattagggaattaaaagcccattgaagtatattccagaatggaattgtttctctgaaaactacatggagatcacagtcctggggcaacaataaagacatactaagcatcctctgtcctactttttaatgggcagatggctgcaatgattcatttattaatcattctagcccaggcacagagcaacttytattgggtctttctgccatgattaagccatattgataaatatagatctcaatttatcctcccagtgttgcaaaactatatcattggggactgaatcccctaacataatccatgttcaaggtcagccttgcactagagttctgtgtatccccttccagatagtgagagaagcacaaggtctgccacataatattaacaccaactcagtgtctggtatattgtgtgataacccagagtttacaactgctccacccttctggttctttgcatgaatcttgcatt

SEQ ID NO: 16039 - DNA, 1295 bp, Homo sapiens
atagatataaataagtaatatatgaaatgattctctttgtaagaaatttttaaaaatcctaaggacatatatcatttctaagcctccatgtggcctatatgtcttatttatgttatatactttgggaaattcttctcttcctgagagttgaattcaaatgtcacattatccatgtctccttcccaatttccttgatctgagtgaatttctctttctgttgaacccacaatgattcattcacaccttattttttaaggctttgcattctattgaagatgagtctgcattgtctgtaagattatgaatttcttgaggataggaactgactttatgcatctctgtgttcccccaaaattattaccacttcctgacacataatctgtacttaataaatgtttattaagtaaatgaaaggacaaataaaatataaattagtatatgccttattttcagaactacaccaatagtataaaaggagcaacagactaggagttagtaaatcttgattttacattgaaattattcattgtagcactatctataatataaaaggtctgtaaaacctccaagtaagttaatcaaaacaggactagttgaataaactatagtagatccattcaatggaatactacacactgtaaaaaaaaaaaaggaaggaagatatatcgttaagtgaaaagaacaagttagaggaaagtttgtataatgaaaatatgactgagttaatgaattataggcctgaacccaaacaaaacaaaacaacaatgattaactctaggaggtgaggagaaaattgtggaggtaactatgatagaggttagcccttcctgaatatatcttgtgacacagttttgactttgaaaccatgtaaactgtagaaaaattataaaacaaaattaaagatttataaagctattttcatacaaagcaaagtaaaacaagtgaatctgattgtgcattgagggggtggcataacaagagatagttttgttttttattttttgatggagtcttgctctgctgcccaggctggagtgcagtggcacgatctcggctcactgcagcctctgcctcccgagttcaagcgattctcctgcytcagcctcccaagtagctgggactataggcgtgcgccgccactcccagctaattttttgtatttttagtagagacagggtttcactatgttggccaggcaggtctcgaactcctgacctcatgatctacccccctcggcctcccaaagtgctgggattacaggcgtgagccaccatgcctggccaaccagagacagg

SEQ ID NO: 16040 - DNA, 1295 bp, Homo sapiens
atagatataaataagtaatatatgaaatgattctctttgtaagaaatttttaaaaatcctaaggacatatatcatttctaagcctccatgtggcctatatgtcttatttatgttatatactttgggaaattcttctcttcctgagagttgaattcaaatgtcacattatccatgtctccttcccaatttccttgatctgagtgaatttctctttctgttgaacccacaatgattcattcacaccttattttttaaggctttgcattctattgaagatgagtctgcattgtctgtaagattatgaatttcttgaggataggaactgactttatgcatctctgtgttcccccaaaattattaccacttcctgacacataatctgtacttaataaatgtttattaagtaaatgaaaggacaaataaaatataaattagtatatgccttattttcagaactacaccaatagtataaaaggagcaacagactaggagttagtaaatcttgattttacattgaaattattcattgtagcactatctataatataaaaggtctgtaaaacctccaagtaagttaatcaaaacaggactagttgaataaactatagtagatccattcaatggaatactacacactgtaaaaaaaaaaaaggaaggaagatatatcgttaagtgaaaagaacaagttagaggaaagtttgtataatgaaaatatgactgagttaatgaattataggcctgaacccaaacaaaacaaaacaacaatgattaactctaggaggtgaggagaaaattgtggaggtaactatgatagaggttagcccttcctgaatatatcttgtgacacagttttgactttgaaaccatgtaaactgtagaaaaattataaaacaaaattaaagatttataaagctattttcatacaaagcaaagtaaaacaagtgaatctgattgtgcattgagggggtggcataacaagagatagttttgttttttattttttgatggagtcttgctctgctgcccaggctggagtgcagtggcacgatctcggctcactgcagcctctgcctcccgagttcaagcgattctcctgcctcagcctcccaagtagctgggactataggcgtgcgccgccactcccagctaattttttgtatttttagtagagacagggtttcactatgttggccaggcaggtctcgaactcctgacctcatgatctacccccctcggcctcccaaagtgctgggattacaggcgtgagccaccrtgcctggccaaccagagacagg

SEQ ID NO: 16041 - DNA, 1310 bp, Homo sapiens
tttatttttaattaattaatttgtttttttctttgagacaagatctcactctgtcacccaggctggagtgcagtggcatgatcacggctcactgcagccactaccccctgggtgtagatgatccttccacctcagcctccccagtagctgggactacatgcacgtgccaccacgcccggctaattttttgtatttttttgtagagacggggtttcgccatgttgcctaggctggtcttgaattcctggcttaagtgacctgcctgccttggcctcccaaagggctgggattatagatgtgagccactgcacccagcccctttgtccatttttaaattgggttgtttttatgctcttgagttttttgagttctgtgtatgttttgtgtattagccccttgtcagatgtacatttgcaaatattttctcccattgataagaagattttgttttgaaggacactgggtaggatgcaaaaaggacagtgagtctaaagagccaggctggagaaaaggcaggaatgcaggggggctgggcacacaggaccacagccagaatcaaaccctgaaacaggttgctaaagactgttgccaacagcaccacagcccgtgctcccagggtactatatgtggctgctgcctctcccagaatgaatctttcctgtcttgcttctttgtgttatcagattaagaattaaagataagggcggttaaactggctaaagtcacacccagtttggcattagagttcaggggtagagagctcactaacttttaggaatagggaaggcaagtgtttacgcttgaggctcatagaaatctctcaaacatcagaaatgggaacaggcagcctaaaaggtaaatatctacacatgaccacaggataagactatgctttcacgttatgcccaaatgcataaggtgcaagtccgcatgctgcttatttgcaagaaatcaagccttttactatgwtctttaattcactgctccctggaaatccccagggcatctgcccctactcctcagatctttctgattgttccttacccactctgcccatggtctggctctggggctttccttccttcttcaaaagatcttacctctcacaaggatgggtgagataaggctgcaaaattaaaaagattttgctgaatatttgagattaatcagtgatcataattgagaaaatctaaatgcatctcaaacatggtagttgtttgaatgaagcctcatccacaggctattacctatgactctgtccttaaggctgaactgctgactgttgccactgtgtcttcacttacagaaac

SEQ ID NO: 16042 - DNA, 1310 bp, Homo sapiens
tttatttttaattaattaatttgtttttttctttgagacaagatctcactctgtcacccaggctggagtgcagtggcatgatcacggctcactgcagccactaccccctgggtgtagatgatccttccacctcagcctccccagtagctgggactacatgcacgtgccaccacgcccggctaattttttgtatttttttgtagagacggggtttcgccatgttgcctaggctggtcttgaattcctggcttaagtgacctgcctgccttggcctcccaaagggctgggattatagatgtgagccactgcacccagcccctttgtccatttttaaattgggttgtttttatgctcttgagttttttgagttctgtgtatgttttgtgtattagccccttgtcagatgtacatttgcaaatattttctcccattgataagaagattttgttttgaaggacactgggtaggatgcaaaaaggacagtgagtctaaagagccaggctggagaaaaggcaggaatgcaggggggctgggcacacaggaccacagccagaatcaaaccctgaaacaggttgctaaagactgttgccaacagcaccacagcccgtgctcccagggtactatatgtggctgctgcctctcccagaatgaatctttcctgtcttgcttctttgtgttatcagattaagaattaaagataagggcggttaaactggctaaagtcacacccagtttggcattagagttcaggggtagagagctcactaacttttaggaatagggaaggcaagtgtttacgcttgaggctcatagaaatctctcaaacatcagaaatgggaacaggcagcctaaaaggtaaatatctacacatgaccacaggataagactatgctttcacgttatgcccaaatgcataaggtgcaagtccgcatgctgcttatttgcaagaaatcaagccttttactatgatctttaattcactgctccctggaaatccccagggcatctgcccctactcctcagatctttctgattrttccttacccactctgcccatggtctggctctggggctttccttccttcttcaaaagatcttacctctcacaaggatgggtgagataaggctgcaaaattaaaaagattttgctgaatatttgagattaatcagtgatcataattgagaaaatctaaatgcatctcaaacatggtagttgtttgaatgaagcctcatccacaggctattacctatgactctgtccttaaggctgaactgctgactgttgccactgtgtcttcacttacagaaac

SEQ ID NO: 16043 - DNA, 357 bp, Homo sapiens
atggtcagtttcatgtgctgtttgttactcctttgtgtagattccacccactaataatttctatggctgttgctacagtaaagtcatctctttaaggggattcttaatgtgtgagcacgggtgcatcactttatgcagacagtggtgattattattttggttgggcagtgagctaaacctggaacaaaaatgtcttttataggagagcctttctgtcaagcagaaatccctttgacgagatgaaggagctaatctattcgtctcagctcacccctgcaccgccccccctcccccccagccccaaggccatgggcactgaatttaccagccgtgcaacsttggccaggatccttctac

SEQ ID NO: 16044 - DNA, 557 bp, Homo sapiens
caggtctcttcagtgaagaaagattttaaatcggtaatgtaaccagaggtaggaaatggaaaagtgccagaggctgctgcatggaaagtcccttctcccacagatggcagggaagggcacccaggacgttttaagggtcaggcaaggttctcctttccctgggtattgataacttttatttcacatgtaaaaaacatgtttcttaccctcttcccagccatccagttcccctctttgcagacagcacacttcctcttagaaccttccagataaaccatatgtatttacaagtaggtacctgatgtcccactgcacacacaggtgcctcctggtcttctcttggcagtctttccagatgaggcttctctgtcastccataaagagcttgttcagtggcacaaatgtgttatttaatcaggccctgttgataacattttgttccatcgtattattacaaaccagtgcagtgtcatttacatattatatacatatcacctacatgttacagacaacagatgggacctttcacattcaggtaagtctacctgtgaagtaga

SEQ ID NO: 16045 - DNA, 543 bp, Homo sapiens
ccagatgtttgccaagagtgtaggacttggccaccagcttgaagtgtttcaggtggaccagagggctctcgccggggtcagaactgcttagatccagcagagggtgcrattgtggctcactgctacctccatcttcccaggcttaccgaggcgatcctcccattttggtctcccaagtggctgcggctctggggatctttctgttttgttttgttttgtttttttccctaggcccacttcaagtttgtttccacagtacattgaattgctgttttttttttctttcttttctctctgttatgctccttcctgcatactgaagttcctgttattttagattttttcttttcttttttttttttaaatcaggctttggctcccaaagtgctggaattacaggtgtgagccaccatgcctggctctatctatctatctatctatctatctatctatctatctgtctatctatctgtgggcactctatagataggtaggtaggtaggtggtaggtaggtaggtagaaaataaataagttttcattta

SEQ ID NO: 16046 - DNA, 595 bp, Homo sapiens
ggaattgattggtttcagatgaatgaacatttcacccatctagtgagtagtttttatgttgtctgaatttttctctaagggcttaaaagataatgctattgaacaaactaaattatattcccccatctcaacatcattagaataatgtatttgacaacaatatagttcatatagcacaagaaataacaaatatgatgaaacatacagacatcacatgcaaacacacacacacttatagacasatgcacatattttccttgtaccatcacagcatttttagtggatatatatttttttctgctgctcaagattgaaccatgcaccccactcctaatttttctgtctcagttcctttaattatcattctctgccctcactatttaattgctccattttcactgacttccctcctttgcctacaacatattctaaaacctaataaactaatgacatattgaaacaggcagaaaaacagaacatgcaacttctgacatttcattacccactaaggtccacaaatatgatgtctgtttcttcatttctcacacaatcttagacccatcaaaacctaggtacacattttttttatatgtgg

SEQ ID NO: 16047 - DNA, 595 bp, Homo sapiens
ggaattgattggtttcagatgaatgaacatttcacccatctagtgagtagtttttatgttgtctgaatttttctctaagggcttaaaagataatgctattgaacaaactaaattatattcccccatctcaacatcattagaataatgtatttgacaacaatatagttcatatagcacaagaaataacaaatatgatgaaacatacagacatcacatgcaaacacacacacacttatagacagatgcacatattttccttgtaccatcacagcatttttagtggatatatatttttttctgctgctcaagattgaaccatgcaccccactcctaatttttctgtctcagttcctttaattwtcattctctgccctcactatttaattgctccattttcactgacttccctcctttgcctacaacatattctaaaacctaataaactaatgacatattgaaacaggcagaaaaacagaacatgcaacttctgacatttcattacccactaaggtccacaaatatgatgtctgtttcttcatttctcacacaatcttagacccatcaaaacctaggtacacattttttttatatgtgg

SEQ ID NO: 16048 - DNA, 595 bp, Homo sapiens
ggaattgattggtttcagatgaatgaacatttcacccatctagtgagtagtttttatgttgtctgaatttttctctaagggcttaaaagataatgctattgaacaaactaaattatattcccccatctcaacatcattagaataatgtatttgacaacaatatagttcatatagcacaagaaataacaaatatgatgaaacatacagacatcacatgcaaacacacacacacttatagacagatgcacatattttccttgtaccatcacagcatttttagtggatatatatttttttctgctgctcaagattgaaccatgcaccccactcctaatttttctgtctcagttcctttaattatcattctctgccctcactatttaattgctccattttcactgacttccctcctttgcctacaacatattctaaaacctaataaaytaatgacatattgaaacaggcagaaaaacagaacatgcaacttctgacatttcattacccactaaggtccacaaatatgatgtctgtttcttcatttctcacacaatcttagacccatcaaaacctaggtacacattttttttatatgtgg

SEQ ID NO: 16049 - DNA, 518 bp, Homo sapiens
cacaaaccaggccatccctgctcccagcctgcctggagctctgtccaccctttgagtccttctccggtcctggccttgaggaatggggcttctgaggcagatccctcatgctccarggcccaaaggaagcattgacttggtttctttacccccaccttagggctttaccctctgaatccatcttgcataggttctatgccccggtttctcctatctccttaccctctagggagggtagcacttattggcagctacctggactttacttggaaatagagtggggacagtacctagggtcttaggttttgtctatggcctctgagcctggcagagaacctggggtggatcagtgggaggtgcccaatggcaggactaggtctagggaagaccccgggagtgtatccctccgccaggctccagttgcctctctgggaacaggatggtcctgacacctggtctctgggcctagaatgtcccctacaagggcttttattcctgatcccccaggaacctctggc

SEQ ID NO: 16050 - DNA, 518 bp, Homo sapiens
cacaaaccaggccatccctgctcccagcctgcctggagctctgtccaccctttgagtccttctccggtcctggccttgaggaatggggcttctgaggcagatccctcatgctccagggcccaaaggaagcattgacttggtttctttacccccaccttagggctttaccctctgaatccatcttgcataggttctatgccccggtttctcctatctccttaccctctagggagggtagcacttattggcagctacctggactttacttggaaatagagtggggacagtacctagggtcttaggttttgkctatggcctctgagcctggcagagaacctggggtggatcagtgggaggtgcccaatggcaggactaggtctagggaagaccccgggagtgtatccctccgccaggctccagttgcctctctgggaacaggatggtcctgacacctggtctctgggcctagaatgtcccctacaagggcttttattcctgatcccccaggaacctctggc

SEQ ID NO: 16051 - DNA, 511 bp, Homo sapiens
catcaggtgtatccattttcaaacctataaccttctacttagtgtggttgacctgtctattgtaatagagttttgctatccactcactgtttctctgagaatactgatcccatttgcctgctttgtagattattttacaaacacatatggtaaaatttctgtcttacacataatgtagctaagctaactctcaggactcaccttgcctttctttttttttttttttgaracgaagtttcactcttattgcccaggctggagtgcaatggcgtgatctctgctcactgcaacctccgcctcccgggttcaagccattctcctgcctcaacctcctgagtagctgggcttacaggcatgcaccaccatgcccggctaattttttatttttagtagaaacagggtttctccatgttggccaggctggtctcgaactcctgacctcaagtgatccgcctgcttcggcctcccaaagtgctgggattataggcatgagccactgcgcccggcctca

SEQ ID NO: 16052 - DNA, 598 bp, Homo sapiens
acaaactacccatatagaaaagctcaggcacaggtggcttcactgcttttaccaaacattcaaagagaattacgacaaattattcacaaaccgtttcaaaaaatagagagataatacttcccaactcattgtataaagccagtattaccctgataccaaaactaaacaaagacaacagaagcaaagcaagctaccgatcagaacccctcaacaaaatactagcaaattccagcaacacaataaaataaaagagagagaaaagcagagaatggcctgaaaaagtgaaacagaatgggtatgggatttctttatgcactataatgatatacgctaatatattttaggacacactgtcatttatttcagtatatcctcagcaccttactgattccaacacaaagtatgtattacctcaataggttgttggaactaataagaattcattaaaagyatctagcaaatatttggcacatagtatgaactcaaaaaatgttaactattatcatcctaagaagaaaagtattaagctatattcctaactattgaaatcacattaatctcacttaaaaggaaacaatttgaactatacacttaaaaa

SEQ ID NO: 16053 - DNA, 1036 bp, Homo sapiens
tatattctttttatattttgaattttcaaaatgtcaatcacatgaacccaaaatagtatcaactgtcatggttttcacagataatttctctttttcaattgcattcatctttcttgactatttgccaatagttcatcaattacattagttttctggaaactcttggacaaggttttgttaggtgcgcctttctgctttcccatggatttcctctgggtgggctgcagagcactggctgagtgtgggatgcagggtgaagcagattgkgggtacaagcttctgggctgcttcttgctaagcatgatcatggacacatttcttcacctctccaggtcttacttctttgtctacaatctgaggataattccctcccacctttattcactaatgcatgttattcttttggccattcacctgggacatcaatctccaattcctagaagtatccaggagagttggtgcagaagactctccctctttagtgtcctccacagtaacttctgttccctcacatagctgccttctgaggaaatttactcctttaattttaaaaaataggctttattttttagagcagttttaggttcacagcaaaattgagcagaaaatacagagagttctcatatgcccccagtacagagcctgtaccactgataatatccctgtatcagagtggcacctttgttacaatcgatgaactacattggcacaccattatcacccaaagcccatagttccatcgtttatatcagggttcacctttgttgttgcacagtctatggatggcatgtgtctaccattatagtatcatacagaatatagtttcggtgcactaaaaatccgcggtgttccacctattcatttcttcttcccctctaactcctggcaatcagatttttaaaatgtcttcctagttttgccttttccagaatgttctatagttaggatggtatagtacacaatctttttttttttttttttgaggtggagtctcgctctgtcacccaggctggagtgcagtggtgcgatctcagct

SEQ ID NO: 16054 - DNA, 1036 bp, Homo sapiens
tatattctttttatattttgaattttcaaaatgtcaatcacatgaacccaaaatagtatcaactgtcatggttttcacagataatttctctttttcaattgcattcatctttcttgactatttgccaatagttcatcaattacattagttttctggaaactcttggacaaggttttgttaggtgcgcctttctgctttcccatggatttcctctgggtgggctgcagagcactggctgagtgtgggatgcagggtgaagcagattgggsgtacaagcttctgggctgcttcttgctaagcatgatcatggacacatttcttcacctctccaggtcttacttctttgtctacaatctgaggataattccctcccacctttattcactaatgcatgttattcttttggccattcacctgggacatcaatctccaattcctagaagtatccaggagagttggtgcagaagactctccctctttagtgtcctccacagtaacttctgttccctcacatagctgccttctgaggaaatttactcctttaattttaaaaaataggctttattttttagagcagttttaggttcacagcaaaattgagcagaaaatacagagagttctcatatgcccccagtacagagcctgtaccactgataatatccctgtatcagagtggcacctttgttacaatcgatgaactacattggcacaccattatcacccaaagcccatagttccatcgtttatatcagggttcacctttgttgttgcacagtctatggatggcatgtgtctaccattatagtatcatacagaatatagtttcggtgcactaaaaatccgcggtgttccacctattcatttcttcttcccctctaactcctggcaatcagatttttaaaatgtcttcctagttttgccttttccagaatgttctatagttaggatggtatagtacacaatctttttttttttttttttgaggtggagtctcgctctgtcacccaggctggagtgcagtggtgcgatctcagct

SEQ ID NO: 16055 - DNA, 511 bp, Homo sapiens
ttttggtttggcttagtagtgtctttattgcaaaaaataatacttgcctcatgggattattatgagaaataaggaaagaatctgataatttcaaatacagaggtgaatttatagacttcatttctatatcttgctcaagtttgataaggctagagctagaagycacattggtagaaagttagtgcccagcaatggtgtttaagttgcataggacagtggatttcaaatattttggtctcaagatccttttacagtcttaaaaattacttaggaccccaaagagctgttgtttatgagaaataaatccctttatatttaccatataagaaattaaaaattagaaaaattatatgtattaatttattaataacaataataaacccattacatgttgctataaataacattgtatgagaaaatgtctatattttaaaaacaaaaaaattaatgagaagaatggcattgtgtgactttttttggaaatctttttaatgtccagctcaagacttcc

SEQ ID NO: 16056 - DNA, 511 bp, Homo sapiens
ttttggtttggcttagtagtgtctttattgcaaaaaataatacttgcctcatgggattattatgagaaataaggaaagaatctgataatttcaaatacagaggtgaatttatagacttcatttctatatcttgctcaagtttgataaggctagagctagaagccacattggtagaaagttagtgcccagcaatggtgtttaagttgcataggacagtggatttcaaatattttggtctcaagatccttttacagtcttaaaaattacttaggaccccaaagagctgttgtttatgagaaataaatccctttatatttaccatataagaaattaaaaattagaaaaattatatgtattaatttattaataacaataataaacccattacatgttgctataaataacattgtatgagaaaatgtctayattttaaaaacaaaaaaattaatgagaagaatggcattgtgtgactttttttggaaatctttttaatgtccagctcaagacttcc

SEQ ID NO: 16057 - DNA, 741 bp, Homo sapiens
gtataatttcaattcttaaaactagaactgtctacagtaacttgatgtttatgattctaaagtctgtaatcccctgtggaacaatctgaacttttcatacatgtccaatcctacaatgcccagtagaacccctaactttgtccttaaggggatcctcaagctctcttgggacaatttcagttctccactttttcctgttttggcaaaagtgcacagttgtacaattagttgacttggtgttcaaggaaaatttatacacacgtttcttcaacttgggaaataaaacctctgaaacgaatcagggtgccacgatttctacttatgtttttgtcattttagtgctataattatgtttatttctactttagaaaacctaacacctttaaaggatctccacaatttcctccaakaaatgggtaagagtaaaatgatttctatagtatttattattctttaggtagaaagtttaaaatttgtttaataataatttaagattaggtttataagatgtcagaataggtagatatgaaaagtattagtgaattatctgcacactttattttttttatttttttgcatactttatttttacaattaaagtctgttccctacttctctagtagttagaaaataaaaataattaataaagcctcaacaagcaaaatagctgtaatactgatttgctcccttcagtgatgttttattaccttgttaacctaattatagtgactttataaggta

SEQ ID NO: 16058 - DNA, 741 bp, Homo sapiens
gtataatttcaattcttaaaactagaactgtctacagtaacttgatgtttatgattctaaagtctgtaatcccctgtggaacaatctgaacttttcatacatgtccaatcctacaatgcccagtagaacccctaactttgtccttaaggggatcctcaagctctcttgggacaatttcagttctccactttttcctgttttggcaaaagtgcacagttgtacaattagttgacttggtgttcaaggaaaatttatacacacgtttcttcaacttgggaaataaaacctctgaaacgaatcagggtgccacgatttctacttatgtttttgtcattttagtgctataattatgtttatttctactttagaaaacctaacacctttaaaggatctccacaatttcctccaataaatgggtaagagtaaaatgatttctatagtatttattattctttaggtagaaagtttaaaatttgtttaataataatttaagattaggtttayaagatgtcagaataggtagatatgaaaagtattagtgaattatctgcacactttattttttttatttttttgcatactttatttttacaattaaagtctgttccctacttctctagtagttagaaaataaaaataattaataaagcctcaacaagcaaaatagctgtaatactgatttgctcccttcagtgatgttttattaccttgttaacctaattatagtgactttataaggta

SEQ ID NO: 16059 - DNA, 741 bp, Homo sapiens
gtataatttcaattcttaaaactagaactgtctacagtaacttgatgtttatgattctaaagtctgtaatcccctgtggaacaatctgaacttttcatacatgtccaatcctacaatgcccagtagaacccctaactttgtccttaaggggatcctcaagctctcttgggacaatttcagttctccactttttcctgttttggcaaaagtgcacagttgtacaattagttgacttggtgttcaaggaaaatttatacacacgtttcttcaacttgggaaataaaacctctgaaacgaatcagggtgccacgatttctacttatgtttttgtcattttagtgctataattatgtttatttctactttagaaaacctaacacctttaaaggatctccacaatttcctccaataaatgggtaagagtaaaatgatttctatagtatttattattctttaggtagaaagtttaaaatttgtttaataataatttaagattaggtttataagatgtcagaataggtagatatgaaaagtattagtgaattatctgcayactttattttttttatttttttgcatactttatttttacaattaaagtctgttccctacttctctagtagttagaaaataaaaataattaataaagcctcaacaagcaaaatagctgtaatactgatttgctcccttcagtgatgttttattaccttgttaacctaattatagtgactttataaggta

SEQ ID NO: 16060 - DNA, 572 bp, Homo sapiens
tgcagttaacgcaatcatcacagggtcctgaggtgacatacatcctcctcagcattcgaagatgatgggattaagagattaaagtaaagacaggcataggaaatcacaagggtattgattggagaagtgataagtgtccatgaaatcttcacaatttatgttcagagattgcagtaaagacaggcataagaaattataaaagtattaatttgaggaactaataaatgtccatgaaatcttcacaattaatgttcttctaccatggcttcagctggtccctccattcagggtccytgacttcccgcaacattctataaactcaaataattgcatttttccacctcttcagttcccctactatagttttcattagcacagtgtaataaatgcatgaataggacattctgatgagtgtatgattttattttaactcctctcctccagtattcactttataaattcttattgaatattctttttatatttatttcagttcactcagggtacatccaatgaggacatggatgacgaaaatgcaacattgctgacagagtttgttctcacaggactta

SEQ ID NO: 16061 - DNA, 572 bp, Homo sapiens
tgcagttaacgcaatcatcacagggtcctgaggtgacatacatcctcctcagcattcgaagatgatgggattaagagattaaagtaaagacaggcataggaaatcacaagggtattgattggagaagtgataagtgtccatgaaatcttcacaatttatgttcagagattgcagtaaagacaggcataagaaattataaaagtattaatttgaggaactaataaatgtccatgaaatcttcacaattaatgttcttctaccatggcttcagctggtccctccattcagggtccttgacttcccgcaacattctataaactcaaataattgcatttttccacctcttcagttcccctactatagttttcattagcacagtgtaataaatrcatgaataggacattctgatgagtgtatgattttattttaactcctctcctccagtattcactttataaattcttattgaatattctttttatatttatttcagttcactcagggtacatccaatgaggacatggatgacgaaaatgcaacattgctgacagagtttgttctcacaggactta

SEQ ID NO: 16062 - DNA, 524 bp, Homo sapiens
taaagtcttcagagactcacatatgacttgcgagatcaaggctgtgttctggcaggtctctcaccattggcaaaaaaamcaaaaaagtatcattcccattgaatatcctgctacataatgaattttcacattgaacatttaatttcccatttaaataaacccatctggaatttgatttctatatgtgtttcttttttccaaataattagctagttatcccagcaccatttgtggcataatctatactttccccactgggatatgccgtaatagcatataatgcattcctatagaaacttgagactctttctggattttctattctgtttattgtgtcaaggatcataaactgggtccctgtaccccatttcagggctccagatgtgtttttgatcttgttttggtttttgtcagaagtgtgtttgaatattgtgaattttcatgcctttaggcagctcacaaagtcagggctatcttagagcaaggtacttgcccaagcccttagagcacttgaggattttgcc

SEQ ID NO: 16063 - DNA, 530 bp, Homo sapiens
attgggttttttaatcaattaaaatttaattggtttatttttatcaattattattcttttactggggacaggtccataggattcctaataccactgttcaggaaataaaactgtgctaaaagttccatttaaaaaaagaattttaggtatgtatgtatttattatttaataaataggctctcactatgtcacacaggctggtctcaatctcctgggttctagtgatccaccagcctcagtctcccaaagcattgggattacaggcatgagccaccacactgagcaaaaaggattttagaaattaaaaaaaaaaagcaacatttatttatttatttatttattttattttttaatttttaattttttttgagatggagtcttgctctgttgcccaggctggaatgcagtggcacaatctcggctcacygcaacctccacctccggggttcaaccaattctcctgccttagcctctcgagtagctgggaccacaggtgcatgccaccacactgggctaacttttttgtattt

SEQ ID NO: 16064 - DNA, 539 bp, Homo sapiens
gctgaactctgtgttctgtgcttcatcactaagacaattccccaaagagaaacagcagtggaaaagcacagataccaattcttgaaaaatgagcttttgtttgcataaagagttaagttgcagaaataataaactaagttataaccgtacaaacctcatgtgactgtacacaggcaaagagaaattctttttatggttgctaatattattactttgtttcttaagtacttcaggagtccctgtttccagtaagatgcaacacatagaaacattccattttgaggcaggagaattgcttgaacccgggaggcagaggttgcagtgagccgagattgcaccattgcactccagcctgggcaacaggagtgaaatctgtctcaaaaaaaaaaaaaaaaaaaaaaargaaggaaggaaataaaaaaagagaaacattccattttaaacaaattttacacaaattttttcaagcacaaaggtacacattgatttcaggcatgaaattgaattaataattctccaccatcacataacttgaatgt

SEQ ID NO: 16065 - DNA, 539 bp, Homo sapiens
gctgaactctgtgttctgtgcttcatcactaagacaattccccaaagagaaacagcagtggaaaagcacagataccaattcttgaaaaatgagcttttgtttgcataaagagttaagttgcagaaataataaactaagttataaccgtacaaacctcatgtgactgtacacaggcaaagagaaattctttttatggttgctaatattattactttgtttcttaagtacttcaggagtccctgtttccagtaagatgcaacacatagaaacattccattttgaggcaggagaattgcttgaacccgggaggcagaggttgcagtgagccgagattgcaccattgcactccagcctgggcaacaggagtgaaatctgtctcaaaaaaaaaaaaaaaaaaaaaaaggaargaaggaaataaaaaaagagaaacattccattttaaacaaattttacacaaattttttcaagcacaaaggtacacattgatttcaggcatgaaattgaattaataattctccaccatcacataacttgaatgt

SEQ ID NO: 16066 - DNA, 539 bp, Homo sapiens
gctgaactctgtgttctgtgcttcatcactaagacaattccccaaagagaaacagcagtggaaaagcacagataccaattcttgaaaaatgagcttttgtttgcataaagagttaagttgcagaaataataaactaagttataaccgtacaaacctcatgtgactgtacacaggcaaagagaaattctttttatggttgctaatattattactttgtttcttaagtacttcaggagtccctgtttccagtaagatgcaacacatagaaacattccattttgaggcaggagaattgcttgaacccgggaggcagaggttgcagtgagccgagattgcaccattgcactccagcctgggcaacaggagtgaaatctgtctcaaaaaaaaaaaaaaaaaaaaaaaggaaggaargaaataaaaaaagagaaacattccattttaaacaaattttacacaaattttttcaagcacaaaggtacacattgatttcaggcatgaaattgaattaataattctccaccatcacataacttgaatgt

SEQ ID NO: 16067 - DNA, 1253 bp, Homo sapiens
tatctagattttctttgcttaatttcagaggctagaacacattagactctaaataaatgtgaatgagtgataaatattatatttacagatagctgccacattacaattctgtcctcccactggtggtggaatcttatgtacttttcaccatctccattttgcattcagactgaacatagctatgttattcctttcacctgggtgatttgaaaccatctctctatttctatttgtagagatcttatctatcaagcccttctcaaatgccacttcaaaatactttttctaatctccaattgtcttagtcaatttatgctcttataacaaaataacacagactaggcaatttatgaaaaccagacgtttatctgtcacagtactggagactaggaagtccaagatcaaggcgttggcaggtctgatgtctggtaagggctgttctctccgttcaagatggtgtcttgatgctgcatcttccagagacaaggaacactgtttcctcatatggtggaaggcgggagagcaagaggaatgaactccctccatggagctctttcatgagggctcctaaacccattcctgtggtaggagtcctgatggtctcatcacttcctgtaggctccacctcaacactgtcacattgtcaacgctgaatcttggaggaggcacagtgaaaccacagcaccaatcaagtatgatctttctcccctcatgtgtttagacctcccatgcacttttatacgttgtgtttcatggtttcttcctgtacaaataaggtgctataaatggatagctatagttttgggtttcatttcaacaaaacacccttcctagttgtttgaaccccaagagaaatatgaggacaggccccaccttccattacaaaagctgaaagggattgcatgatcctttttccagtttcttggccattcacgtgtgggcacatatctaggcccagccaactgatggctctttattagaacttggaacccgatgaaatgatgcaaaagacctgaaagaatcagagatgattctgagaaattgagcagagatrcaggtccaggaacgtggcagcaagtgcctaagttcagcagagcccagctacatggtgacaagtgtcaaatgacaacattctagtggtggcattccaagatctgcttccgtcgaatgaacttggctgtgctgagtttccctcagttcttaccttgcttctccaacatcttcaatgattttgtgaactattcaatatcctt

SEQ ID NO: 16068 - DNA, 1253 bp, Homo sapiens
tatctagattttctttgcttaatttcagaggctagaacacattagactctaaataaatgtgaatgagtgataaatattatatttacagatagctgccacattacaattctgtcctcccactggtggtggaatcttatgtacttttcaccatctccattttgcattcagactgaacatagctatgttattcctttcacctgggtgatttgaaaccatctctctatttctatttgtagagatcttatctatcaagcccttctcaaatgccacttcaaaatactttttctaatctccaattgtcttagtcaatttatgctcttataacaaaataacacagactaggcaatttatgaaaaccagacgtttatctgtcacagtactggagactaggaagtccaagatcaaggcgttggcaggtctgatgtctggtaagggctgttctctccgttcaagatggtgtcttgatgctgcatcttccagagacaaggaacactgtttcctcatatggtggaaggcgggagagcaagaggaatgaactccctccatggagctctttcatgagggctcctaaacccattcctgtggtaggagtcctgatggtctcatcacttcctgtaggctccacctcaacactgtcacattgtcaacgctgaatcttggaggaggcacagtgaaaccacagcaccaatcaagtatgatctttctcccctcatgtgtttagacctcccatgcacttttatacgttgtgtttcatggtttcttcctgtacaaataaggtgctataaatggatagctatagttttgggtttcatttcaacaaaacacccttcctagttgtttgaaccccaagagaaatatgaggacaggccccaccttccattacaaaagctgaaagggattgcatgatcctttttccagtttcttggccattcacgtgtgggcacatatctaggcccagccaactgatggctctttattagaacttggaacccgatgaaatgatgcaaaagacctgaaagaatcagagatgattctgagaaattgagcagagatacaggtccaggaacgtggcagcaagtgcctaagttcagsagagcccagctacatggtgacaagtgtcaaatgacaacattctagtggtggcattccaagatctgcttccgtcgaatgaacttggctgtgctgagtttccctcagttcttaccttgcttctccaacatcttcaatgattttgtgaactattcaatatcctt

SEQ ID NO: 16069 - DNA, 570 bp, Homo sapiens
atcatttaatatcttttttttttctttttttgaaatggaatctccctctgttgccaggctggagtgcagtgtcgtgatcttggctcacggcaacctctgcctccttgattcaagcgattctcctgcctcagcctcccaagtagctgggattacaggggcacaccacaacacccagctcattttcgtatttttagtagagatagggttccaccatgttggccaggatggtcttgatctcctgacctcgtgatctgcctgtctcggcctcccaaagtgctgagattacaggcatgagtcaccgcgcccagccagatcatttaatatcttmatttttgtgggttttgctttgagaatacattcaacgaaaaaaaaagcaagatatttaaaatttgaaataaatatttctaaggcacctaatactttttaaaaatcatctcacttaaaaaattagaaatgactagctgtctgaatacgtcctagaagatttgactctaaaataaatgaactaagttgtaaagatcacagtaaccagtgtgagtaattaatatgagtaatcacattgtgtgccta

SEQ ID NO: 16070 - DNA, 593 bp, Homo sapiens
gatgttgctctttgtcttgacatccttgacatcttcaaaaatgtccacaacatagtaaggtggtggttggtcaagcacttactccttaaataaagttgcattctgacataagcattgaaaggattagagatggaagaagagaggaactggagagctgactttgctttatgaactgawataaagctagcactggcagttcttaaagatacgttaaggaaatctaatcatgccttgcatgaaaaactgactattcccaacagaaatagctatgacttttgcttcctttccatgagtttggctactatagagtcttgattaaaagttaaatgccggtgtctcatgctggtaaaccaatttttattttttaaagtaatatcttacattttattttcaaaaacatattgattaaagcaacattgtggtaacattaaagaaataacatattttatgcaaagtcctaccatcttacttaaacaaatgtttacaattttacaggtaaaatttaaataatgtgcatttgttgtttaattagtatgtattcatagtgacatggttgttgtcatagtatatgaaacattttgtgtacggcgtgt

SEQ ID NO: 16071 - DNA, 548 bp, Homo sapiens
tttgccggggggtggcatacaaaaacctatcttgttgattatattgttttacagaatgctttgcctctatccactgtataccaggaacaccctttttcctcagttgtgacaagtaaatgtatccacatcttgctaaatatataccattcttggaaagacataattgcctcagttgataactgagaaatatttgaacatagccttgaaggaaggatagaactgaccaattcatatatgtaaatagagggatatttatatatcaacttccagcaggccccaccttcttcaacattggggattacatttcartgtgagatttgggcagggacacacatcaggatctttattcctatttctttgtgggatgtaaaagaaataattttcatatacgtgatccagcaatcttatataaatctaatataataccctcacatgggtaaaaaaaatcagaaaatttagagcacaatatatgattgagtcagtattaatgtcccatgaaaatcatttatgctgaacggacagagaatcgagacacaatctccctgcat

SEQ ID NO: 16072 - DNA, 534 bp, Homo sapiens
tttagttctcaaaatctagtggtaaaattataaattttagagtttctatataaaccttttctcttcttctaatgacagacatttctttttaattttatatattccaaagccatatgctccatgcctggtagtgatggtcagatatcaattagcattaacaatctgaagaagccccatacaactaattctatattaacccacaatcttttctgctgttacaaaattttatcaatctttggtttgaytgtgttagatattgtcaaacaacttcttaccttcgtttaatgttcttacggttgactacaatggattctgttctattcttccaagctttaggatgagaattgagttttattctctctttgttactcttcaacagactgaatgcatgtgttccctcaaaattcctatgttgaaatctaattcccattgggatggtacttgaaggtgcagactttaggaggtgataagccatagcagttgagcccttatgaatggaattagtgctcttataaaagagacctcagtgagcct

SEQ ID NO: 16073 - DNA, 1069 bp, Homo sapiens
ctaatatcttcatttgtaaaaacttgttgttttaaccctatttaagattttctcccagacaagtttttaagtatacacatatctttgaattaaaagcagcaagtaatttttacataaaacmtattaagtatatttattttcttgctttgtttatatgtactgatggtagattagcgtcaaggtcagtgaaatcacatgcaacctattttaaaagttgtttttttcatttattttcttttaatgctcacactgttttgcaaagtctgtgtaatttcatatatgtaattactctttcaacacaaaaattccctgatgttggcttatttcaacaaaaaacagcattatatctgatccaacaggctaattctcctgagacatcttatagtaacaaaccaatatgaacgtaaaaaaaaaatttacaaagaaattgggaatacagttttgcatttctaagggtctagcctcacagtgctaagttaaatttcagatctcaacttctctgcataattcacagaaaaaaaataaaagtggctgggcgcggtggctcacacctgtaatcccagcactttgggaggccgaggtgggaggatcacaaggtcaggagttcgagaccagccttatcaacatggtgagaccctgtctctactaaaaatacaaaaaaattagccgggtgtggtggggcacgcctgtagtcacagctactcaggagggtgaggcaggagaatcgcttgaccccaggaggcagaggttgcagtgagcttagatcgtgccactgcactccagcctgggcatcagaataagactccgtctcaaaaaaaaaaaaaaaagaaaaaagaaaaacaaaaaaagtaaaaataaatttcagatctcaggactctttgggcactgactttaatttatagataggagtgaatttcttatggctgattaataaactttcagacaatataaagattacaaaggttgggaggctgaggcaggagaatcgcttgaacctgggaggtggaggttgcagtgagccgagattgtgccactgcactccagcctggatgacagagcaagactccat

SEQ ID NO: 16074 - DNA, 1069 bp, Homo sapiens
ctaatatcttcatttgtaaaaacttgttgttttaaccctatttaagattttctcccagacaagtttttaagtatacacatatctttgaattaaaagcagcaagtaatttttacataaaacctattaagtatatttattttcttgctttgtttatatgtactgatggtagattagcgtcaaggtcagtgaaatcacatgcaacctattttaaaagttgkttttttcatttattttcttttaatgctcacactgttttgcaaagtctgtgtaatttcatatatgtaattactctttcaacacaaaaattccctgatgttggcttatttcaacaaaaaacagcattatatctgatccaacaggctaattctcctgagacatcttatagtaacaaaccaatatgaacgtaaaaaaaaaatttacaaagaaattgggaatacagttttgcatttctaagggtctagcctcacagtgctaagttaaatttcagatctcaacttctctgcataattcacagaaaaaaaataaaagtggctgggcgcggtggctcacacctgtaatcccagcactttgggaggccgaggtgggaggatcacaaggtcaggagttcgagaccagccttatcaacatggtgagaccctgtctctactaaaaatacaaaaaaattagccgggtgtggtggggcacgcctgtagtcacagctactcaggagggtgaggcaggagaatcgcttgaccccaggaggcagaggttgcagtgagcttagatcgtgccactgcactccagcctgggcatcagaataagactccgtctcaaaaaaaaaaaaaaaagaaaaaagaaaaacaaaaaaagtaaaaataaatttcagatctcaggactctttgggcactgactttaatttatagataggagtgaatttcttatggctgattaataaactttcagacaatataaagattacaaaggttgggaggctgaggcaggagaatcgcttgaacctgggaggtggaggttgcagtgagccgagattgtgccactgcactccagcctggatgacagagcaagactccat

SEQ ID NO: 16075 - DNA, 516 bp, Homo sapiens
ctcatttttgccctgattgatctcagtaccatggaacagctaggacctgatgccttcctgcttcctaaatgtgtgtgtgtgtgtgtgtgtgtgtgtgtgtgtgtgtctgtgtctgtgtgtgtgtgttgtctgtttgagacagaaagagacagatgcatagaaacagggaaagaagagaatgagcaggaagaaggcagtgggagagagagcctgagaagcagagacagagagaaataaatagcccaatttcttggtccagagccagcttacatacacttcagaatttatgtgcctagggggactacrtaacatccagaagacccagtcctttatgacttctttaatgacttagactgaggaaaatccaaattcagccttgcctaaactcccagcataatataaaggtcagggacgagagtaatacaaagtcatcactggaatgtgtcctcagctacaggtggcaagtacagtatgatgttatagcttatgcctgggagtggaagggataaaataaaa

SEQ ID NO: 16076 - DNA, 516 bp, Homo sapiens
ctcatttttgccctgattgatctcagtaccatggaacagctaggacctgatgccttcctgcttcctaaatgtgtgtgtgtgtgtgtgtgtgtgtgtgtgtgtgtgtctgtgtctgtgtgtgtgtgttgtctgtttgagacagaaagagacagatgcatagaaacagggaaagaagagaatgagcaggaagaaggcagtgggagagagagcctgagaagcagagacagagagaaataaatagcccaatttcttggtccagagccagcttacatacacttcagaatttatgtgcctagggggactacataacatccagaagacccagtcctttatgacttctttaatgacttagactgaggaaaatccaaattcagccttgcctaaactcccagcataatataaaggtcagggacgagagtaatacaaagtcatcactggaatgtgtcctcagctacaggtggcaagtacagtatgatgttatagcttatgcctgggagtggaagggataaaawaaaa

SEQ ID NO: 16077 - DNA, 469 bp, Homo sapiens
ccctgcgctcacagagaatggtctgagccttggtagctttgagaccaactttatctttttgctctaacagagcaacaatatcaaggaaagtacatcagtagacttgggccaacattagcatttggaaaaaacttggactgtagttgcactggataaataccctcagatggttctttaaatcttaagataattcttaataattgaaatagactcaagttcagttttgttataagttctagttctatagaagcaatgcatttcttaataaatgaagcataaaaccttcyaaacagtactgtacaatgaatctacttttctgtatctccaacacctaacacaattatgagcacatagtagacattcaataatgcttgttaattcctaactttggcatgatattatttctccaaaggcctccagagtaaggcttgaggtagaaaagaaaggaaggggaagagtcccctcttgg

SEQ ID NO: 16078 - DNA, 536 bp, Homo sapiens
agagagaattgattgtaaatgtttcttatcagacttaaaaaggtgcctagattagggaaaagacctggaaagggattccctgtagcatgtagactttccccacaagagacaactttgtagggacatttcaaaatatgataamaaatatattttagggtaaaatatttttatttctttcagggcctgctatctgtcatgtaatgctacactagagtcaggctggaatttggtgtcttattgctacaaaaagtcttaagatctctgttgtaatgccagttgtgcctggtcggatgtgctggtcagttgtgcctgaattccaaaggaaggagggtataatgaggcatatctgacccctacttcccatcatggtctgaaccagtttttcaggttaactttggaatgaccctggctgagaggaggggtgcattcaaatagttgaggggcttggaattttatttgtggtttacactatagaaagtatttttccagtattacctggacaatgtgtctccctgtcagtatccagggaatggcac

SEQ ID NO: 16079 - DNA, 536 bp, Homo sapiens
agagagaattgattgtaaatgtttcttatcagacttaaaaaggtgcctagattagggaaaagacctggaaagggattccctgtagcatgtagactttccccacaagagacaactttgtagggacatttcaaaatatgataaaaaatatattttagggtaaaatatttttatttctttcagggcctgctatctgtcatgtaatgctacactagagtcaggctggaatttggtgtcttattgctacaaaaagtcttaagatctctgttgtaatgccagttgtgcctggtcggatgtgctggtcagttgtgcctgaattccaaaggaaggagggtataatgaggcmtatctgacccctacttcccatcatggtctgaaccagtttttcaggttaactttggaatgaccctggctgagaggaggggtgcattcaaatagttgaggggcttggaattttatttgtggtttacactatagaaagtatttttccagtattacctggacaatgtgtctccctgtcagtatccagggaatggcac

SEQ ID NO: 16080 - DNA, 1039 bp, Homo sapiens
gtttcttcactctccccccctcctcacccctgcacacacatacatttctccttcctggggaactccaaagaaaacaaaggccctttarcaatcaagtagattgtctctcttgatggcatcccatgagttatggaattacatactgcaggcccaggtggattagggcccttagaaagtttgcttgatcaacagagtgctgttgattttttcaactgaattaattactcttggagtccaaactctccagtgtgccacagtcctcatcacttcctgtatcttaaatattgcattatctgtcccctaaaagtatttgaacatgtgacccagagaagaggacttacaacttgactaggcaacttctgtcacactggattcatatgaaattccactgcaagtgacatcaccagattggggaccctgaagtgtttgagtatcttctccacatctggtcatttaggctaagaaattccttcttgtctaccaggtcttttagcattcattttgtaagtcattcaacacctacttactgagaaggaatactgggctagacagtgtgctaggggctggggaaaccgcaatgcataggagagaattcccatctccaagaggctcacagtcaaacagacataaataggtgattacaatatacactaacaacatagttttagaaacaactagcagaattatatagacgaagatgccaggaaaggcttctcagagaatctggcttggcaaatatctcaacaaagagggctgagcagggatgagccgaaggagaggatggaaagtaggttgtgggtgagttttccaggcagcatgtgcaaaggtccaggagaaagaggaaggagcctgtacttggaggaatattcgattactattatcagtgtcacacttgctattcatctagacagaagctcctgaaacaaaaaggatacacttcaaaagatgccaatatatccatgaccacacaaaagagtgtctagtcatataataaagggtgtacatatgcaggcaactcacatcctgccaaatattaaat

SEQ ID NO: 16081 - DNA, 1039 bp, Homo sapiens
gtttcttcactctccccccctcctcacccctgcacacacatacatttctccttcctggggaactccaaagaaaacaaaggccctttaacaatcaagtagattgtctctcttgatggcatcccatgagttatggaattacatactgcaggcccmggtggattagggcccttagaaagtttgcttgatcaacagagtgctgttgattttttcaactgaattaattactcttggagtccaaactctccagtgtgccacagtcctcatcacttcctgtatcttaaatattgcattatctgtcccctaaaagtatttgaacatgtgacccagagaagaggacttacaacttgactaggcaacttctgtcacactggattcatatgaaattccactgcaagtgacatcaccagattggggaccctgaagtgtttgagtatcttctccacatctggtcatttaggctaagaaattccttcttgtctaccaggtcttttagcattcattttgtaagtcattcaacacctacttactgagaaggaatactgggctagacagtgtgctaggggctggggaaaccgcaatgcataggagagaattcccatctccaagaggctcacagtcaaacagacataaataggtgattacaatatacactaacaacatagttttagaaacaactagcagaattatatagacgaagatgccaggaaaggcttctcagagaatctggcttggcaaatatctcaacaaagagggctgagcagggatgagccgaaggagaggatggaaagtaggttgtgggtgagttttccaggcagcatgtgcaaaggtccaggagaaagaggaaggagcctgtacttggaggaatattcgattactattatcagtgtcacacttgctattcatctagacagaagctcctgaaacaaaaaggatacacttcaaaagatgccaatatatccatgaccacacaaaagagtgtctagtcatataataaagggtgtacatatgcaggcaactcacatcctgccaaatattaaat

SEQ ID NO: 16082 - DNA, 1039 bp, Homo sapiens
gtttcttcactctccccccctcctcacccctgcacacacatacatttctccttcctggggaactccaaagaaaacaaaggccctttaacaatcaagtagattgtctctcttgatggcatcccatgagttatggaattacatactgcaggcccaggtggattagggcccttagaaagtttgcttgatcaacagagtgctgttgattttttcaactgaattaattactcttggagtccaaactctccagtgtgccacagtcctcatcacttcctgtatcttaaatattgcattatctgtcccctaaaagtatttgaacatgtgacccagagaagaggacttacaacttgactaggcaacttctgtcacactggattcatatgaaattccactgcaagtgacatcaccagatyggggaccctgaagtgtttgagtatcttctccacatctggtcatttaggctaagaaattccttcttgtctaccaggtcttttagcattcattttgtaagtcattcaacacctacttactgagaaggaatactgggctagacagtgtgctaggggctggggaaaccgcaatgcataggagagaattcccatctccaagaggctcacagtcaaacagacataaataggtgattacaatatacactaacaacatagttttagaaacaactagcagaattatatagacgaagatgccaggaaaggcttctcagagaatctggcttggcaaatatctcaacaaagagggctgagcagggatgagccgaaggagaggatggaaagtaggttgtgggtgagttttccaggcagcatgtgcaaaggtccaggagaaagaggaaggagcctgtacttggaggaatattcgattactattatcagtgtcacacttgctattcatctagacagaagctcctgaaacaaaaaggatacacttcaaaagatgccaatatatccatgaccacacaaaagagtgtctagtcatataataaagggtgtacatatgcaggcaactcacatcctgccaaatattaaat

SEQ ID NO: 16083 - DNA, 560 bp, Homo sapiens
cagaatgcaggtgtaaaaatcagcactaggacgtcaaagcgatggtaccacagtcaaatcccacaatgtctacactctaccaagcacttgckcacgctcccccttttccattcagtattcccaagaggggttcggaagaaccccgcgtccactgtaagctcaggggagagcgggagccagggaggtgaagtgcacagactggatagaggcggcgggcagaaccgcgggggtgagagggcgcgtggttgcggggcgggagccgctgctgaaaggcggcctgggttgtcgtgtggggtgactgtcggtggaatctttggcagagagtggtttggaagaatggcgaggggggcagtgggtagggtggtgaccctgagcgtccggccagggcgaggacgctgtgctgtccctgtagggcatgcgctcattcccacttacctggcaggaaagagaccgtggtcacgaagggggttctcccagagtgaagcttcttcatcgcactctagagttgctgatctctgtgatttcttcaatgtgggaaacggtgtttgtgctagaagagg

SEQ ID NO: 16084 - DNA, 560 bp, Homo sapiens
cagaatgcaggtgtaaaaatcagcactaggacgtcaaagcgatggtaccacagtcaaatcccacaatgtctacactctaccaagcacttgcgcacgctcccccttttccattcagtattcccaagaggggttcggaagaaccccgcgtccactgtaagctcaggggagagcgggagccagggaggtgaagtgcacagactggayagaggcggcgggcagaaccgcgggggtgagagggcgcgtggttgcggggcgggagccgctgctgaaaggcggcctgggttgtcgtgtggggtgactgtcggtggaatctttggcagagagtggtttggaagaatggcgaggggggcagtgggtagggtggtgaccctgagcgtccggccagggcgaggacgctgtgctgtccctgtagggcatgcgctcattcccacttacctggcaggaaagagaccgtggtcacgaagggggttctcccagagtgaagcttcttcatcgcactctagagttgctgatctctgtgatttcttcaatgtgggaaacggtgtttgtgctagaagagg

SEQ ID NO: 16085 - DNA, 560 bp, Homo sapiens
cagaatgcaggtgtaaaaatcagcactaggacgtcaaagcgatggtaccacagtcaaatcccacaatgtctacactctaccaagcacttgcgcacgctcccccttttccattcagtattcccaagaggggttcggaagaaccccgcgtccactgtaagctcaggggagagcgggagccagggaggtgaagtgcacagactggatagaggcggcgggcagaaccgcgggggtgagagggcgcgtggttgcggggcgggagccgctgctgaaaggcggcctgggttgtygtgtggggtgactgtcggtggaatctttggcagagagtggtttggaagaatggcgaggggggcagtgggtagggtggtgaccctgagcgtccggccagggcgaggacgctgtgctgtccctgtagggcatgcgctcattcccacttacctggcaggaaagagaccgtggtcacgaagggggttctcccagagtgaagcttcttcatcgcactctagagttgctgatctctgtgatttcttcaatgtgggaaacggtgtttgtgctagaagagg

SEQ ID NO: 16086 - DNA, 556 bp, Homo sapiens
tggctcaagcctataattccaccactttggaaggccaaagcagccagactgctggtgcccaggagtttgagatgagcctgaacctgggcaaaatcccatctctacaaaaaatacagaaatcagccaggcattgtggtgtgcacctgtagtcccagctactaaggaggctgaggtgggaggatctcttgagtctggaaattcgaggctgcaatgaactgtaattatgccactgcacttcagtctgagtgacaaagagagatcctgtctcaaaaacaaacmaaccaaccaaccaacaaaaacaaacaaaaaaacaaagccccccaaaacgaaagcaaaacagccttattgttgagagaaagtttcaacggtctggataaaaaaaaaagtcaaaacagccataatattcccttaagccaaagcctaatccattgcaaagctcttactcttttcaattctataaaggctgagagaggtgaggaagctgcagaagaaaagttagaagctagcagaagttggttcatgaggttgtatttttatttatttatttatttatttg

SEQ ID NO: 16087 - DNA, 616 bp, Homo sapiens
gttccakctgtcagcaggaaactcagaagtaatttattcagacaattctgtgctcctttaatgagtgtgggtgctagttagcctctatgaaatatagacagtctcaattgtttgtccatgtaacttgtaacgtgaaagactaagtagaaatctagatactaaattcattagaaaagatggccaatattaattagaatttaatatgggctatatgattgaagttgaaaaattatacttatgaacacatacttctgaaagagaaaaatgtggattcattttccttaatttaactcactactgagactacaatttaaaaatcctgtttaatgaaattttataacctctctatttcagtatacagttgcttcagtaaagtcttcagcagaaagtattaattgagttaaataacttcccctaatgaatcagtattattttggataataaacctattttccagagagattttaatttatagtcaccctttcctatgtctgcgagtgtaactgttgaaatttcctttctatgttaaaagtatatagtataggttttgataaccaatttcagaacatggcagtaataatgttcaatcctattttgggagatagtttttttcaaa

SEQ ID NO: 16088 - DNA, 533 bp, Homo sapiens
tttggtgattaatagactctgaccctaagtttctttatctgcaaaatgggtttaaggataattagatttgaagttgtagcaaggattaaaaattaaataatatgcatcaaatgaatgccacatattggtatgtgtctactcaaaaatcaattaytgagtacttactgtgtacccaggcacagtactaatgatggggaaacacaaatgagcaagacagatacatttcctagacataacgtgccagagcgtacagtaagtagctaagtaaaaatatgcttttaaaaaatctaatatcagaaaaaaaactgaagaacatccctcagagtaactggcttgtactcttcacagatgtccaaacaagaaagataaagaaaggttgaagaattgtttcacaataaaagactcaacatgaaaactaaatgcagtatatgagtctagattggattctggacatgggagaaataactaaaaaggacattaccagaacaactgacaaatttaaatataaactgcagatttggcaatgttatatc

SEQ ID NO: 16089 - DNA, 549 bp, Homo sapiens
tatatatatatatatggaatctgaggcccagagagattagggaatttgtctcaaatctgacttagctaatctatgataaaaaaacaaatgtttggacacaggattatctgacccttaagttgggggaggggttcttattttggtcagaggcaattgaaaattggcagtaggtggatcagtctggatgtgtaatttggaaaatattcccggtgtttttctggagtctcacctaatctgctctgatgcctaatagcccgtccgttaccagtgctttctaacacagggttagccattgctattctcatcagctcyatgtttagaagcttaacgcatcgactcagcaagccacaaacaccgtatcatggatgcgctggctagcacgagcattctgtgggcctgctaaggggacggggcagtggagagcgcagtgtggagcctggaatactgatgctccagaaacgtggagagagatgccgctcttcatggcaggtacgcaggccttgcttcctgcagcaagttaaaatcatccaccatcattagcaaagggct

SEQ ID NO: 16090 - DNA, 546 bp, Homo sapiens
ctctttggaaaccacatagagctgtgctggctcacgggatgtcctgtttgcttctgcctcagttaccttactttgcccatgggtctaccacaggcgctacctcattgtgtctgctgagaagtttacctgggaggggggaacaaagttgtccaaatctgcttgagctgaatgtatgatctatgcaaattctctctctcctctctctcttcctctctggctctcttagaagtttttttgttttgttttgttttgttttgtgtttaccttgcaaacaagatactgtataggaccctcttaagatggaggagggctttcttgcgccacctgtgtctacccctcacgttgtctttggctctggtcttaccaggygtatgcagggagaaagtgacctctcttccctctccacttggctgggaatattccaactgcctctgcctacagataccaccagaaagcgggttctgcaccttgtcatccccctccctaacgtcatctactccatccctcatgttcctccaacttgcttctcccatccctccttcaaaa

SEQ ID NO: 16091 - DNA, 556 bp, Homo sapiens
atgttgtcaatagcatttgtttgggtatttgttttagaggcctcactctaagttattaccgtccccttcattgttttcaaagacatgtggtgatatagtttttaaaaataactattttgttatagatcataatatgcataaaactgtacagaaatattttgtaatgtgttgattttaaaaaaagaatctgtaaataaagttttaaaaaaagaattcaaatggcacacgctgaaatatgtagatattttgctatttatttaaaggagtattttaagagatattgaactatctgaaattgaccagtaatcaaasttccaatcatctgaatgcttttccttgaggtagaatgtgagtctcagaaatgactgcattacctgcccttttttgcaccttttctgtctttttattttgcagaacaacaacaacaacaaaattgtgccttagctgtatttttttgtctaggggagtttgtttctgtctgacaaagcaacattttttgcagaaaacagtggatgtattaaatactgtatcataccaaaaacactgcaggtgtata

SEQ ID NO: 16092 - DNA, 556 bp, Homo sapiens
atgttgtcaatagcatttgtttgggtatttgttttagaggcctcactctaagttattaccgtccccttcattgttttcaaagacatgtggtgatatagtttttaaaaataactattttgttatagatcataatatgcataaaactgtacagaaatattttgtaatgtgttgattttaaaaaaagaatctgtaaataaagttttaaaaaaagaattcaaatggcacacgctgaaatatgtagatattttgctatttatttaaaggagtattttaagagatattgaactatctgaaattgaccagtaatcaaacttccaatcatctgaatgcttttccttgaggtagaatgtgagtctcagaaatgactgcattacstgcccttttttgcaccttttctgtctttttattttgcagaacaacaacaacaacaaaattgtgccttagctgtatttttttgtctaggggagtttgtttctgtctgacaaagcaacattttttgcagaaaacagtggatgtattaaatactgtatcataccaaaaacactgcaggtgtata

SEQ ID NO: 16093 - DNA, 555 bp, Homo sapiens
atgattcaataagatccctttcagcagttatcatgctaattattttatcaagctcctatacataatttaattatgcatttgtttcttttctgtggctcctgattttcatatttgtttgtgtgtacatgtttgttcttctccttaagtatatttttagtgcaaaaaatctatttaaaaattatatttaaaaatmtgaatttttagattttttttttttgaggcagtgtctcactttgctgcccaggccggagtgcagtgacataatcttggctcactgcagccttgacctccccaggctcaggtgatcctcccacctcagcctcccaaggaactgggaccacaggcatgtgccaccatacccagctaacttttttttttttttgtatttttagtaaagacagggtttcaccatgtttcccaggctggtcttgaactcctgggctcaagaaatccaccagccttggcctcccaaagtgctggaattacaggcatgagccaccaaatccagcccttaagtagattataagtaggaaaggctaagactgtttcttttac

SEQ ID NO: 16094 - DNA, 283 bp, Homo sapiens
tttctgtcatcacagaaagttctatttaacagtgttaatctagagcagacattggcaacctttttctgtaaaaggccagagaatctttagtctttggaggccacactggtttcttgcaactactcaacattgccattgcaacatgaaagcagcaatagacaatacatttwaaaaaacgagcatgactgtgttctaatgacattttatttatagacaacgaaatttgaattttatataatttttatatgttatgagatgttacttttcctcaaccatagaagta

SEQ ID NO: 16095 - DNA, 519 bp, Homo sapiens
cctgggtgacagagcaagactccatctcaaaaaaaaaaataaaataaactggctgtcttgggaggtgatgaactccaggaggagcagacctaaaacaggagtgtgcttggtgcaccccaataaagaaggagattgtatgtctgacgtgaagaaggaagggcaaggggcgaggaggccgatgacaagataaagggggcatggccagatcccactgagtgcttcaggatgcagcaaggagaccagattcattctcagtgcaaggggcggcctcgtgttctcctcacatccctgtccatctctgttttttgccagctgctgtttctccacctgctcctaagtgctgctgttctcccagctccwctcattctacctgcaggaatcttggttactttcacgtggtaaccgagaccccctgctcctcggctatggactcaggtatcaaacactggcaggaccctctgtctgtatatcctgtgggttcctcaaaacttgcgcaaagccacctagcatcatctgtca

SEQ ID NO: 16096 - DNA, 533 bp, Homo sapiens
aataagaataggtgagaagagaagaatttagtttagaagcctgtaatacctcaaagttaaaaagccagggagaccacaaaaatattgagaaagtgcaaccaggaaatagatggaaaacaaaagcatattagtgtcctggaacgaagtaaaaatatagcacatgaggctgggcacagtggctcacacctgtaatcccaacactttgggaggccaaggagggtggatcacctgaggtcaagaatttgagaccagcctgaccaacatgatgaaacctcgtctctactaaaaatmcaaaaaaaaaaaaaaaaaaaaaaaattagctgggtgtggtggcagatgcctgtaatcccagctacttgggaggctgagacaggagaaatcgcttgaacccaggaggtggagcttgcagttagccaagatcgtgccactgtactctgcactccagcctgggcaacagagcgagactctgtctcaaaaaaaaaaaaaaaatacagtacatatatgcaaggagatttatatagcaataatcattg

SEQ ID NO: 16097 - DNA, 533 bp, Homo sapiens
aataagaataggtgagaagagaagaatttagtttagaagcctgtaatacctcaaagttaaaaagccagggagaccacaaaaatattgagaaagtgcaaccaggaaatagatggaaaacaaaagcatattagtgtcctggaacgaagtaaaaatatagcacatgaggctgggcacagtggctcacacctgtaatcccaacactttgggaggccaaggagggtggatcacctgaggtcaagaatttgagaccagcctgaccaacatgatgaaacctcgtctctactaaaaatacaaaaaaaaaaaaaaaaaaaaaaaattagctgggtrtggtggcagatgcctgtaatcccagctacttgggaggctgagacaggagaaatcgcttgaacccaggaggtggagcttgcagttagccaagatcgtgccactgtactctgcactccagcctgggcaacagagcgagactctgtctcaaaaaaaaaaaaaaaatacagtacatatatgcaaggagatttatatagcaataatcattg

SEQ ID NO: 16098 - DNA, 533 bp, Homo sapiens
aataagaataggtgagaagagaagaatttagtttagaagcctgtaatacctcaaagttaaaaagccagggagaccacaaaaatattgagaaagtgcaaccaggaaatagatggaaaacaaaagcatattagtgtcctggaacgaagtaaaaatatagcacatgaggctgggcacagtggctcacacctgtaatcccaacactttgggaggccaaggagggtggatcacctgaggtcaagaatttgagaccagcctgaccaacatgatgaaacctcgtctctactaaaaatacaaaaaaaaaaaaaaaaaaaaaaaattagctgggtgtggtggcagatgcctgtaatcccagctacttrggaggctgagacaggagaaatcgcttgaacccaggaggtggagcttgcagttagccaagatcgtgccactgtactctgcactccagcctgggcaacagagcgagactctgtctcaaaaaaaaaaaaaaaatacagtacatatatgcaaggagatttatatagcaataatcattg

SEQ ID NO: 16099 - DNA, 524 bp, Homo sapiens
aatttgacttccatatttagtattcaaatttttaagagaaaaattgtctaaaaaagaaggtattttctatgtgaaaatctaagtaggacatccttcaaatcccagttttattcttcaacaacaaaaacaacaaaaaccaactttttaatttgggaacattaggatttatagtttgaaattttagctagttttcatttacagaaacaatatctttcttgggaataatgattccaaagatatcttaacacatcataatgtttattcaaaattacttcactagaaaaaatttctaaaggtctgaaatatcactattgagaaaattcaagcaaatctccttcatatatatctattaaaatttccttagccattatatagttttaacagagagatatgatctcagygtatttttctccaaattaggtttattatactttaaaaaactgatcaatattaatagcattaattatcaggatgtgagaaaaccatattttcccttaaagagttttaggtaaacctgtctcatc

SEQ ID NO: 16100 - DNA, 794 bp, Homo sapiens
aatctataagtgttgaaatgattttataaagattcagactgtaaagctggaggaaactgagcaatagaatactggcaataaggtgattttttaaaatgagtgtcatgcagctgataactaatttgttctggtaaaatatctagtttttaaaacatgaaaaagaacaaatggtaaaaagtcaaaatttcctaatagttttcaaatttcaaagtgtttaatctcaacaagcaaagttagttcaacatatccactacatcccagaagctttctgtccagcatgatggacagacagtaaacaactgatacatgataaatgctacaatcccagaggtatgcagaggttgctcaggagctataagaaagggtaatcattgctcatagcttacatagcaatccattctccctcaagtgaaaaataatatgtyctagagtttggaacagaagaaggttttccccaccttctgcatttcccttgtggatacaattagtttcagtgtattccggtcaagaacaatatgaattaataaattatttcactacctcgcaaaaaaaatcaaactaaaatacacttttaccagttatctgcttatttcaaacaaaagaaaaattttgtctgaactcttcatttgctatatctcaatgcccttcattgccatttgtagccagatttaaattactagtttctttttaattttgttgtttatctgagtaaatttacctaattcacagggtcactgtaagaatgaaatgaaatatagtcatgcactgcataaagacatttgggtaaataatgg

SEQ ID NO: 16101 - DNA, 533 bp, Homo sapiens
ggattaagacctatattcttaacaagttctcaagattttgtgtggttagacacctgctcacctatttagcttcctttctcaaacttctccttttaaaaatatatttaagtcaaatggaatatctttcagttctatgagtttgtactcttttatctcaggtcttttacatgattttttttgtatgtggaatactctctcagaatttttactcctattcattctgtctcaatataggcagcccttttcccaggtaaattcacccaggcaccatgatgaggttggttcacatgttaaatatttctacagcatgcagcatttccttttagtggtatcgaatacttgcaattatttgtttaatatctataaaatgccatgagggcatggaccatacattttttagccctgtattctcaaaacctagtacaaatgcctgacccacagaaggtgttaatgagcatttgtggaatacatgcatgaatgcatgaatgaatgatcacactgctatmatttgttgttcacaattctgtcacaca

SEQ ID NO: 16102 - DNA, 569 bp, Homo sapiens
tcatagagagtgggttggaaacttaacactttttaaattctccagatgtctatttctaagccaatttactcaaaaatcataatgtaacaaaaatgaccttctaagttaacaggatttatctttcaatagtaagcaacagaaagtaagtcatttgaaaacatactgtagataaaacacccacctttcaatcaacattcagaaaataccctttatgttgctttggccacactcacaaacacacataataaacagtagaatagctgtaaactaccaacataagatttttccaagtgtgattttttaaatctcatttttatactaatgtagttataaaagcagrgacaaatatgtgaaaatcatcaccacactcacagagttgctttagaaataacaaagcattctttttaaatagcatcttctctgaaagagtgacctcagcaagacaaaataggggttctctggctgctcatgcccccaacagaaacccaactatgaactatccacagaaaagaatatcttcataaatatcccagaacttgagaatgaggctgaaacactccctcaagctg

SEQ ID NO: 16103 - DNA, 569 bp, Homo sapiens
tcatagagagtgggttggaaacttaacactttttaaattctccagatgtctatttctaagccaatttactcaaaaatcataatgtaacaaaaatgaccttctaagttaacaggatttatctttcaatagtaagcaacagaaagtaagtcatttgaaaacatactgtagataaaacacccacctttcaatcaacattcagaaaataccctttatgttgctttggccacactcacaaacacacataataaacagtagaatagctgtaaactaccaacataagatttttccaagtgtgattttttaaatctcatttttatactaatgtagttataaaagcagagayaaatatgtgaaaatcatcaccacactcacagagttgctttagaaataacaaagcattctttttaaatagcatcttctctgaaagagtgacctcagcaagacaaaataggggttctctggctgctcatgcccccaacagaaacccaactatgaactatccacagaaaagaatatcttcataaatatcccagaacttgagaatgaggctgaaacactccctcaagctg

SEQ ID NO: 16104 - DNA, 593 bp, Homo sapiens
tgcacggtctcagtgttactccctaaacaaggacaccaaatgtgaagaaaaatacaaattacttttggtaggggttgccttttaaaaagtattttcaaagacaagtacaaagaattatataagaaaacgctgatgttgtgttggttggttttgttctgttcatttcaaatcacaaacacgaattaaaaattttatgtagttttgtataatttttcatctaataatttttatttttatgttttttttggagacggagtctcgctctgtcccccaggctggagtgcagtggcacgatctcggctcatgccattctcytgcctcaacctcccgagtagctgggactacaggcgcctgccaccacgcctggctaattttttgtattttttagtagagacagggtttcaccgtgttagccaggatggtctcgatctcctgacctcatgatccacccacctcggcctcccaaagtgctgggattacaggcttgagctactgcgcccggccataattttctttaaagaactcttcctttgggaaagaggcataaataagtgcaaaaatctagccaaaaggatggctgttcattgtttgaa

SEQ ID NO: 16105 - DNA, 593 bp, Homo sapiens
tgcacggtctcagtgttactccctaaacaaggacaccaaatgtgaagaaaaatacaaattacttttggtaggggttgccttttaaaaagtattttcaaagacaagtacaaagaattatataagaaaacgctgatgttgtgttggttggttttgttctgttcatttcaaatcacaaacacgaattaaaaattttatgtagttttgtataatttttcatctaataatttttatttttatgttttttttggagacggagtctcgctctgtcccccaggctggagtgcagtggcacgatctcggctcatgccattctcttgcctcarcctcccgagtagctgggactacaggcgcctgccaccacgcctggctaattttttgtattttttagtagagacagggtttcaccgtgttagccaggatggtctcgatctcctgacctcatgatccacccacctcggcctcccaaagtgctgggattacaggcttgagctactgcgcccggccataattttctttaaagaactcttcctttgggaaagaggcataaataagtgcaaaaatctagccaaaaggatggctgttcattgtttgaa

SEQ ID NO: 16106 - DNA, 550 bp, Homo sapiens
tggtctcaaactcctagcttcaagcaatcctccttccttggcctcccaaagatctgggattacagacatgtgcctccatgcccggccatattttagtttttttaaagttactacttctcaagggataaaaccctgtaggactttccactgcctcaacagttccctccatgagactcatcacaagagtacctgaacctatatgactaacaaacaacaggcagaacaaaaatctgtgacacgtggttattatttgtagaagtagtacaaggcagtctgtgttttatttcactgctgttatagtttgcacaacagacaagagagggcccggtagaaaactgcactgaaattccacaaatgtcacaagggaacaaatgtagacgatggaaaaaaaccatctaatgtagttagatggaaataaccaagaactctcaacattaaaaataaacttgacaacgaattttggccatctgaggaatgytatggcttttcctttgggtgactcattttactatcgagaattaatatacacaaaggaatgcctctgtggttt

SEQ ID NO: 16107 - DNA, 1985 bp, Homo sapiens
caagaagcgaggataagccaggtgcagtagttcatgcctgtaatcccagcaatttgggaggctgaggcgggcagattgcttgagcccaggagtacaggaccagcctgggcaacatggcaaacccttgtctctactaaaaatacaaaaaaaaattagccaggcatggtggcatgcctgaagtcccagctactcgagaggcttgaggtgggaggatcacctgagcccaaggaggctgcagtgaactgtgatcgcaccactgcaccccagcctaggtgacaggagtgagaccctgtctccaaataaacaaaaaacacaaaaaaagaagcaagcatagttaatggagcataaggttctcaaggtgtgaatagagtctaggaaacagtacgtagtggaaggattactctttaataggagtgatgctttttactaggtaaattgatctaggtgagtttaaatrtggatacattttttgtgacaagataatttccatttaatgatttttgccttctctgtgaaacagcatataagcttatctcctgagagtgagaagaagagatgtggtaaagattcgggcctgacaagtggttaaaatttgaaatagttctttgagagaggatgctgactaagcacatgtggagggactgtatgtagcattgcgggcccaggtgaagaaggagacttttaattcgtatgatttaattttttgtatgtgattttagaacccagcagcagaaataaaggtgcagtaaatgcagttagttagattgatccaaatttgggatttcattgagcacatgagatagaaggctgaattagggagaaggacaagagtatgagggttttaataaaatattggtttaaataatggacagagactctggaattgatgaagaattgagtactgagaagagaatgtagagttagagaaaataaaaagctgagatcttgatgaaattgaagaacaagtataataggagtgggaggttgtgatcagagaaggagattttaaaatgtacaaaggagtggttcttggaggtcaccgaatgtgaggtcaaggaactgagagacaagaaaacatggtagatcatccatatagacattgaaattacccagcataataatgaaatttaaggtgactttgctcagggttccagatagtacattgatggggctttgtcatgaaccattgaaaaacttaaccgactgggtgtggtggctcacacctgtaatcccagcactttggggaggccaaagcaggcagatcacctgaagtcaggagtttgagatcagcctggccaacataataaaaccctatctctaccaaaaatacaaaaaaattagctgggcgtggtagtgcacacctgtagtcccatctacttgggaggctgagacaggagaattgcttgagcccaggaggcggaggttgcagtgagctgagattgcgccacttcactgtagcctgggcgacagagtgagactccatctccaaaaaaaaaaaaaaaaaaacaaaaagaagaagaagaaaagcttaacctagatgcatacataggatcatattattttgcaggacattcgtctagtgatgaaagcagcagcagagcctccctccagtagatgggaagactaagacgtatctgagtagtatctggattggttgatggggagagggtctatctgtaataaatgttaagcaatttgcttgaggtcacattctgatttgattacaaagcccatgctctttctactaaccttggtatttctgcaacaagttgagcatgttcaactcattttttttttgtcttctcagatgtttgagactataattttgttttattttagcttctccagagttactgggtctttttttttagtgccaaacatctacaaagtgagggagaaatgtccttgaggagtaccttgaacagaaacttaacgtgaagtagtcaaggtttttagtatgtttggtaaactgatccattagttca

SEQ ID NO: 16108 - DNA, 535 bp, Homo sapiens
taataataatmatacaaataagagacccaggtttttgtcccagtcgtcaacaaattggtgtgaccttggaagtcacagcctgcctgggttgactcatcccaccggtaaggtgaaggagtttagatggttttaaagtttcctattaattctgacatatcatgcatgtatcatctcttctgatgtagctcattctaggaaggaattttctatggtcccacttcatctcagaaggaacagagaaaagaaagcaatgacaccaggtgtctttagctgcatggccagtgatggctgaaaataatcatgggtcagatcacctggatacacatggagagaacaacccacatcctgcaggcatggcccaaagatggggtgtgatactggaaagtgaatgcatttttgagtcatacagaactgaattcaaatcccactatggggctaaattaacctctgtaatcctgttttcttggttgtaaaatttttttttaaaagttgggctgggtgtggtggctcacacctgtagtcctagcactttaag

SEQ ID NO: 16109 - DNA, 535 bp, Homo sapiens
taataataatcatacaaatragagacccaggtttttgtcccagtcgtcaacaaattggtgtgaccttggaagtcacagcctgcctgggttgactcatcccaccggtaaggtgaaggagtttagatggttttaaagtttcctattaattctgacatatcatgcatgtatcatctcttctgatgtagctcattctaggaaggaattttctatggtcccacttcatctcagaaggaacagagaaaagaaagcaatgacaccaggtgtctttagctgcatggccagtgatggctgaaaataatcatgggtcagatcacctggatacacatggagagaacaacccacatcctgcaggcatggcccaaagatggggtgtgatactggaaagtgaatgcatttttgagtcatacagaactgaattcaaatcccactatggggctaaattaacctctgtaatcctgttttcttggttgtaaaatttttttttaaaagttgggctgggtgtggtggctcacacctgtagtcctagcactttaag

SEQ ID NO: 16110 - DNA, 561 bp, Homo sapiens
ggagaagtgccagctcaagaagtctgatcctagaaaccatgcctttaaacacttcactgtcactctattcatcgggtgactccactcccccccttccctactatcactgacaaacagttgacttgcctttgcatcaacacatccagggactggtaactctgagcattccaaaaaagcctttggacagctctgttaaaaacttttaaaattaagcctaaatctttctccctgtactctaccccaactggtttctgagcccctgaggttgtactgaaaaatttctgtctttcttatacatgacatcttttcaaatatttgaacaaggttataccatcctttgtcaatcttctcatttcattcactgtaacaaatttatttttcaaaacccagctcagaattccatttgtctctgaagactttatcccccatctcycactactgcaggaagagttaatcttaatttatctgtgctgctcctgtactagggtttactgttaaatttatcatgctgtatgggaaacagttgtgtacatttctgtgttctctactagactcagagac

SEQ ID NO: 16111 - DNA, 522 bp, Homo sapiens
ctttctcaaagccaaactaagatattcyctattaaaatgtccatgagcctagcattgagtgtctggcatccatcaatttcatagactggaaaatgattgttgtttggtacagtaaagaagaggatgtgcatcagttcctaccgtttgcagctttgtttttagccttcccattttaaaaataaattcaaggacattgagttacaaggcaggagggctggagctactgggcagcctgaatatgacaagcatttgtgtggaaagtcattgctccttctgccacactttgggccatcaggatcattctttcccagaagggccataaacttgctcaaaagtttctataaatgggaagagggagaggaaggatttttgcatcagtcctgaagttgctatccaaaagttctctgtttcacaaataattttctgaactctggaatgcctctcctactccctgcctccctttctgtaatgtcagagtgatggaaaccaccaagtggcatgctagggaaagcctgcagcagt

SEQ ID NO: 16112 - DNA, 522 bp, Homo sapiens
ctttctcaaagccaaactaagatattccctattaaaatgtccatgagcctagcattgagtgtctggcatccatcaatttcatagactggaaaatgattgttgtttggtacagtaaagaagaggatgtgcatcagttcctaccgtttgcagctttgtttttagccttcccattttaaaaataaattcaaggacattgagttacaaggcaggagggctggagctactgggcagcctgaatatgacaagcatttgtgtggaaagtcattgctccttctgccacactttgggccatcaggatcattctttcccagaagkgccataaacttgctcaaaagtttctataaatgggaagagggagaggaaggatttttgcatcagtcctgaagttgctatccaaaagttctctgtttcacaaataattttctgaactctggaatgcctctcctactccctgcctccctttctgtaatgtcagagtgatggaaaccaccaagtggcatgctagggaaagcctgcagcagt

SEQ ID NO: 16113 - DNA, 512 bp, Homo sapiens
tgaaatttccaataatggaccatattttctgcaaatagacagtaytcgcatggatcacctatatcttccccctgatacactgtgggtcccaacaccagatgtcatttctccagagcagtgctaatgaacacaaaaggtataccctgggtggcccagctcttttcacgaacgtgctgccctgctcatagtgatccttgcatcacttggtgaatgggccatctcctgggacatggaagttgcagaggtagatagtgcactgcagcttctcttaagccggattggccatcaggcatatcactctggagtttttagctgctgtcctttcctgatgagcagtctgtattagctgacctcagcctacttgttacgtgacgtatgggtcccaaaagtgtcctttgtcaaaaagcagaatgtgccttctagtctccctttccccatctaatggtgtattcgatggtgaagatgagtacagttgaccaccacctatctgtggttccacatccctatattca

SEQ ID NO: 16114 - DNA, 512 bp, Homo sapiens
tgaaatttccaataatggaccatattttctgcaaatagacagtattcgcatggatcacctatatcttccccctgatacactgtgggtcccaacaccagatgtcatttctccagagcagtgctaatgaacacaaaaggtataccctgggtggcccagctcttttcacgaacgtgctgccctgctcatagtgatccttgcatcacttggtgaatgggccatctcctgggacatggaagttgcagaggtagatagtgcactgcagcttctcttaagccggattggccatcaggcatatcactctggagtttttagctgctgtcctttccygatgagcagtctgtattagctgacctcagcctacttgttacgtgacgtatgggtcccaaaagtgtcctttgtcaaaaagcagaatgtgccttctagtctccctttccccatctaatggtgtattcgatggtgaagatgagtacagttgaccaccacctatctgtggttccacatccctatattca

SEQ ID NO: 16115 - DNA, 512 bp, Homo sapiens
tgaaatttccaataatggaccatattttctgcaaatagacagtattcgcatggatcacctatatcttccccctgatacactgtgggtcccaacaccagatgtcatttctccagagcagtgctaatgaacacaaaaggtataccctgggtggcccagctcttttcacgaacgtgctgccctgctcatagtgatccttgcatcacttggtgaatgggccatctcctgggacatggaagttgcagaggtagatagtgcactgcagcttctcttaagccggattggccatcaggcatatcactctggagtttttagctgctgtcctttcctgatgarcagtctgtattagctgacctcagcctacttgttacgtgacgtatgggtcccaaaagtgtcctttgtcaaaaagcagaatgtgccttctagtctccctttccccatctaatggtgtattcgatggtgaagatgagtacagttgaccaccacctatctgtggttccacatccctatattca

SEQ ID NO: 16116 - DNA, 515 bp, Homo sapiens
tgtaacttaaaatttgctttgatggattccattaggccaccttcatttccaggtcttcctaacccatcactgggattcaacctgaaaagaacaatcaaggcccaaagttttaaggaagccaarttcctggggtcagaaattgaatctgtagcaaccttgttacttttggaaaaccttaagaacattctcaacctcacagttctggccagccccactagagtagtgctaagagatttttatacagatatgactttttgcaaacctagaaggaaattgtgcaaggtgtacctttgcctctagcaaagaaaacctttggcttggaatggaagaaatgggtaggtgctgttgggagagagctttcccagcatggaataaagcaatttattggtagaaaatgatttttcaatacttcttccagaccacttaaaagcaacattagcatcaagaacctatcagtctaagcatttaatttagctatttcccctgccaacttgatacttaatgatgtccacatg

SEQ ID NO: 16117 - DNA, 589 bp, Homo sapiens
gaccctgcctgccatacaggatgtggcatctggacacccatttgcacacygtgtcacacaacatgggttaaacaagcagcctcatttatgcacctaattcattcaatatgcttagactttaaaattttacatttgtacctaatacatttaatcttcactttaagcactcaaaatacctgcaacaacaaacttaaatgtcttagtaagcaaaatcttcccaaatagttaagcaatgtttgtatatctaataaggtaagtatataaatataggaaatttcaagtgcaaataagcatttcaatgtgtttacaaacgtagtcaaattcttacagagcattcaacttaaaacataactctaaaatcaattactgatttggatttggcattagaaggctaattttcagatttttcaatatgccaaggttatcttaagcagtttaaataaagaaatatggattagcttgaacataagacaacaatatttatattatagctttgagttgtttattcatttctgtatttattttcaaacttttccagggtagaaaaggcacccacctatgggacaattttatgtttggttagctaatg

SEQ ID NO: 16118 - DNA, 545 bp, Homo sapiens
tgcctggttttgaattctggttctatcattccatagctatgtgccttgggggaaatttcctagcctttctrtgccttaatttcctcataagcaaaatagggacagccataataactactgcagagggttactgtgattaagtctggcacattcctcatacatagtaagtgtcagtaactgttagtaagcatcatttttttatgtaattcgcactttccttctaactcctcttctactagttaatgggaataaaataacttaatgtccataagatttaaaaacactttaagtaaatgtcaatctctttaggaaaaactgactagtcactcagattttagtcttccataccatccccacctttcttctccaaggcaacatcgtgaagaagtatggctcacagagcatggtgacagagagaaagaatcagagaactaaggcatgatgttctccacgtcctcccacctccagggagatttgtcttctgcgcagttgccagaagccctgttggacacaatgctggcatttgcaacagatgaactcataat

SEQ ID NO: 16119 - DNA, 545 bp, Homo sapiens
tgcctggttttgaattctggttctatcattccatagctatgtgccttgggggaaatttcctagcctttctgtgccttaatttcctcataagcaaaatagggacagccataataactactgcagagggttactgtgattaagtctggcacattcctcatacatagtaagtgtcagtaactgttagtaagcatcatttttttatgtaattcgcactttccttctaactcctcttctactagttaatgggaataaaataacttaatgtccataagatttaaaaacactttaagtaaatgtcaatctctttaggaaaaactgactagtcactcagattttagtcttccataccatccccacctttcttctccaaggcaacatcgtgaagaagtatggctcacagagcatggtgacagagagaaagaatcagagaactaaggcatgatgttctccacgycctcccacctccagggagatttgtcttctgcgcagttgccagaagccctgttggacacaatgctggcatttgcaacagatgaactcataat

SEQ ID NO: 16120 - DNA, 572 bp, Homo sapiens
catcccggattttgaacctgatactatggttgtataagaccttgaagaaccttgaaagggtgagaatgtgtcttgcatgtggataagatgtaaataattctggctagaggatataaaatgattgattgccaaattggccttcattctccactttccctgtatctacatcctttgcatgtgactttgaggaccctcacatcatgaagtgtggtctactcccacagccgttgaatctgggcttgtctcatgccttgttttggccaacagaatgcagcataagtgacatgtgccagttctgagcctaggcctcaacatccatacttctactcttgcacctctcctttgccaggagaataatcctaggatggcttgctggaggatgaggtgctatgtggaccacagccaagcaactaagtccccagatatgtgagagagcccagctaagatcagcaaagccatcagcactgagagtcagcactcacttgcygctgactctcagtgcatgaacaagcccccagtgagcccagataagcagaactgctcagccagccataatcatgttgtcaaaaata

SEQ ID NO: 16121 - DNA, 562 bp, Homo sapiens
tggagctgttcctttggacatgtacatgagagtttataagaaaggtgatattgtagacatccagggaatgaatactgatcaaaaaggaatgtcctacaagtgttacgaaggcaaaactggragggtctacaatgttacacagcatgctgttggcactgttgtaagcaaacaagttatgggcaaggttcttgtcaggagaattattgttcatattgagcatattaagcactttaagggctgaggcagcttcctgaaacttgtgaaggaaaatgatcagaaaagaagaaagccaaagagaaagtcacctgggttcaagagaagtgccagcctgctccacccagagatgcacactttgggagaaccagtgagaaggagcctgagctgccggaacccagtcgctatggattcatggcaaataggtatagaaaagtaaaagacctctggactgcaaaagtgtttcttttcattgagtggaagtgtggtgtcctctcccccaaagaaatatttaaagcaaattttaattgtgtcctaatttattgcgtaatgtctttactattcaaat

SEQ ID NO: 16122 - DNA, 562 bp, Homo sapiens
tggagctgttcctttggacatgtacatgagagtttataagaaaggtgatattgtagacatccagggaatgaatactgatcaaaaaggaatgtcctacaagtgttacgaaggcaaaactgggagggtctacaaygttacacagcatgctgttggcactgttgtaagcaaacaagttatgggcaaggttcttgtcaggagaattattgttcatattgagcatattaagcactttaagggctgaggcagcttcctgaaacttgtgaaggaaaatgatcagaaaagaagaaagccaaagagaaagtcacctgggttcaagagaagtgccagcctgctccacccagagatgcacactttgggagaaccagtgagaaggagcctgagctgccggaacccagtcgctatggattcatggcaaataggtatagaaaagtaaaagacctctggactgcaaaagtgtttcttttcattgagtggaagtgtggtgtcctctcccccaaagaaatatttaaagcaaattttaattgtgtcctaatttattgcgtaatgtctttactattcaaat

SEQ ID NO: 16123 - DNA, 1100 bp, Homo sapiens
ttatagtgtaaacataacttttatgtgcactgggaaattttaagtatgactcttttttttgcaatattcactttattgtggcagtctggaactgtacccatattatctccaaggtacgcctatatcttctcaagaatattcagattgatatttaatttttttatgataaatttacttgttgagcatgtmttttgggatatatatagagtattataaatatacttagtttaaagtaaattgttgtatcacatctttaaatatccaagaaaatctaaacacataatgttttgatacctgacatcatgaatttaagaatacatgaacatgttctttaacagtcagatattttacatcagtacctttttcctctaactgaaaattttattttacctccatcaaaaagttttgaccatgcactgtatatttatatttaaaactattttaatattcaccatatcataattctttgcaataaaaatgtacataatttaaatttgatgtttaaaaatagttgaagttgtttttattttctaatatcattcccgtatgaaatataatggtagaaaaacattttaattaccagaagttttaggtttatttttctcatcaaaaatctaaattttgagcttcagtattttctatgctggttttatttgtcagataagttaaaattatttccaaagatattcagttttatgttaattcatgtgtttgttcctactggattgtcgtcacttctaggtgctcctagcttacagagcaaaaaaaatatgtcagcatactaaactgtgcatatacaaaatctataaatatttctgtgtttatctgcatctatattaggctaaactgacatcacactgatgtcttcaactctaattcatggttcattcaaggcttttccccttgtgtctgtaaccttctactctaactctgaaaaacctggctcacgccatctgtcattcacttcacttacctaactgttcaatttcagcacacatgtgtaggggcagggagaacgcctcactttcattctctgtgaagattcactggaatgactgacaacagacagattaataggataaaaggcatatgaatttatt

SEQ ID NO: 16124 - DNA, 1100 bp, Homo sapiens
ttatagtgtaaacataacttttatgtgcactgggaaattttaagtatgactcttttttttgcaatattcactttattgtggcagtctggaactgtacccatattatctccaaggtacgcctatatcttctcaagaatattcagattgatatttaatttttttatgataaatttacttgttgagcatgtcttttgggatatatatagagtattataaatatacttagtttaaagtaaattgttgtatcacatctttaaatatccaagaaaatctaaacacataatgttttgatacctgacatcatgaatttaagaatacaygaacatgttctttaacagtcagatattttacatcagtacctttttcctctaactgaaaattttattttacctccatcaaaaagttttgaccatgcactgtatatttatatttaaaactattttaatattcaccatatcataattctttgcaataaaaatgtacataatttaaatttgatgtttaaaaatagttgaagttgtttttattttctaatatcattcccgtatgaaatataatggtagaaaaacattttaattaccagaagttttaggtttatttttctcatcaaaaatctaaattttgagcttcagtattttctatgctggttttatttgtcagataagttaaaattatttccaaagatattcagttttatgttaattcatgtgtttgttcctactggattgtcgtcacttctaggtgctcctagcttacagagcaaaaaaaatatgtcagcatactaaactgtgcatatacaaaatctataaatatttctgtgtttatctgcatctatattaggctaaactgacatcacactgatgtcttcaactctaattcatggttcattcaaggcttttccccttgtgtctgtaaccttctactctaactctgaaaaacctggctcacgccatctgtcattcacttcacttacctaactgttcaatttcagcacacatgtgtaggggcagggagaacgcctcactttcattctctgtgaagattcactggaatgactgacaacagacagattaataggataaaaggcatatgaatttatt

SEQ ID NO: 16125 - DNA, 824 bp, Homo sapiens
tttctttttacgctaattattgcaaaatgattcttaggtgtttggttgaaaatttgtcccttcttctatagtagcaggctaggctagcttctatttgaactaatggatccatttaacatctcaaaaaattaatatccaatcttatgtcctcttaaatagctaacttaaaataatttacagagggtcaataagatacaaagaatattacattcttagaatcatactctatattttataataaacacatttctataacaaaatatgaccagtatagttatttgcgttttaggtacccaataattttgcagacacatttcccaattaaaaaaatttacaaaaatgaaatctatttcaaaatctaaacatatcatgatgttttaaagtcataaagccctcctcccctcgccacacacacatgcaaaggaagaagacaataaacagtttatctcaagaaaggaaacagaaaagggagaacaacaaataatgaagcagactacttgatttaatcttcatctgatttctagttaagttttgacttgttagttcatctctgaccacaaaattgcatcgatagatatcgctcatcaagacattatttatggtagcctgtgctcctcttttraaaaaccaacataatcccaaaatttatttgctccacatgctgttctggagcattaacaagcctgtacattgacaaaaattttcttttgacccatatttctatccatgttcttgacttttttcagcatttggattttctggacttaaattctattgtgagaatgcacatcttccattttgcaatttacgccagcagacccatg

SEQ ID NO: 16126 - DNA, 824 bp, Homo sapiens
tttctttttacgctaattattgcaaaatgattcttaggtgtttggttgaaaatttgtcccttcttctatagtagcaggctaggctagcttctatttgaactaatggatccatttaacatctcaaaaaattaatatccaatcttatgtcctcttaaatagctaacttaaaataatttacagagggtcaataagatacaaagaatattacattcttagaatcatactctatattttataataaacacatttctataacaaaatatgaccagtatagttatttgcgttttaggtacccaataattttgcagacacatttcccaattaaaaaaatttacaaaaatgaaatctatttcaaaatctaaacatatcatgatgttttaaagtcataaagccctcctcccctcgccacacacacatgcaaaggaagaagacaataaacagtttatctcaagaaaggaaacagaaaagggagaacaacaaataatgaagcagactacttgatttaatcttcatctgatttctagttaagttttgacttgttagttcatctctgaccacaaaattgcatcgatagatatcgctcatcaagacattatttatggtagcctgtgctcctcttttgaaaaaccaacataatcccaaaatttatttgctccacatgctgttctggagcattaacaagcctgtacatygacaaaaattttcttttgacccatatttctatccatgttcttgacttttttcagcatttggattttctggacttaaattctattgtgagaatgcacatcttccattttgcaatttacgccagcagacccatg

SEQ ID NO: 16127 - DNA, 209 bp, Homo sapiens
ccttgctacaagactctgtcaccttcccttggaatactggtgcccaggaaaaccttcaatctgggtgaaaagagtttaaataagcacatttcygtagcgtctgtgctccaacccgtactgaacccttatttaatagagtattttacatactttacacagacactgtcattgttcagagttggcctggccttttcacagtaactattttg

SEQ ID NO: 16128 - DNA, 548 bp, Homo sapiens
tcatagacctttaaaattttttaaaataacacaggatattaagcccattagcaattactgcataataaaacaatcaaatttaaatataaaaatcacaaataacttcaactatcatttccaaatcagtgtttatgttgtttctttttttgtttgtttttgtttcttttcttttttaaaattttattattattatactttaagttttagggtacatgtgcacaacatgcaggttagttacatatgtatacatgtgccatgctggtgtgctgcacccattaactcgtcatttagcattaggtatatctcctaatgctatccctccacccaccccacaacagtccccagagtctgatgttccccttcctgtgtccatgtgttctcattgttcagttcccaaatatgagtgagaacatgcagtrtttggtttttttgttcttgcgatagtttactgaaaatgatgatttccaatttcatccatgtccctacaaaggacatgaactcatcattttttatggctgcatagtattccatggtgtatatgtgccaca

SEQ ID NO: 16129 - DNA, 534 bp, Homo sapiens
ttgggaggccgaggcgggtggatcacgaagtcaggagatcgagaccatcctggccaacacggtgaaaccccgcctctactaaaaatacaaaaaaattagccgggcgtggtggtgggcgcctgtagtcccagctactcgggaggctgaggcaggagaatggcgtgaacccgggaggcggagcttgcagtgagccgagatcgcgccacgtcactcaactgcgccatgtcactccagcctgggagacagagcragactccgtctcaaaaaaaaaaaaaaaaatgaaaagatatgttatgaaaacaataatcaaaagaaagctgggctgggcacggtggctcacgccggtaattccagcactttgggaggccgaggcgggtggatcacctgaggtcaggagttcgagaccaatatgaccaacatggtgaaaccccgtctctactaaaaatacaatattagccggacgtggtggcaggtgcctgtaatcccagctactcgggaggctgaggcaggagaatcacttaaacccaggaggca

SEQ ID NO: 16130 - DNA, 530 bp, Homo sapiens
ggaaggaaaggcttccttgtctgctcattgctgccacctgggttgggaaaataattgaagatgttttctcaagtccttcaagaatctcttcttaatgttcagaatagtttaagagcgttgttgaggtaaastgatagctgattattttctgagatttagatctaaacaaactcagcatgacgaggaagcacacttcacagctccagggtgcaatactgatgtaaagttgcctcgtgaggatacatttttcgctcatgtatgcaaaattcctatcagttcatttgcacagccagttccaatcatgtatgtgatcaccagattaaaagcttcatccagaaagacaagactcctcagaacgaatagtagacaagtaagactgctacccacagaagccagtacgcttcaggtgtgaggcggggtaactactcatctcttcacagagccaaggaaagaaaaagaacgtctctaacatgatttaccattttaaacagccttataagttttgtctcttaaaatcatgctgcagaagg

SEQ ID NO: 16131 - DNA, 532 bp, Homo sapiens
gtgtgtgtgtgtgcacgcacgcgcgtgtgtgtcctttggtcctgggaagcctttgattcataacaataactcatcctagtctgatgtcaaggctaatttatacttcccagcttgatggcttgaatgctgcagggcatgagttttctccactctccaacccctctgttacctctayaagccttttgctctccagaaagcagttgtatttgaaggcaaaagacatgttaggtcagctaggaatgaggagtcagggagcacattgccctgggcccagaccccagcccctgactggcatgtttttgagtagccagtgaaatcccggctgagttgtggcctgggagtcctccagcaaagcaaaacctggctcatccaaggtcaccaagaggcaacaaggacagagagatagggtgaggaggctcaggagcctcgtaattgaatctataataaactaattacatgcatgaaagtgtgtggaagagaatgtttctctcttttgtatgagcaaagaatttggctaatttaaggagaatga

SEQ ID NO: 16132 - DNA, 532 bp, Homo sapiens
gtgtgtgtgtgtgcacgcacgcgcgtgtgtgtcctttggtcctgggaagcctttgattcataacaataactcatcctagtctgatgtcaaggctaatttatacttcccagcttgatggcttgaatgctgcagggcatgagttttctccactctccaacccctctgttacctctacaagccttttgctctccagaaagcagttgtatttgaaggcaaaagacatgttaggtcagctaggaatgaggagtcagggagcacattgccctgggcccrgaccccagcccctgactggcatgtttttgagtagccagtgaaatcccggctgagttgtggcctgggagtcctccagcaaagcaaaacctggctcatccaaggtcaccaagaggcaacaaggacagagagatagggtgaggaggctcaggagcctcgtaattgaatctataataaactaattacatgcatgaaagtgtgtggaagagaatgtttctctcttttgtatgagcaaagaatttggctaatttaaggagaatga

SEQ ID NO: 16133 - DNA, 544 bp, Homo sapiens
cttttgtgmgtcatctctttcaactgtaacagggcctgacaggcagatgcctgtgtttccttcagagatgggaacgctgaggctgccagagggaaggatctgctcaaaggcccagaactaggaagcaggagagctgggaccccagcccagggctgactcctaagtccaagcttgggcgggaggtgttggaggtgaccacgggaagcttactgttctccgacatctccagaatgtagcggatcagggggctgttgccatcaaagggcttggtccacgtcaggttgatggctcgcctttccacggtgctgagagtggccactgggtgctcgggcgcgtggggcagttgcctggaaaagagacacgtggtcaggcatccctatgtggtctgcaggcaggtgacgggggcgctgtggacacaggttgtgtaggccttgaccttccatgataccgcatgcttagacgtaaaatgtggccttcgggccatctacctggagatttttctctctggaaccagagccctcctgctaaagccatcctcacaccc

SEQ ID NO: 16134 - DNA, 538 bp, Homo sapiens
gtccatgcttggcaggctttttccatgccctgtggtaacattagcattgtgatcctgtctccacaatagaaggaggtagaaaaaccttattcagtcctaaatgaaacatcacttcacagatttttggtatttgagccactcgcttgaacctgggagccaatcacaacacattttaaaagattcattttctgttactctgaggatttttcagattggagtgtttgtcgtttgctttgtttctttctttttgaaggacaagttcccctttgttttagagatttacttgaattctaaaaaaattagaaaacttatttcagtcttggttrtccaagtagtcatgattccttacctccctttaaatctgtggatgattcagatttttaaaaatgtttttaaaatatatagacttccattatttgaattttgttagccatatcttggctaaaaatcttcagaaatgcagaaaagtatagagagtaaatataagatgccctcattatccgccagaattcagctcctagcttttagccagctcaca

SEQ ID NO: 16135 - DNA, 537 bp, Homo sapiens
tattttaggcttggctcgtcatgagtggtccctattgcatactcttcttctttttgtaaaaacaggcaccaggcaggatttcaccatgggccaaagtttgctaacccttgttctggagagcagaggctgtatgcaacacttttaaaagaaatctatcaactactgtgccttgcatattgcttccaaatcgttgtgatacatgacaggaataagtaatactagcttcacattttaaagaaattccttagtttaagagtattttgcagggtggagttaaaatataaaccacctctcaaataatatatacttcatttaaaactcaaagtgatttataatcacaaaatcaccggaagcatccatttcatattagtcagaytgatgaaagcattcactttgcttaactttttcttgaccctacagctcaccactgcaaaaccagacaatacctcccagaactgattaataaccatgattctaagacatcaaacttatctataaactcagagtacttttcaacaggatctctacagattagac

SEQ ID NO: 16136 - DNA, 530 bp, Homo sapiens
cagtcattacctagtggtgccaaacagtggccaagagcaacgtggatttggatggtgcagtgtgatcccttgtaataacacaactctgtattttatgtggttgaattttgggactttcactgtactaaagtgactcaggcagattgcaattgatttagaggtttattttgccaaggtggaagatgcacctgggaaaaagaaacagaagttacagtaggatctgtgkcctgtgttttttccaaagagggttttaaggacttcaatatttaaaggggaaagagcaagcaggaggggaacaaagaatggaaagaaaggcctgggagggtaggcaatgaggcaaatggttacttgtaaagttttgattagctcaatgaatctacattttacatgtgaaaagaaaggaatgcgggggaagtcaattattccctcacatgctcagtaaatctacattttacataagataatgtaagcatgtgaaattacagctatctgtttgggaacaaagaaaggcagtttttttgcatgactca

SEQ ID NO: 16137 - DNA, 505 bp, Homo sapiens
tgtaattccctccaattatcatcaaaaatcctctaaatcacctcttaataaaagggtttccattcatggtctgtctgaagtggtgctaagagagcagcaacagcttaagcaaagttctcaggttagtaagaagcmatgtactgactagagggacagacaacaacctggatggaatggcaacgccttaccactcccaaggaggttccagaagttcttgacaagggtaggcttgttaacctcagctcttcctgcatagaggtgtcatggagacccttgacagtgactttggtatgaaagtacagagggacctcaccgactggggaatcctcagacgtctgaagaatacaacagaaaagttttcatagttaaaatagcccactacagagtgaaaatttaaactccatgctttttatttgtttgtgatactttcgtgagtttttattgttttagattcttttttgcaacactgatcaattttcattttaaattaagagtgacatttttt

SEQ ID NO: 16138 - DNA, 527 bp, Homo sapiens
tgcaactagagatgaggaaaatggactcagactgaatctataaaagagattttcatcagactatgggaggataaagatgggacagcagaatccctgcagcttacttggagtttgggctcagttctggcttacttagggtttggccaaactttagtagtctatcaaacctgcagcttacccaggtcacaattgaggtgagccccaaaacttcacaaggagcattttgaatccatcagttgaattaaamaaacaaacaaacaaacaaacctgaaaggtatccccctatgggctttgccctaaagaaaataatggtttgtaagactagaggtggcattgactcataatccacctgagttaactcccctcacattgacagaagaggacttcttcatataaaaatactctcggccaggcgcagtggctcacacctgtaatctcagcactttaggaggctgaggagggtggatcacctaagggcaggagttcgagaccagtgtggccaatatggtgaaacccccgtctctact

SEQ ID NO: 16139 - DNA, 517 bp, Homo sapiens
tcaccatattgctcaggcttgtctcgaactcctgacctcgagtgatccgcccacctcagcctcccaaagtgctgggattacaggcatgagccactgcgcccggcctattttactactttttttgaracaggattttgctttgccatccaggctggaatgcagtgaagcaatcactgctcactgcttctggacctccagagcccaactgatcttcccacctcagcctcccaagtagctcggactacaggcacacaccaccacaccaggttaattttttcttttttttatagaaatgaggacttattatattgtccaggatggcctcaaactcctgaacccaagtgatcctctgccccagcctccttaagtgttgggattacaagtgtgagccactgtgcctggcctacacactgtatgaaaatcttgttagagctatgtgtctttgcctagggatatttgtctttgcttttaatcctagacagtcttccttgatccaaaaatttgatcatgtatcttg

SEQ ID NO: 16140 - DNA, 531 bp, Homo sapiens
ggctcttaattaaagtgatccaaacagcacacttcataaggaagctcccgactccactttcagcagtactggaagtttccagtattggctgtttcttgtcagtgtgacactggcttcttgttctctgaactttctgtattgacatgaaggaaccatcccagatttttaaaaaatgacyctgatcaattagttacatgtagaagtcagctacctactcactcagtatgactaagatgacctcaaaaggggtgtctcagcttgaagcaaaataggctaaagagcacttacttctaccccatagttgtcccataaatccaagatcatctggttcagaaatccaattaatttagtgaacagatacattttagttgcaatgcaaatagtctcattttagttgcaaagaatgatttctgtagtttggtctcagaactgcaaaagaaactctcatcccactttatttaaagtactatacttaccagcttgcgaattcggtccaacacgaggtcaatgatctccttgccaatggtgtag

SEQ ID NO: 16141 - DNA, 566 bp, Homo sapiens
attttttattttgtaactgctctttgtggagcggggaaggagtcctaagctcttccttctcagggggatgcyccaagatcctctgggtgggaatgaacagtaatccctttactgaggaaggaaagggcagggggaaatggggacaactcatctcaggaccgtgctggaggtggaacatgcctgcaatcttctcctcaggtgaagggaggatttttagagtagatcacagtcggggtgtccaaggagggcagcgatcctcctcaccgccgccaactctcagttctgggactgtccaagaggaggcgcagccctgatgcgggcccatctgttattcccctccctcctccacacaacctctgagctcctcagcctggaaccctggaagatgatgagaaggaggaaaactgggatcaccaggcacagcccctcacccccaaccccctgtttcttgctgaagatgctgagaggggagcagtacttgcaattctgtgagccggggagagatctcaccctggcacatggttatgctcttttccccaggcagtggctggagcacatgtgtgtgc

SEQ ID NO: 16142 - DNA, 747 bp, Homo sapiens
gcaaattaaaatcattaaatcaagtttgagttataattcattcttcctactagtttttttatagaaagtaaattccaccacatttgaaactccaaacttaacaaactataaaggagttatctaaagattttatgctgagaatgaaattgctttttttttttttttgaratggagtctctctctgttacccaggctggagtgcaatggtgcgatctcgtcttactacagcctgcgcctcctaggtttaagcgattctcctgccttagcctcctgagtagctgggattaccagtacctcccaccacgctcagctaattagtgtatttttagaagacacagggtttcaccatgttggccaggctggtctcaaactcctgacctcaggtgatccacccacctcagccttccaaagtgccgggattacaggtgtgagccaccgcgcccggttgaaattccttttttagacatctcaaaggcgaggtcatcacacctaacacagctaatatggactttcagttcaataacattccacgtaatgatactcatagccttcaaagtgtttacagaggtccacacataccattttttcctcacaataatgctgcaagatagggtcagaagtacaatctttaattcacaaatgagggcaccgatttatccaaggtcactagctagttagtgagagagctgggccaaggctctggctttcttgacagcttcaaaactcagtataacttaggtcctttga

SEQ ID NO: 16143 - DNA, 518 bp, Homo sapiens
ggttgacttayggacctcaataaacagccaatagctatccccgaatgactcaggctagacccaacctgaggctcttcacagtccaacgtgggggccccaggcaaagagaccttgaggagcagctgagggcacctgggcctcagcatttctcggttgagatggcggcgtccctgacaagcacagctgttttcctccccacccttcctcacccagcccagcctggcaatccacctaggaaactggcccagctggtgtggcctctaaatgagtggctgggtcatgaggaggaggactagctgggagggaggcgggagcccccaggggttcgtttgcccacatagttctcagctgactcaaggctcgcctgtcaggcttcccctccactccctgccacccttgagaaccccaggactcaaagtttggatccctcctttggcctggagggctcagggagacctctggctccgttcgtggggcactctgctggggtggcctctatcaaccaacccctgtctctg

SEQ ID NO: 16144 - DNA, 584 bp, Homo sapiens
gattgctgagatccttctgggattcacctaaaaagaagagatgaaagggatgtgtagttttacctatatctaagtaaatacgttctgctaagtcatgtagggaggcacttaagaacatttcttttgaattttgcttacatttctgagttgttttaattaaagagtcagttgaaccaaatcaaattaaccctctctgcttcttctctagctgagacttcctatactgcattctgatgacgcctcatgaccactgtagctatgttacaatatttatttctaccttttccttgtagtaatagaaccggcaaatggccacccagaataacaactacatccccgagcctcccttgcaattggttgcagccatgtcactaagtgagatgtgtgagattaatttatgggttttatttttaaagggatttggtaggaacacctctgcaaactcttaacatgagaaagaaatcaayttatctctggttgaagtcactgtattttagggtgtctttgttacatcatcccagtatgattccttactcagcttttgaagctcggactatacaggccataggtctgtattgatggca

SEQ ID NO: 16145 - DNA, 584 bp, Homo sapiens
gattgctgagatccttctgggattcacctaaaaagaagagatgaaagggatgtgtagttttacctatatctaagtaaatacgttctgctaagtcatgtagggaggcacttaagaacatttcttttgaattttgcttacatttctgagttgttttaattaaagagtcagttgaaccaaatcaaattaaccctctctgcttcttctctagctgagacttcctatactgcattctgatgacgcctcatgaccactgtagctatgttacaatatttatttctaccttttccttgtagtaatagaaccggcaaatggccacccagaataacaactacatccccgagcctcccttgcaattggttgcagccatgtcactaagtgagatgtgtgagattaatttatgggttttatttttaaagggatttggtaggaacacctctgcaaactcttaacatgagaaagaaatcaatttatctctggttgaagtcactgtattttagggtgtctttgttacrtcatcccagtatgattccttactcagcttttgaagctcggactatacaggccataggtctgtattgatggca

SEQ ID NO: 16146 - DNA, 596 bp, Homo sapiens
tgccaccgggaagctgctgcagctcaggcctggcttttcagattcaggagacctggatgatcctgctgtggaagtcgaggagagtgagatgtcactggtgacactcccaggaggggaggcatcagtagttttatccttcagttatggtaaggacttcctcagtttaatttttttaattttttattttttgagacagagtcttgctctgtcgctcaggctggagtgcaatggcactatcacggctcactgcagcctcaacctcctgggctcaagtgattcttccacctcagccttctgagtacctgggattacaggaatgtgccaccacacccaggtaattttaaaaattttaagtaggaaygaggtcttcctaggttgcctagtctggtcttgaactcttgggctcaaggaatcctcctgccctggcctcccaaagtgttgggattacaggcatgagccactgcaccccaccaggaattctttatcagataatttaatctattaaatagatgcctagtcacggccccctaaaatagtagcctttacacatggggtggccacataatttatcgtccaaactgaaggcatagacatta

SEQ ID NO: 16147 - DNA, 486 bp, Homo sapiens
cgccctcgtgcccaaggctgggttgagctccaagactggcctggtaaaacataaaaacacaatctttttgtcaacatgtaacttccatcttcatatggtggttgtccagctggtgagaagcatcaagctcttcatttcaaacgtaaatattttgtctgggtaaagtggctcacacctataaccccaacactttgggaggctgaggcgggtggatcacctgmggtcaggagttcgagaccagcctggccaacatggtttagtagaaaccctgtctctactaaaaatacaaaaattagccgggtgtagtggcaggtgtctgtaatcccagctacttgggaggctgaggcaggagaatttcttgaacccgggaggcaaagattgtagtgagctgagatcacgccactgcactccagcctggatgacaagagtgagactccctctcaaaaaaaaaaaaaaaaaaaagaaaactaaatttttgctaaagag

SEQ ID NO: 16148 - DNA, 668 bp, Homo sapiens
gcaaggaagcggaagcctcctgatgacttagacatatcaaagtttaaaacattttgggctatcagtggaaagaagtttcctaaactcagcatggccttctcttttcctcttttctctggcttagagataaggctgtgtatgtattgaattgtacctgtgctgcggtttcccagctgggcacctttccttgagtgggcacagactaacattagaggacaaagagccactgagcaattccagtgctggacccaggtatgggtctgaaactcgctgaccaaatctccctaagttctatctgtccccacaaggaaacccaaagaggctggtgcttggagagtgtcatctccccctaccctcgttcctagctcgagtatgcttttcttggcactggagagtcaacaggtgtgaacaagtgtacagagacctggcatgccagggctagcagcgcttacggccttcactcacaagagatggcaattgccmccttctgcaggctgcccatcaaaacacattgttgcctggcacctccataggctccaaccaacttggagcgggcaccaagccatcccagcagatgggcagaaggggtggggagcggccaaggcagccccatcctgaaggtgcataaagtgatggtggtgagggtttgatttccaactgcggatgca

SEQ ID NO: 16149 - DNA, 668 bp, Homo sapiens
gcaaggaagcggaagcctcctgatgacttagacatatcaaagtttaaaacattttgggctatcagtggaaagaagtttcctaaactcagcatggccttctcttttcctcttttctctggcttagagataaggctgtgtatgtattgaattgtacctgtgctgcggtttcccagctgggcacctttccttgagtgggcacagactaacattagaggacaaagagccactgagcaattccagtgctggacccaggtatgggtctgaaactcgctgaccaaatctccctaagttctatctgtccccacaaggaaacccaaagaggctggtgcttggagagtgtcatctccccctaccctcgttcctagctcgagtatgcttttcttggcactggagagtcaacaggtgtgaacaagtgtacagagacctggcatgccagggctagcagcgcttacggccttcactcacaagagatggcaattgcccccttctgcaggctgcccatcaaaacacattgttgcctggcacctccataggctccaaccaacttggagygggcaccaagccatcccagcagatgggcagaaggggtggggagcggccaaggcagccccatcctgaaggtgcataaagtgatggtggtgagggtttgatttccaactgcggatgca

SEQ ID NO: 16150 - DNA, 530 bp, Homo sapiens
ccccatgggaggggcagtgctggaggtgccctgggtgaycgggacgagccgccgcccctctgccggccttagtgcccttgtctgtgaaatggggcgagtagttcctctctcagggctgctgcgaggctgagtcaccgcgatggcggccggcagaaggggcaggaggggctgtcggtccaggggcaggggcgacaggggcagcggtcagtgggcgcagaaggggaggctcccctccttgacccagaaggcctgggtctgggcgagcgcgggcacagcgagggccggcaggagggagggagtgccgtggtggaggcaccaggatccccatccttgccttgacacagatcaacggagggggactgcagtttcgctggtggccccacagccccctgcctccagccaggggacaaagaacaggagggatccagaggtgagagaggaggtgcacagtagctgcagggccggaccctgatgaagggagatgctgtcccacacggagcccctgccagcccccagatcaccaaggctgg

SEQ ID NO: 16151 - DNA, 530 bp, Homo sapiens
ccccatgggaggggcagtgctggaggtgccctgggtgatcgggacgagccgccgcccctctgccggccttagtgcccttgtctgtgaaatggggcgagtagttcctctctcagggctgctgcgaggctgagtcaccgcgatggcggccggcagaaggggcaggaggggctgtcggtccaggggcaggggcgacaggggcagcggtcagtgggcgcagaaggggagsctcccctccttgacccagaaggcctgggtctgggcgagcgcgggcacagcgagggccggcaggagggagggagtgccgtggtggaggcaccaggatccccatccttgccttgacacagatcaacggagggggactgcagtttcgctggtggccccacagccccctgcctccagccaggggacaaagaacaggagggatccagaggtgagagaggaggtgcacagtagctgcagggccggaccctgatgaagggagatgctgtcccacacggagcccctgccagcccccagatcaccaaggctgg

SEQ ID NO: 16152 - DNA, 553 bp, Homo sapiens
ctagatctctttagggggaaagagatcatcggccatgtggatggtctccaaattccttaaccctttccaaaccctccccttttctaaccagccccttgtactctgatccctgactcagaccctaaggatcacaccttcctgtttcatatttcacgaactcctatccgcactctgaatgttgcttattggaatcttagaccctacaaagggcacaagagaccctttgattcaacttcctcattttataggtggtaaaactgaggccctgaagagagaggatttgtaaaaggtggaaactcagtctagttcaccttgtatagctttcwcatacaaatgactatccctaaatactaacctcttttcctcattctcacattccctagagacatgacagtaggcttcattgtaaagacgcaggttttaaagaactctgaatatatatacctgatgtagacagtcatattcagaacattttccaggtgagagcagttttataagtgcatttttatggtgacacacttctcagtatcatatactatagtccagctctacc

SEQ ID NO: 16153 - DNA, 627 bp, Homo sapiens
atatttaaaggcttgctcacagatttttttttttaaactgcatgagacaaacaaatgtatctacacttgcgttctgttagtctaaaattctgggctaaattatgactggatttggggacatataatcaagcatccaaatacatgtaaactaaagatgaattttgctggcaaactagttccagcctctggcattagaactacttagattttcttttcaaatactagactatatttacagcttaaaaattggatggaataggagccattaaaaactgatgacattgaaggaaataataacaatattttccatatgtaaacccaagctgaaaatacaattggcatctctgtctgctcagtgcaaagtattttgatgcttcacacaygttatcatgattgctgctactttaattcccacatctcgctggcaaaataattgaatagtgaagagaataaatgtctcttacagtatgtgaggcaaaaacccggatggttcagatcacatttggccaaagaaatgctttcttatttctcttctagaactgtgtgtctgaacactatcacgggctgtccaaagtgttttattagattgttcttccccctaaatacctgatttctgtattagaggca

SEQ ID NO: 16154 - DNA, 1031 bp, Homo sapiens
acaataaatggttgtaaaatggtcttgtcatgaagaaaacagggaagtggcaggcagagaacttagagggaaagcacaagcaatgactaaatagtgacaacagaataaaatgcagcaggatctttaatactaaggttttattgcattactctctccataggaggcaataaatcatgagttagctggactgacatcagtcctgtcaaccactatttctacagtaacctatgagaggaataagagccttgtagtttgattcctttagtaattcccaagtcaaggttgagatgagatgatgcagagtgacctggaaataagaatcaaactagcctatgtaagtgccaaaccaaaaatgctgcttaatggagccttttttttttctcaaagccccaaagaataaatgttatcaaatataggttctttcatttgcagattgtatagcagctgtcaatttcaatatggaaaggtagaggacaaggagctgtgaaaagcaggtattttatatttatggatggttcgggagtcggaacaattcaggtctaattacattttcatcatggactcactttatcagaaccctgtggcctgaaatatgcctgcttaatggatttattgtggtgaaccagagagtcattttcagtgggccagagaatgattgatgtaagcttcagggatacaagtagattttaaaccatttattaaccaatgaarcaaatagatttacggacaatttaaagaagaaatctgctagagggaggggttgcagcttttctctctgaacagtgatttcttgttgacttgataccaatgcagggtcaaaaacagaaaggtaaaactactaaataaaggccccatcaggaattaagatggtcaagatcatgcagcaacgccaaactcagaaaaattaaagccaacggggagaaatgggaaggcaagaaactaacagggaagggtaggagcaaaactcagacatgtgtttcccagacccgtaacacaaaagcaagcatttctcaggcccaaacccttcatgg

SEQ ID NO: 16155 - DNA, 523 bp, Homo sapiens
aagtttgagctcttcatgtttaaggtttggtcctaactgggtttaatggagcagaaactgctaaatgaaggacttaagtacttacttaaataagtaagtatatagtagatatatatatatakagagagagagagtagatatactataatagttatatatagtatatatatacatatatacacacacatatatatatatgatatagtagagataggtagcaggcaataattggtcatgctatttaattatttatatttttggtgaaaagtaatgtaagttcttgtcctaagtaaagagagtctctgtgtagctttcatctttcaaaccaactgacaataaaaaagagaaagtgaaaaagaaaaaataaataagatttgtcataaactagaaaatagaaataatgctgaatcacaataaagaaaagcctaaaaatgctttgaaaattaaaactagacgtgggaaaacatgatcatgtttataaatatttcagaacaactcttcagagttgtccaaaagtatattt

SEQ ID NO: 16156 - DNA, 523 bp, Homo sapiens
aagtttgagctcttcatgtttaaggtttggtcctaactgggtttaatggagcagaaactgctaaatgaaggacttaagtacttacttaaataagtaagtatatagtagatatatatatatagakagagagagagtagatatactataatagttatatatagtatatatatacatatatacacacacatatatatatatgatatagtagagataggtagcaggcaataattggtcatgctatttaattatttatatttttggtgaaaagtaatgtaagttcttgtcctaagtaaagagagtctctgtgtagctttcatctttcaaaccaactgacaataaaaaagagaaagtgaaaaagaaaaaataaataagatttgtcataaactagaaaatagaaataatgctgaatcacaataaagaaaagcctaaaaatgctttgaaaattaaaactagacgtgggaaaacatgatcatgtttataaatatttcagaacaactcttcagagttgtccaaaagtatattt

SEQ ID NO: 16157 - DNA, 542 bp, Homo sapiens
ttttcaagagacaaacctagatgctcataattcaggctatctsctttttttattatctttctgacatagtacagagtcactaggcttcacacaaagataaatgctatatgagactgcaatattcctccatctccagcattttatttatgcttgtgtaccagagcacatataattcatatctgtcaaatgttgccaagagtcattttaaacccatgaggtaggtgaaagcaggaagataccaagatttgttactgggaccgtgtctggttcacagaagtcagtgcccttctcagtggatatagagctgcaaacgtgaagaataatgattaataaaaaaggtcagattccaaagctgctccctttggaatgtgtttgagcagtttaataaactgctcaaaataagagtacataggactttatttcacggtgtgaaagattaggaaatgaaaaatgccatttaaaagacagaagatcccagaaaattagtactctgtcctcagaaatctttttcctgccccactcaccaaaactactcatatggt

SEQ ID NO: 16158 - DNA, 542 bp, Homo sapiens
ttttcaagagacaaacctagatgctcataattcaggctatctcctttttttattatctttctgacrtagtacagagtcactaggcttcacacaaagataaatgctatatgagactgcaatattcctccatctccagcattttatttatgcttgtgtaccagagcacatataattcatatctgtcaaatgttgccaagagtcattttaaacccatgaggtaggtgaaagcaggaagataccaagatttgttactgggaccgtgtctggttcacagaagtcagtgcccttctcagtggatatagagctgcaaacgtgaagaataatgattaataaaaaaggtcagattccaaagctgctccctttggaatgtgtttgagcagtttaataaactgctcaaaataagagtacataggactttatttcacggtgtgaaagattaggaaatgaaaaatgccatttaaaagacagaagatcccagaaaattagtactctgtcctcagaaatctttttcctgccccactcaccaaaactactcatatggt

SEQ ID NO: 16159 - DNA, 1190 bp, Homo sapiens
aaagcggtgtctatagatatcatttctaagctcctgtttctaaatttctatgaattcatgaattattgactcttcttgacattagctatttgtccaggatatcactattattctaggcttatctttgacttatttctatttttgtgtgctgattcctaatctgatgccaaattttgtcatttctcttattgaaatgtctctcaaatttaccccattttatccatttccttggttttcccttagtcctggacctaataagtttagacttagattacttgaaaggtgtccagacaggtttccctgcttcctgtyccctccttcattcaagtcctctgacacaccacttctagattattcatgaaaatataataaaaattgtcacacccacttaagagcattcttatttaattctgtgttatctactaaagcaattccaatatctctggctagtttaagaccctccatgactccatgtgactgatctctccagctttcttaccactcctcagcacttaaactgcattgaaacgagtgtcattgaagtcacacaagcatgtacctaaactccagcttctaagcctttatccatgccaattcctcaaactaaaatgttctctttctcttttttcccaaagatgtgcatttttcaaggaccaactaaaattccacctatttagagctttctctagcatttcaagtctctgttaaactttcttctcacctaaatacaacagcagctaaaactcgatgatggacaattgattattgcttcttaatttttcaaagcattgtttgttttaatctcccaaccaaattaaaatattcctaaaggcagaaatcatgtctcaaatctttcttatagtttcctttcttatggtttcttattcattgaataaatattaatctcaagtgctgaaagtgtgtacatcctaaataaaatcagtatctatgaggatatgttcaatttaacctttattgagcactacttttataagggtctgtgatagtcatgagggacttgaaacttgaatacataattctccttgagaagctcagactcttttaaatttggagtaatacattctactacctgtacatttttaactctcactttgaccactctctggagatgcagatcaattatgtccaacatctttaacatctctaactggaagtttcacaggtaccca

SEQ ID NO: 16160 - DNA, 604 bp, Homo sapiens
tggccaggatggtctcgatatcttgacctcgtgatctacccgcctyggcctcccaaagttctgggattacaggtgtgagccactggccaggatattcttatacattgtttctatagatcacattctccagaccacatcaaggaaaagcatcgggtcaagtggaatacctagaagatgttaaggaattaaaaatagttgcaggcaagcctaattctaccagggaattaacaattactattctgtaaaaattctgagataattaagcatgttgaatttgttaaaataactgaaaccaatatggaattgagtttcttcaaagtaaagccaattgtcctttgatgctcagaatgagttcacatttacaaatggtgttgcctggtatagtagaaagaacccaacaaacctaggtttgaatttcctatctgtcactgattggctggtgaccttggcccagtaccctcccgagattcagtacttctccacaatgggaaaaatgatacttaccttgcagggctatcaataaggatacagctgttgtataaagtgtctagaagagggcctttcacaggctcaaaaataagttgcttttgttgttgttgtcact

SEQ ID NO: 16161 - DNA, 604 bp, Homo sapiens
tggccaggatggtctcgatatcttgacctcgtgatctacccgcctcggcctcccaaagttctgggattacaggtgtgagccacyggccaggatattcttatacattgtttctatagatcacattctccagaccacatcaaggaaaagcatcgggtcaagtggaatacctagaagatgttaaggaattaaaaatagttgcaggcaagcctaattctaccagggaattaacaattactattctgtaaaaattctgagataattaagcatgttgaatttgttaaaataactgaaaccaatatggaattgagtttcttcaaagtaaagccaattgtcctttgatgctcagaatgagttcacatttacaaatggtgttgcctggtatagtagaaagaacccaacaaacctaggtttgaatttcctatctgtcactgattggctggtgaccttggcccagtaccctcccgagattcagtacttctccacaatgggaaaaatgatacttaccttgcagggctatcaataaggatacagctgttgtataaagtgtctagaagagggcctttcacaggctcaaaaataagttgcttttgttgttgttgtcact

SEQ ID NO: 16162 - DNA, 1267 bp, Homo sapiens
tcttcttgcacattaattcaattaactcagaagaaaatagatattttccaggaaaaatgtcttttattttacttttgtgcgaatacaaatatgtatcttttgttttaggaaagaaataattctctgatagtatttccataggactatgttactggtgttagcatgagtgaattttttagaacgctagtggtgagcatataatagagctatctcaacacctacactccaagaacaagtcacagcttctcctaaatgagccaagcattgcattrggcacttgcagtgaaaagctaaacaaaaccctgtgtttaagaagcttacggagagtgacaatagagacagttcagcatgttctctaatagagatatatatgaagagtgctatgggacaaagcagaggtggcgaccatatcagagagcaaatgctttaacctacacaattaaaaaaaaaaatcttatggcgttcctaattttgtttctttccctttcaattttctgaaattttaaaatgtttgttcacttgaacatacaataaattttctttaaaagagtccctcaacagggagatgagaatattctgtgtcttgatcttcatggtggtgtataccaaattcaccaaactgtacacacacaaatgtaccttttaccaaatgcaaattatacctcaaagtttactaaatccatcaaaacatacagtgctacatactttaaaaaaattagcttcctccctttgatgaccaaggtagcaataagtgtattagagaaagaaaaagatgctgggtgtggtggctcatgcctgtaatccccgcactttgggaggctgaggcgggcggatcacgaggtcaagagctcgagaccatcctggccaacatggtgaaacgccatcactactaaaatacaaaaattacctgggcgtggtcatgcgtgcctgtagtcccagctactagggaggctgaggcaggagagtcacttgaacccgggaggcggaggttgcagtgagccaagattgcaccactgcactggcaacagagcaagactctgtctcaaaaaagaaagaaagaaaaagactaaggaattatctcatggaaggctgtcttgcataataattattttttgtactgtctttcagctgtaggtccagatttttcaagaacactcttgaaaagagtaactcttgtcaaagtgggaggtgaagttgtcattgagtgtaagccaaaagcgtctccaaaacctgtttacacctggaagaaaggaagggatatattaaa

SEQ ID NO: 16163 - DNA, 1267 bp, Homo sapiens
tcttcttgcacattaattcaattaactcagaagaaaatagatattttccaggaaaaatgtcttttattttacttttgtgcgaatacaaatatgtatcttttgttttaggaaagaaataattctctgatagtatttccataggactatgttactggtgttagcatgagtgaattttttagaacgctagtggtgagcatataatagagctatctcaacacctacactccaagaacaagtcacagcttctcctaaatgagccaagcattgcattgggcacttgcagtgaaaagctaaacaaaaccctgtgtttaagaagcttacggagagtgacaatagagacagttcagcatgttctctaatagagatatatatgaagagtgctatgggacaaagcagaggtggcgaccatatcagagagcaaatgctttaacctacacaattaaaaaaaaaaatcttatggcgttcctaattttgtttctttcyctttcaattttctgaaattttaaaatgtttgttcacttgaacatacaataaattttctttaaaagagtccctcaacagggagatgagaatattctgtgtcttgatcttcatggtggtgtataccaaattcaccaaactgtacacacacaaatgtaccttttaccaaatgcaaattatacctcaaagtttactaaatccatcaaaacatacagtgctacatactttaaaaaaattagcttcctccctttgatgaccaaggtagcaataagtgtattagagaaagaaaaagatgctgggtgtggtggctcatgcctgtaatccccgcactttgggaggctgaggcgggcggatcacgaggtcaagagctcgagaccatcctggccaacatggtgaaacgccatcactactaaaatacaaaaattacctgggcgtggtcatgcgtgcctgtagtcccagctactagggaggctgaggcaggagagtcacttgaacccgggaggcggaggttgcagtgagccaagattgcaccactgcactggcaacagagcaagactctgtctcaaaaaagaaagaaagaaaaagactaaggaattatctcatggaaggctgtcttgcataataattattttttgtactgtctttcagctgtaggtccagatttttcaagaacactcttgaaaagagtaactcttgtcaaagtgggaggtgaagttgtcattgagtgtaagccaaaagcgtctccaaaacctgtttacacctggaagaaaggaagggatatattaaa

SEQ ID NO: 16164 - DNA, 1267 bp, Homo sapiens
tcttcttgcacattaattcaattaactcagaagaaaatagatattttccaggaaaaatgtcttttattttacttttgtgcgaatacaaatatgtatcttttgttttaggaaagaaataattctctgatagtatttccataggactatgttactggtgttagcatgagtgaattttttagaacgctagtggtgagcatataatagagctatctcaacacctacactccaagaacaagtcacagcttctcctaaatgagccaagcattgcattgggcacttgcagtgaaaagctaaacaaaaccctgtgtttaagaagcttacggagagtgacaatagagacagttcagcatgttctctaatagagatatatatgaagagtgctatgggacaaagcagaggtggcgaccatatcagagagcaaatgctttaacctacacaattaaaaaaaaaaatcttatggcgttcctaattttgtttctttccctttcaattttctgaaattttaaaatgtttgttcacttgaacatacaataaattttctttaaaagagtccctcaacagggagatgagaatattctgtgtcttgatcttcatggtggtgtataccaaattcaccaaactgtacacacacaaatgtaccttttaccaaatgcaaattatacctcaaagtttactaaatccatcaaaacatacagtgctacatactttaaaaaaattagcttcctccctttgatgaccaaggtagcaataagtgtattagagaaagaaaaagatgctgggtgtggtggctcatkcctgtaatccccgcactttgggaggctgaggcgggcggatcacgaggtcaagagctcgagaccatcctggccaacatggtgaaacgccatcactactaaaatacaaaaattacctgggcgtggtcatgcgtgcctgtagtcccagctactagggaggctgaggcaggagagtcacttgaacccgggaggcggaggttgcagtgagccaagattgcaccactgcactggcaacagagcaagactctgtctcaaaaaagaaagaaagaaaaagactaaggaattatctcatggaaggctgtcttgcataataattattttttgtactgtctttcagctgtaggtccagatttttcaagaacactcttgaaaagagtaactcttgtcaaagtgggaggtgaagttgtcattgagtgtaagccaaaagcgtctccaaaacctgtttacacctggaagaaaggaagggatatattaaa

SEQ ID NO: 16165 - DNA, 1267 bp, Homo sapiens
tcttcttgcacattaattcaattaactcagaagaaaatagatattttccaggaaaaatgtcttttattttacttttgtgcgaatacaaatatgtatcttttgttttaggaaagaaataattctctgatagtatttccataggactatgttactggtgttagcatgagtgaattttttagaacgctagtggtgagcatataatagagctatctcaacacctacactccaagaacaagtcacagcttctcctaaatgagccaagcattgcattgggcacttgcagtgaaaagctaaacaaaaccctgtgtttaagaagcttacggagagtgacaatagagacagttcagcatgttctctaatagagatatatatgaagagtgctatgggacaaagcagaggtggcgaccatatcagagagcaaatgctttaacctacacaattaaaaaaaaaaatcttatggcgttcctaattttgtttctttccctttcaattttctgaaattttaaaatgtttgttcacttgaacatacaataaattttctttaaaagagtccctcaacagggagatgagaatattctgtgtcttgatcttcatggtggtgtataccaaattcaccaaactgtacacacacaaatgtaccttttaccaaatgcaaattatacctcaaagtttactaaatccatcaaaacatacagtgctacatactttaaaaaaattagcttcctccctttgatgaccaaggtagcaataagtgtattagagaaagaaaaagatgctgggtgtggtggctcatgcctgtaatccccgcactttgggaggctgaggcgggcggatcacgaggtcaagagmtcgagaccatcctggccaacatggtgaaacgccatcactactaaaatacaaaaattacctgggcgtggtcatgcgtgcctgtagtcccagctactagggaggctgaggcaggagagtcacttgaacccgggaggcggaggttgcagtgagccaagattgcaccactgcactggcaacagagcaagactctgtctcaaaaaagaaagaaagaaaaagactaaggaattatctcatggaaggctgtcttgcataataattattttttgtactgtctttcagctgtaggtccagatttttcaagaacactcttgaaaagagtaactcttgtcaaagtgggaggtgaagttgtcattgagtgtaagccaaaagcgtctccaaaacctgtttacacctggaagaaaggaagggatatattaaa

SEQ ID NO: 16166 - DNA, 1267 bp, Homo sapiens
tcttcttgcacattaattcaattaactcagaagaaaatagatattttccaggaaaaatgtcttttattttacttttgtgcgaatacaaatatgtatcttttgttttaggaaagaaataattctctgatagtatttccataggactatgttactggtgttagcatgagtgaattttttagaacgctagtggtgagcatataatagagctatctcaacacctacactccaagaacaagtcacagcttctcctaaatgagccaagcattgcattgggcacttgcagtgaaaagctaaacaaaaccctgtgtttaagaagcttacggagagtgacaatagagacagttcagcatgttctctaatagagatatatatgaagagtgctatgggacaaagcagaggtggcgaccatatcagagagcaaatgctttaacctacacaattaaaaaaaaaaatcttatggcgttcctaattttgtttctttccctttcaattttctgaaattttaaaatgtttgttcacttgaacatacaataaattttctttaaaagagtccctcaacagggagatgagaatattctgtgtcttgatcttcatggtggtgtataccaaattcaccaaactgtacacacacaaatgtaccttttaccaaatgcaaattatacctcaaagtttactaaatccatcaaaacatacagtgctacatactttaaaaaaattagcttcctccctttgatgaccaaggtagcaataagtgtattagagaaagaaaaagatgctgggtgtggtggctcatgcctgtaatccccgcactttgggaggctgaggcgggcggatcacgaggtcaagagctcgagaccatcctggccaacatggtgaaacgccatcactactaaaatacaaaaattacctgggcgtggtcatgcgtgcctgtagtcccagctactagggaggctgaggcaggagagtcacttgaacccgggaggcggaggttgcagtgagccragattgcaccactgcactggcaacagagcaagactctgtctcaaaaaagaaagaaagaaaaagactaaggaattatctcatggaaggctgtcttgcataataattattttttgtactgtctttcagctgtaggtccagatttttcaagaacactcttgaaaagagtaactcttgtcaaagtgggaggtgaagttgtcattgagtgtaagccaaaagcgtctccaaaacctgtttacacctggaagaaaggaagggatatattaaa

SEQ ID NO: 16167 - DNA, 455 bp, Homo sapiens
  misc_feature (1)...(455): n = A,T,C or G
taagttttgtgggccaggcgccgtggctcacgcctgtaatcttagtactttgggagggcgaggcaggtggatcatttgaggttaggagttcgagaccagcctggccagcatggtgaaaccccatctctactaaaaatacaaaaattagccaggcgtcatggcgcatgcctgtaatcccagctacttggtaggatgaggcaggagaaacgcttgaacccgggaagcggaagttgcagtgagctgagactgtgccactgcactccagcctccctctccagaggaagactccatctcagaaaaaaatgaataagttttgtgaatttaaagtttgtgaaaatgtatagtttctgtattgcatgaattgtcacaattttntttttgaagactttacttttgagagcaatgtagtttctcagaaaaacacacgtacagcctcccccactatcarcatctcc

SEQ ID NO: 16168 - DNA, 587 bp, Homo sapiens
tgattgctgttattattggtaacattaatgtatgtgccaggtaccattctgacgtgtatatgagtcagctcatttaatttacataacaatttcacaaattatttatgatttttgtcccctgtcccccattatttttgtcaggtaagagatccaaggctgtgagaggacaaaaccttcatatgttgtagagttagccaggaggggaaccaggatataaacctaagtattctgactctagtgtcttggcctggatccactgcactgtttctcaagctagttctcaactcatgcactttgagagaactggaagtccctactcttcccccgactctgcttctgcaattcttttcctgactggtcaatgctacaggggaaaaaagatttgtttgcttttttcccattttctgrcagttccatggtatcaagctctccatgatcttgcccagacagtttcccacaaaagggactgaaccttggaggatggtttctacactctggctctccaccccatgctgcaagtctctcctggacaaaatcctcatcggcctcctctgaacactcttctcaactagctcctgatttttagg

SEQ ID NO: 16169 - DNA, 580 bp, Homo sapiens
gttattattggtaacattaatgtatgtgccaggtaccattctgacgtgtatatgagtcagctcatttaatttacataacaatttcacaaattatttatgatttttgtcccctgtcccccattatttttgtcaggtaagagatccaaggctgtgagaggacaaaaccttcatatgttgtagagttagccaggaggggaaccaggatataaacctaagtattctgactctagtgtcttggcctggatccactgcactgtttctcaagctagttctcaactcatgcactttgagagaactggaagtccctactcttcccccgactctgcttctgcaattcttttcctgactggtcaatgctacaggggaaaaaagatttgtttgcttttttcccattttctgrcagttccatggtatcaagctctccatgatcttgcccagacagtttcccacaaaagggactgaaccttggaggatggtttctacactctggctctccaccccatgctgcaagtctctcctggacaaaatcctcatcggcctcctctgaacactcttctcaactagctcctgatttttaggt

SEQ ID NO: 16170 - DNA, 567 bp, Homo sapiens
tgtgctgacactacaaatcccctttttacatatttaactggaaatgatgacagacattcagctatctcaactgcaaaacagagaaaataataataatgtctgctaagttgtgtgaaaattaagttagatacattataaagagtaaaatgctcaattaatattatttgctattattatttctaaaatgctattattaatcatttctttaaaagaaatgcaataaatattaccttttaaaagtcatatttatttctaagctttacttttagttttaataaaacaaccatgatgagctctgcaaaaaaattagttaagtgccacttcttttattttattcaatgtgactttctccatcactataaggaattycttaacccacattatctacctcaatagagtgaataaaacagtgaatataaataaactgtacaggaagaaaaaaaggaaaaatttgaggctaaatataaacccatacaaacctgaatagtagttgatattcatcgtgataaagggtgtcaaagtcaaccatttagcaatgcatgatgctatattacactcttttactat

SEQ ID NO: 16171 - DNA, 573 bp, Homo sapiens
accctttcctctggatatcttgtttcatgtggacattataggcctagcacagtgcttggaaagtggtccaccctccatgaacacttgttgaatggaaggtagtgttttcagagagttggaactctcagaggccaracagagggggaaaccctattttttcaagcatttacaggatttcaggtgccacacagagcatttcatatcattcagtccccacaataatgctataaggtggttataccactttcaagtaagaaaactgagacttagaaaagtgacatcattgggcagagaagcatttgaacacagggttctctctttctgttcttttactgtatcctgtattacaatcccaattgtcttcatgcactgtgatggctgagggtgggcctgagtccttgagtatatctaccttaagtagtaagttaaccatattatacctactactccaaacatatttcccataaaacactgactttcaaatgagtctacaagagaattgtttgtgagtagtttatttaggtttctatattcatcaaaggccaaataagcattatcatcatagtgtacagg

SEQ ID NO: 16172 - DNA, 511 bp, Homo sapiens
tagccycattaacaaaaactctcacacgaaaagtcagcagtccatattactcacacacattcagttttcaacaaaatcatgacgtgccaaaaaaagaaagaaaaatcagagttagagcagataaaacaagcatcaagaccatgctaaggtatgacataggttttaaaattatcagcaaatttaaaataactaattaatatgttaaagtccccaaagaaaaaaagtagacaacatgcaagagcacatggctaatgtaagcagaaagatagaaactgtaagaagaaatcaaaaagacatagaaataaaaacaatataatggaaatgaagaatgcctctgatgggctcattaggagactagacatgaccagggaagatcagtgagtttgatgatacgtcagtggaaacatcccaaactgaaatgtaaagaggatttttttttctgttttttgttatatttgtattttttaaatggaatatcctattgctgtggatatatttttttaaagatacc

SEQ ID NO: 16173 - DNA, 502 bp, Homo sapiens
tatttgccaactttgttagttaagtgattaatttcatgattttagaggaagaaaggtgtactaaaactctgctctgagaaacttgttttatatttcctttttgtgtatgtgaatattcctatggcattacagcatgaatattgcactaaaattttgatctaagatctgttctatataaagtggaatttatcttggagagggagaaaggagaaagggtcaattttggattcaagcttagtgtgttcaactgtcctaaatcatagctcactgcttgaggcacagggtcttactgcagagtccccaggagagggttaagataccacaaagktttttttccctttttaaacatttctataatttttatcttaaagactatatttcatcatttttcaagccactggttgttatagttagataccttgatactatgaatgttcaaggaaataattttattgaaagagattattttttctattaaatatacagtgaaactaaaagtagc

SEQ ID NO: 16174 - DNA, 547 bp, Homo sapiens
tggaaaaaaaaaaaaaaaaaaaacaacagtcgtctgggtgccatggctcacgcctataatcccagcactttgggaggtcgaggcaggtggattacctgaggtcaggagttcgagaccagcctggccaacatggcgaaaccacgtctctactaaaaatacaaaaattagccttatatagtggacatacttgtaatcccactaccagggaggctgaggcaggagaatcacttgaacccaggaggcagaggttgcagygagccgagatcctgccattgcactccaggctgggcaacaagagcaaaactccatctcaaaaaaaaaaaaaaaaaaagtctacaacattatgataactaagaaatcattttttgcttaagccactgtgcatctttttaatgcaaaaataactgatatacttttatttgttcttctaagataattatccttatttacattggcatgttcttcagatgtgaccaggaataaatatatgacataaaagcctggttttcctagctggctaacatttctcaagttctgtgccaaacac

SEQ ID NO: 16175 - DNA, 522 bp, Homo sapiens
tactccatgttctctactttttgcctgctctgtgtatatctatcattgttttgccacccaccatgtttcatatgcaaactctgtgagaggaattgaccaggtctgttagtcaccrtagagtacagagattctgccctcatagatactcaccaagacggtgcctgtggttctggcgctcgtgaattggtgctcacatgggttccaagtggcaagatagatagtgtgattgatagaataaatggactcccatgaataaagagaacctctgaaatggagttgtggacatgagggactagaagcactgtgtcctgtcaggtgttgcctttattagtctgtcagaatatttattaaaaaaaaaaaagcaaagcattttccttgggaaaaaccaaataaattccattgatttttcaatacaagtttcttgccatcaggagatatgttggtctaaattcaagtacagattcattttaatttgctaagtttatgtgattgtttacaatttttagtatctgcagagtacag

SEQ ID NO: 16176 - DNA, 522 bp, Homo sapiens
tactccatgttctctactttttgcctgctctgtgtatatctatcattgttttgccacccaccatgtttcatatgcaaactctgtgagaggaattgaccaggtctgttagtcaccgtagagtacagagattctgccctcatagatactcaccaagacggtgcctgtggttctggcgctcgtgaattggtgctcacatgggttccaagtggcaagatagatagtgtgattgatagaataaatggactcccatgaataaagagaacctctgaaatggagttgtggacatgagggactagaagcactgtgtcctgtcaggtgttgcctttattagtctgtcagaatatttattaaaaaaaaaaaagcaaagcattttccttgggaaaaamcaaataaattccattgatttttcaatacaagtttcttgccatcaggagatatgttggtctaaattcaagtacagattcattttaatttgctaagtttatgtgattgtttacaatttttagtatctgcagagtacag

SEQ ID NO: 16177 - DNA, 544 bp, Homo sapiens
cgagataggtccaagtcagttggtgactgctcttactggagtaattatactatatgattcttagctcgtctttggtctaaaaggataacaatggtacttgtttgtacagcaccaacacagcattatcctgcaactcgaatttaaagctatcaattgataataattattccttgaaacagtaaaatgtttaatttcatttacatttcattagcgtcattatcactcatatcactaatagtgcaaaactttacttttttggtaacttgaaaaagtaatatttttaggcatggaaaattgaaggaattacattaattctttaaattaattaatttctctagagatatcttcctttgatgctcaaagaaaatgagcaatcatttgtttccagtgtgtgttgtttactggacccctttctgttagtgtttttaataattgggagtaaaggatagtctaattcactgtayattactgaagaaatctcctatatatccaactgtgaactgttgataagtcatgatattggcataaagaagtaggtaagact

SEQ ID NO: 16178 - DNA, 544 bp, Homo sapiens
cgagataggtccaagtcagttggtgactgctcttactggagtaattatactatatgattcttagctcgtctttggtctaaaaggataacaatggtacttgtttgtacagcaccaacacagcattatcctgcaactcgaatttaaagctatcaattgataataattattccttgaaacagtaaaatgtttaatttcatttacatttcattagcgtcattatcactcatatcactaatagtgcaaaactttacttttttggtaacttgaaaaagtaatatttttaggcatggaaaattgaaggaattacattaattctttaaattaattaatttctctagagatatcttcctttgatgctcaaagaaaatgagcaatcatttgtttccagtgtgtgttgtttactggacccctttctgttagtgtttttaataattgggagtaaaggatagtctaattcactgtatattactgaagaaatctcctatatatccaactgygaactgttgataagtcatgatattggcataaagaagtaggtaagact

SEQ ID NO: 16179 - DNA, 564 bp, Homo sapiens
atgatgtggcaccaggatctagcaacccatgaagctgttaccacccctgggtgtgaaggggtaaggggaggaggctgttactagaacttcatgggagctatagtgggtggggctgtcttctgaaggagctagggcctcatgtggagaggtagagacactgtgaagccacagtagcaggaagggaactgggcaataagtaccctaataagatccttgtgtcttcagctgatgcctcctgttggcctaatataatgggaagcaagagggcaaggaaggccagatggtgcattcttcagagcctgccagggccgtgggcagggtggagaagggtgaagagggatctggaagggtaaatggaggcttttgagcgcagttaacttttgggctgaaggaaaatggacatgcaagcaggagggagaatcctagttagactcctcgsttttcacaagtcattgtcgatgtcactgtcagtgtagtgggccttcaagctatagggagccactcctaatgagcaacatggaacactaggcctttcctggagaacctcacttccacttgtttgtt

SEQ ID NO: 16180 - DNA, 552 bp, Homo sapiens
atttctattataatcatgtactccccagtgaatactaagctttttaagagattagcttgaagaatgtatggacttcaaactaaaacttgaaagtcagaataaagtcaaggttaatttttttaagaaggcaacatgtatatttaattaataaaaaatattggatcattggtgttacactttgtagccataatggaatgactggtataagacacagtctcctggtgtaacgaactttaaaacttcataggccgggcayggtggctcactcctgtaatcccagctttgggaggccaaggtgggcggatcacaaggtcaggagatcgagaccatcctggctaacatggtgaaaccccgtctttactaaaaatacaaaaaattagccaggtgtggtggcgggcgcctgtaatcccagctaatcaggaggctgaggcaggagaatagcttgaactggggaggcagaggttacagtgagccaagatggcaccactgcactccagcctgggggacagagcgagactcctcatctcaaaacaaaacgaaacaaagcaaaac

SEQ ID NO: 16181 - DNA, 552 bp, Homo sapiens
atttctattataatcatgtactccccagtgaatactaagctttttaagagattagcttgaagaatgtatggacttcaaactaaaacttgaaagtcagaataaagtcaaggttaatttttttaagaaggcaacatgtatatttaattaataaaaaatattggatcattggtgttacactttgtagccataatggaatgactggtataagacacagtctcctggtgtaacgaactttaaaacttcataggccgggcatggtggctcactcctgtaatcccagctttgggaggccaaggtgggcggatcacaaggtcaggagatcgagaccatcctggctaacatggtgaaacccygtctttactaaaaatacaaaaaattagccaggtgtggtggcgggcgcctgtaatcccagctaatcaggaggctgaggcaggagaatagcttgaactggggaggcagaggttacagtgagccaagatggcaccactgcactccagcctgggggacagagcgagactcctcatctcaaaacaaaacgaaacaaagcaaaac

SEQ ID NO: 16182 - DNA, 552 bp, Homo sapiens
atttctattataatcatgtactccccagtgaatactaagctttttaagagattagcttgaagaatgtatggacttcaaactaaaacttgaaagtcagaataaagtcaaggttaatttttttaagaaggcaacatgtatatttaattaataaaaaatattggatcattggtgttacactttgtagccataatggaatgactggtataagacacagtctcctggtgtaacgaactttaaaacttcataggccgggcatggtggctcactcctgtaatcccagctttgggaggccaaggtgggcggatcacaaggtcaggagatcgagaccatcctggctaacatggtgaaaccccgtctttactaaaaatacaaaaaattagccaggtgtggtggcgggcgcctgtaatcccagctaatcaggaggctgaggcaggagaatagcttgaactggggaggcrgaggttacagtgagccaagatggcaccactgcactccagcctgggggacagagcgagactcctcatctcaaaacaaaacgaaacaaagcaaaac

SEQ ID NO: 16183 - DNA, 520 bp, Homo sapiens
gaatggagttggttacctgaccagctttcctactcaacatggagctctgtctgtctcatctctctcgattcttcagtgcataacccagttcctagcttgtgatggatccttcctaaggatgtattgggtaaattaatgaatagtgattcgacctaaccaattaaatccctgggagttttaaactcttgtccaacatcagttttatttcacgtcttattataaaacagtacatacctcttccagaaaaagtgaaaaacccttatatcacttagatgtaactaattaaacaaactgatgcatgtgtgtgtgtgtgtgtgtgtgtgtgtgtgtgtatagttgtatggtggtatatatattagtttgtaaatagctcttctactaaatacatgataaatatactttgacatcatcatgtgtacttctactacatcaccatttgaytgcttggacaccagacttcaccgttgttcagacctaagtggcaaaaccctttgtatttttctaagtgtctaggcagaca

SEQ ID NO: 16184 - DNA, 520 bp, Homo sapiens
gaatggagttggttacctgaccagctttcctactcaacatggagctctgtctgtctcatctctctcgattcttcagtgcataacccagttcctagcttgtgatggatccttcctaaggatgtattgggtaaattaatgaatagtgattcgacctaaccaattaaatccctgggagttttaaactcttgtccaacatcagttttatttcacgtcttattataaaacagtacatacctcttccagaaaaagtgaaaaacccttatatcacttagatgtaactaattaaacaaactgatgcatgtgtgtgtgtgtgtgtgtgtgtgtgtgtgtgtatagttgtatggtggtatatatattagtttgtaaatagctcttctactaaatacatgataaatatactttgacatcatcatgtgtacttctactacatcaccatttgactgcttggacaccagmcttcaccgttgttcagacctaagtggcaaaaccctttgtatttttctaagtgtctaggcagaca

SEQ ID NO: 16185 - DNA, 504 bp, Homo sapiens
acaggcacacacacatctgtgacgctctgaagactcaggcagggctgtccgtcacccagcacagcctcatcctgccaaccaggctggacagggcccctgaggccattgcgggggcagagcaagtttgcacggggaaacccacgttcgttccctcataacgctggctgcagcatcccaggcaaaggcttcccaggctgaagggggctccgtgcaggaggaggggcccccacaygccaccccatgccccactttcctccctctctcttcccacctgccacctccggctccgcggcagggagttctggtaacagctagacacacgggcagaaacccacaaaaagactcacacacgtgtgtgtgtattccaaggaagaagtgaaagctctgctcccgttgccatggcaaccccacccggagctacagcaagagctttaattggcagtacttatttggctgaaaccccaagaataatcaacaggagattagaaacattaaaaaccagca

SEQ ID NO: 16186 - DNA, 504 bp, Homo sapiens
acaggcacacacacatctgtgacgctctgaagactcaggcagggctgtccgtcacccagcacagcctcatcctgccaaccaggctggacagggcccctgaggccattgcgggggcagagcaagtttgcacggggaaacccacgttcgttccctcataacgctggctgcagcatcccaggcaaaggcttcccaggctgaagggggctccgtgcaggaggaggggcccccacatgccaccccatgccccactttcctccctctctcttcccacctgccacctccggctccgcggcagggagttctggtaacagctagacacacgggcagaaacccacaaaaagactcacacacgtgtgtgtgtattccaaggaagaagtgaaagctctgctcccgttgccatggcaaccccacccrgagctacagcaagagctttaattggcagtacttatttggctgaaaccccaagaataatcaacaggagattagaaacattaaaaaccagca

SEQ ID NO: 16187 - DNA, 542 bp, Homo sapiens
ggtgctggggctgagtagttccagtgtggggccaaggcccctgctggaggaagccatgggccatgatcttccacagggttctaagaccacatggggtaacatcagcagggaactctgaggagaccagagacatctgaggaggccactcccttacccagatgtgaggagccagggccacctctgccacgggcctgyctttaggaagcagcactcagtgacccagtgaattggatggggaccaagggctccctctgccccttctcacatccctaacagagaagtcaggtaacctgacacagcctgtcccctctcactggcctgtgtgcaatccagggggcacagagaaagaagaaccaaaggctctggggctcagaaagcttcaagcccctatgcaggcctggaagtgccaaggcagagcctcttctccaagcaagtgcagagaaggctgtgcaatagactgacagcaggaagggaggaaggaggggggaggagggaggagggcagaaagggagggaggaagaacggtaggagggaaagaggac

SEQ ID NO: 16188 - DNA, 521 bp, Homo sapiens
ccctactcagaggacttccttttattcgttatttttaaattttgtttatttatttttctgctgagacagagtctctgtcacccagactagagtgcagtggtgcaatctcagcttactgcaacctccacctcccaggttcaagcgattttcctgcctcagcctccccagtagctgagatttcaggtgcccaccacygtgcctggctaatttttatatctttagtagagacagggtttccccacgttggccaggctggtctcaaactcctggcctcaagtaatccatatgcctccgccttctaaagcgctggggttacaacatgagccaccgtgcctggcagaggcctttcttttaaataatgagatgttggtggaggctgtccttctcacaaactgggctttagtcaatggctctgagaaaggagagaactatactttttgccctggtagtcttctatcttttctttgaagaaaaattcctctccttcccagtcattccagcccttgccaaggatccttgga

SEQ ID NO: 16189 - DNA, 639 bp, Homo sapiens
ccctgcactttgcccaggacaggatttatcaccctgtattgtaattgcttctttaatgtgtgcctctctcaggatctcattgagagcaggaccatcttgtatttatcatggtatcccccgaatttacattgactggagaaatatgttctaagtggttgaataaatgagtgaatgaatgaaaggtaaagagtargataagcacaaaagggaattgagaatattctgtaattaagttgtggggatggctgcacaactctatgcatatattgaaaaccaatggattgtacacacgaaatgagtgaattgtatggtatgtggactatatctaagtaaagctgtttataaaaagaaaattgagaaatagtaagtcatccagatggaagaacatattacataaggctagaaagaatctttaacatttcagcgtcaactcgaaatgtgctgaaagattgaatgatcaaaactcaacttaccatccaaagtctttatcccaatattgtcttcttactggatgcgtttgcttactttatttattcatttttttttaccagtcttcaaagtatgttaagattagttttctaaatgcttttgttttcactttcctgctgtgagtagcaatctaatctagactggatagca

SEQ ID NO: 16190 - DNA, 578 bp, Homo sapiens
aaaaatcaaggggagataaaaccttactcagacacactaaagttgagggaatctattaccactatacttgccttacaagaaatactaaaagtagtccttcaagctgagggacaaggtcacttaaaagtaaacatatagccaaagtgaaaacactcctatactgtrgtggtgatgtgaacatcaattatatcactagtataaagattaaaagacaaaattattaaaaacaactatagctacagtaatttgttaagggacacaaactataaaatatataaaatatgtcatcaaaaacaaattgtgaggaggggagtgtaaaagtgtataatttgtgcaagtgatcaaggttaaattgttgtcagttcagattaacccttggtcttatccaaaatcatagagggagtatccatatctctgttttaattacctatttttgctatggtcggaacatgtccccaaaaatttatatgttgaaatataatgatagtattaagagatggggcctttgtgaggtaattatatcatgatatatttgtaatcatgatagtattaagagatagggcctttttgaggtaatt

SEQ ID NO: 16191 - DNA, 578 bp, Homo sapiens
aaaaatcaaggggagataaaaccttactcagacacactaaagttgagggaatctattaccactatacttgccttacaagaaatactaaaagtagtccttcaagctgagggacaaggtcacttaaaagtaaacatatagccaaagtgaaaacactcctatactgtggtggtgatgtgaacatcaattatatcactagtataaagattaaaagacaaaattattaaaaacaactatagctacagtaatttgttaagggacacaaactataaaatatataaaatatgtcatcaaaaacaaattgtgaggaggggagtgtaaaagtgtataatttgtgcaagtgatcaaggttaaattgttgtcagttcagattaacccttggtcttatccaaaatcatagagggagtatccatatctctgttttaattacctatttttgctatggtcggaacatgtccccaaaaatttatatgttgaaatataatgatagtattaagagatggggcctttgtgaggtaattatatcatgatatakttgtaatcatgatagtattaagagatagggcctttttgaggtaatt

SEQ ID NO: 16192 - DNA, 552 bp, Homo sapiens
tgaagggtgaaactgaggggacattgggggaacagttattctccattcagcgttgtcagatttaagaaataaaaatgcaagatgcccagttcaaatttgaatttcagataagccacattttattaagaataagtatggcccaagtatagcatagtcagtctcagtttttattgtactccactcatcctgtttctaaattgagcaattcccattacaataacaccctaggcctccttctctctctccactcttttcactataggaacaaaaagtgattcattttacttgtggcttgggacaaggaacgggataagtgacgctcagtcctttctagtrtctcttataagctcctgactgccgacgttccctattccattctaatccatgtggttatctcagcaataaagaccctgacatgattgtgaatctccactgactaggagagaatagagaagtctccacatctaggatgcagttatatggaagcctttttttgctacttcgaaggcgcattccccattggctcagttaataataaaacatgccattttt

SEQ ID NO: 16193 - DNA, 552 bp, Homo sapiens
tgaagggtgaaactgaggggacattgggggaacagttattctccattcagcgttgtcagatttaagaaataaaaatgcaagatgcccagttcaaatttgaatttcagataagccacattttattaagaataagtatggcccaagtatagcatagtcagtctcagtttttattgtactccactcatcctgtttctaaattgagcaattcccattacaataacaccctaggcctccttctctctctccactcttttcactataggaacaaaaagtgattcattttacttgtggcttgggacaaggaacgggataagtgacgctcagtcctttctagtatctcttataagctcctgactgccgaygttccctattccattctaatccatgtggttatctcagcaataaagaccctgacatgattgtgaatctccactgactaggagagaatagagaagtctccacatctaggatgcagttatatggaagcctttttttgctacttcgaaggcgcattccccattggctcagttaataataaaacatgccattttt

SEQ ID NO: 16194 - DNA, 296 bp, Homo sapiens
ttttttttttttttttttttttwacctctatattgcctcctccctgttcctcattcagctggtccttttttaggcagttcacttttccacttctgcgccaatgtcacagtccatttgttgggaactcctcttgtctaaatgttttcttagaacaaggaaggaaattctattagtgatttcttcattcttgcagactacggctctgttcaaacatgacttatttacattgattttgatatatcataatatgtgcccctaaagtaaccatataaagaagaacttgatagtttcttttt

SEQ ID NO: 16195 - DNA, 615 bp, Homo sapiens
tgtaaagtgggaaagaagcaaggcttgtgtacktttctcttataaggcaggtgtaaatgcagatccagatacaaatgcaaagatttccaagggagattgggaaacatctgtttctcctgttccccacccaccccctgcaaatttaccagtaggacagaggtctataaaagttgagaaattccaccctaaaagaattattaccttccatgctccagacctaggttctaatttcacttgaacatcacatattacttagatacttgaagctcaattttccaaggaccctgaagttttgacatcgggacttaaattcatatcattacattaattaaaaacttgttttgggtacaggacttttatggttttgtgtcggggatgggagaggctgtttctaccctaaccttatggcattcaagaaactacacctgttcttgcagagttggccttctgtggcgggaaacaaaatgaagaaccaactcaaatgtcattgctagtgacacagagcttatgctctagggtttcaggttaactcaaagcacacacttagtgacttaagaataaaaatattggtcccttttttctggagaaggaacttttaggtttgtcttgttgaaa

SEQ ID NO: 16196 - DNA, 528 bp, Homo sapiens
ccagaatctggacttttgggagctcaaaagccaagaatcaacccctctaagtttctctttgcatttctattgtacccttcctaaggcagtgaaagggagttaggccaaggttattttaaatctagcagggttgtgagttggggaagaagaggcataattaacaaaatttcactctctctttctttttataaagagtttttgttacactggtggagtctcactgcacttaccatgtgactccagtatataaaacacaactccaactatgttcaaaatatgcatacacataggcgttatatttccatggtgaggaggaggggattgctacacacagtgaaatatgcaaggcaaatgaactasaaagaaatacagccatatgtgaacaggaatatctctggatggtgagattagagatgattaatttgattctcaatactttcatgtatgttccactatcaataatggaatttttttaaactctaaatggttactttaagtctttatattaatatatggacctagatatag

SEQ ID NO: 16197 - DNA, 543 bp, Homo sapiens
actgaacttcagggttaaggaagataaaaagtggggttagttcttaatagaaatgtacaacataaaattatttttaaattaattaaaaaaatttyaaggtcattcttgaaagatgcagtgaggtctcttatttaaaacaagaatctggaaacctaaattgtctcagccataacttgaactagcaaggagaatgaaggacagagggtgcctccttggtgattataggttaccgaagcagttgcctgctctctagagaatttggctggtccctcaagcttctttcttggaccattacttgatgaaagtaacagaactttaaagttggttccaggagatttatccaagttgggttgttaggccagaggtgaggctctggcattggaagcctcaaaaggggagacagacttggtctcacctttcccctcggtgaacttcagggtggctgcggtgatggccttcactttgtccccttggatggcgatgtcagcttccatcaacttgtgcttctgtagcaggtcttcaacctccaacaagtgcttccca

SEQ ID NO: 16198 - DNA, 522 bp, Homo sapiens
tgaagcttcagaattaacttttaattcttgctttaagttgcaaaaaacgaaaacaaataaaaaaaaccccacsaaatctaaccaaaccaaaccaaaacaaaatgtgggtgattaactagcagacaagtagagaggggctgtttcaaaaacttcctaaacataacttccttttactcaatggtagaaacttttacctggagtggatactggctagtatgtggacacacaggggaattttttttttttttttttttaacacaggtttatcaccaactctggcagttttgagaaagactcacttgggttctaaggaacagaatttttctgtgaaaactgcatctcatcaagctgaaagatctccagcagtgccaaggccagggagcaggtctctgtcctcagctgccagcttgttggctgcagccccaaaagacctactgatatttggtcctcatcaagagctgacccagagagtccatgtatgcaactgtaaacccacttttttccccctattttgttttcctt

SEQ ID NO: 16199 - DNA, 535 bp, Homo sapiens
gaatataagttttgttttgtttttctctgttagaaatgtgattcctgtgtcattgggtaagtgactttataagaaaaagacaaactttataagaaaaagacaaactcttttgtggtagagttttatcgttttgcattctttttagcaatctataatatttcccattgctccatatcttttccagcatttggtattgtcagctcttcttttttaatggatagtgatgttgagcacatattcatgtgcttatttgttaaccatatagtttctttgatgaagtgattgttcaaatctttctcctcattttaaaaaagcattttttttttcaattgagctttgggaattcattatatattctagagatgtcattttcattctcttgtcagtgtcttttgcaatrcaaaaattttggagttgatgtgatcagtttacatttcatcagaagacatttagtcttttgttttcctctatatgttttatagctttacatttcataaataactctatgatccatttccagttaatctttatataa

SEQ ID NO: 16200 - DNA, 566 bp, Homo sapiens
tgagagcaaagcagtcttggagcccaggacaagtagaatgaaaagcaaatttgtcacctatgtaatttattatgtcgctttcagttagtgctattatcagagggtaccatctggtcactgtctatttttactggttatttttgcagctaagtgctgagctcacttgtttctgtgttgctgaaaggggacatatactgtaaacaagtaaatgccacatattttaaaaggaacaaatttaaatatatatgtaatatatataaaattattacttgattctaaattctaaattgtgatggcccaagacaaatgcctaggtactctagtccactgtagtcacatcccaaagtaagcgcctcagagctttgtgaatgtctcctgtttcagatctgatctcttgtatcctagccacactcgtatctcagaaacctgagaatcaaagtccttgctggtatattgatttttatgaattgcaaaggtttatttactgtttggctctgtatcaytttgcaagtttcctggaagcacaaagtatttatttgacttagacatatatttttaaattttaa

SEQ ID NO: 16201 - DNA, 468 bp, Homo sapiens
aagataaacccccatgacacaagtttacctatgtaacaaacctgcacktgcacctctgaacttaaaataaaagttaaaaaataaataagtaaaataaaatttgaaaaacaagagttttgactttgaactaataactatagtggtttacttcttacacaaatgagtccattatactctgctctctagattcctcagaatatatctcagaagaaacgctcacttgaacatttatacagtagcaagttggtggcagggtaaattatctcatgattcctgaatcatagctcccatatcctactactgatgaacagtctggctttatttatttatttattttttgagacggagtttcgctcattgcccaggttggagtacaaatggcgcaatctcggctcaccgcaacctctgcctcccaagttccagccattctcctgcctcagcctcctgggtagctggggttacaggcat

SEQ ID NO: 16202 - DNA, 468 bp, Homo sapiens
aagataaacccccatgacacaagtttacctatgtaacaaacctgcacgtgcacctctgaacttaaaataaaagttaaaaaataaataagtaaaataaaatttgaaaaacaagagttttgactttgaactaataactatagtggtttacttcttacacaaatgagtccattatactctgctctctagattcctcagaatatatctcagaagaaacgctcacttsaacatttatacagtagcaagttggtggcagggtaaattatctcatgattcctgaatcatagctcccatatcctactactgatgaacagtctggctttatttatttatttattttttgagacggagtttcgctcattgcccaggttggagtacaaatggcgcaatctcggctcaccgcaacctctgcctcccaagttccagccattctcctgcctcagcctcctgggtagctggggttacaggcat

SEQ ID NO: 16203 - DNA, 533 bp, Homo sapiens
tgttatgatgattcgagtttcacctatgctggccttagtatttggtagcatttaatatcgtgtttttaaacttaccacttgaacttgattctgtgcttgccaagcaaactaaatggagggtctaaacggaagatctcagctcaagaagcttctgtcctgtcatactaattagcacatgcctgaatctgactggacagcccagggcagagtgagtcaacaatggctaatctactctgtgcttcttataggaactgtttataaccagaggtgcccattgcagtgtgtgtgtctggctggggggacttctgcccttatgtttacaggacttaaggcctgatttcaggacatgttggggtgctcttacaattaattttagtgattctatagatcctatccaagctttattaagatgccaagcacccacccactcccataacccccayagtacccctgaattagtgtcatagaatgtgagacaatcagagagcatcttaatgcctccatggtgagtgcaaggacactactgtcctctt

SEQ ID NO: 16204 - DNA, 531 bp, Homo sapiens
tgaaaagaatgaggatatccaggatgtgctagaaaacaaaagcaagaataaaagataattctttcatccaacaagtatttcttatgccagacattgtgctagatactgaaaatttaagaatgaaaataggcatgatgctgggccttgtasagcatataatatagaatcctattaatacattttattaaaaatttaaaaatgagtataaaaatacatatgaatatacataatgtctggaaaataaattgttagctaaagataattgtttagcctaacactaaattgttaaaagtgactattttgggagctaggattatggggggactttctgctttatacacaattatttgcatttttcaaaaaaataggcatgcattatttatgtaatcagacaaaaccataatctaagcactttcatgatttctctttgtccttggtagaaagtggatattattcaaggtcttttgtaatctgatcccaaccacttttttctgtctcccacctgtaaaccaaagaaaaagaccgaggcaa

SEQ ID NO: 16205 - DNA, 568 bp, Homo sapiens
atcattggcccatatgcattttcatgccatgggtctaattttgaaaaaaaaaaaaaaaaacaaaaaaaaacacaatttctaatacagaatttaaagtttaggacttgtatgttctaaaacctgaattatcagcgtgacaaaatgagtatgggctgttcttcactgccttgcatcttcatggtttccacctgaaatggcaacattttcctggcactaacttagggctccaaaggactgtagctgaacatagatccacattattgttcctctttttttttttttaattttaatttttaaaattttctttttacactgaggagcaagtgtccacttttttaatgagggcaggaaaggagtaggaccacatgaggaagaaattaaagctgtcagtctgtaggctcgaatgccaggaagttcagagaagcctctttaggttcctagggaaaccatgtktgcttttctgaaaggacctttggaaatttgcaaatggtaggacagacttgtactagcaggtacgtttgtttgcatttgcaaaaatcatcttttacgagcctttagaatattcaaa

SEQ ID NO: 16206 - DNA, 550 bp, Homo sapiens
ggtggcatcagcgattcattcttcaaaatcttggtgccatccaccctgccatgtgcctcgaagctaccaagtcggggagcagatcttctgggaagaatgttgtaaatgctaaaaacaattatgatttcctgagagatgcttcaaatgcaaaatcttcaattattttaaaatgaatcagacaatattattctttatgactcttcagcacatgttctcatatgtgatttcattttaggtaggaagaattttcctaaaaacatataccaaaagctactaaaaggttttgcagcttttcctatctacttattagaggttatagtcaaaacaaaatgtaygtaaatgacctaagtaaattatcaggtttttataggacatgaatgaatatttcttaatcatgggaagtttctattcaaatctgctgtcagttagataattatattcttctatggaaagagagtgggtaccctttgtacaggtacatacatctctgtggtccctaaagcccattctctggtaaagaagttgagtcaacttagggaatgaatatttg

SEQ ID NO: 16207 - DNA, 550 bp, Homo sapiens
ggtggcatcagcgattcattcttcaaaatcttggtgccatccaccctgccatgtgcctcgaagctaccaagtcggggagcagatcttctgggaagaatgttgtaaatgctaaaaacaattatgatttcctgagagatgcttcaaatgcaaaatcttcaattattttaaaatgaatcagacaatattattctttatgactcttcagcacatgttctcatatgtgatttcattttaggtaggaagaattttcctaaaaacatataccaaaagctactaaaaggttttgcagcttttcctatctacttattagaggttatagtcaaaacaaaatgtacgtaaatgacctaagtaaattatcaggtttttataggacatgaatgaatatttcttaatcatgggaagtttctattcaaatctgctgtcagttagwtaattatattcttctatggaaagagagtgggtaccctttgtacaggtacatacatctctgtggtccctaaagcccattctctggtaaagaagttgagtcaacttagggaatgaatatttg

SEQ ID NO: 16208 - DNA, 503 bp, Homo sapiens
agtatgagcgtgagaatgattgtgaaaggatgactataaattgagtgtgaattagtgaattggtgagtgtgaagtagtgcagatgggtgtgaattcgtgagactgtgtgtgaatgagtgtggatgggtgtgaactggtgattgtgcatttgtgaattggtgtgaattgtgtggtgtggatgagtgtaaacgggtgtgtaaattagtgaattggtgagtgtgaagtggtgtggatgagtggatggatgtgaatgggtgagagaatgaatgagtggatgagtgtgaactgatgagtgtgaatgggcgagtgtgaatgtgtgaatgggygagtgtgaatgtaaatgagtgtgaatggattggtgtgcgtgaatgagtgtgaacgaatgtggattggtgtgtgtaaatgggtgtgtgaatgtgtgaatgggtgtgaatgagtggattggtgtgaatgggtgaatgactggattggtgactgtgaatgtgaataaatgtgaatgagtg

SEQ ID NO: 16209 - DNA, 552 bp, Homo sapiens
aggtacaaactagatcaatagatcttaacccgttttaagtcagatatccctttgagaatctgaaaaatccctattgattccccatttttaaaatagatacacacatacaaaatgttcacataattttaggctgctcattgcattttaaatccaaccaaggatttaagaatctctatacctactatacaagagtataatgactggttgcttctgggaagggaaactaggagaagggatggaaggaagatttttcactacacttccttttgtaacctttggaatttgaaccatatggctgtattatctattcaaaaaatgaataaattaaaaataaaaagcattacactaaataacatggcaagatactaatgcagtagatgcaactctccaggtgaagatgtttagaatagctattatattaaattcaccatatttaaaaactgcttctttgaaatttttggttgaaaaacgtttgtggctgcaaaattatgctcttcataattttcakagaaatttccaatttccacctttttactagtaaaatatgtcata

SEQ ID NO: 16210 - DNA, 576 bp, Homo sapiens
catttgttattcttgttttgcattatgttacttttgagttgagatcattcatcttccaaattgctgatttaattaaattgcttgatgtccccagttgagtatagtgtagtatgttctgagtatctcaagtatggtttcatctgaggagattagagaaaataatggctcaaccatgtgaatttattttggttgcctgttatctgggtacctgatctatttatctctgggctatgctgtgacttctaatttaagcttagctccagtctataatctgtttaaaataaagaatgccctaacactatggtgttaagatgaatgaatgaacagaaactcaaaagatcggccaggcgcagtggctcacgcctgtaatcccagcactttgggaggctgaggcaggtgatcacctgaggtcaggagttcgagatcagcctggccaacatagtgaaaccccatctctactaaaaatacaaaattagcctggcatggtggcggacacctgtaatcccagctacccaggaggctgaggcaggagaatcacttgaacaacccgggaggcggaggttgcagtgaccygag

SEQ ID NO: 16211 - DNA, 1177 bp, Homo sapiens
ttttctttttttttttttttgagaaagagtctcgctctgtcacccaggctggaaggcagtggtgccatctcagctcactgcaacttctgcctcccagattcaagcgattcaagcaattctcccacctcagcctcctgagtagctgggattagaggctcatgccactacgcccagctaatttttgtatttttagtagagacagggttttaccacgttggccaggctgatctcaaactcctgagctcaagtgatctgcctgccttggcctcccaaagtgctgggattacagaygtaagccaccccgctgggcaaaaatttgaatagaaattttcaatagaataagtatccattcaaaactataaacaagtacaatttttgtattctttttttcaaagaagtaattgaaaagaaaactaattgaaaagaagaaacaaaaaataggaattataacctagtgagtaaaaacatgggatttaaggtcaaccaaagttggatttaaggttctgacattttctttcttttttggtgggggacagagttttgctcttgttgcccaggctgcagtgcagtgggcaatctcggctcactgcaacctccacctcccaggttcaagcagttctcctgcctcaacctcccaggtaactgggattacaggcacccaccaccacggcaggctaatttttttatttttagtagagatggggtttcaccatgttgtccagactggtctcgaactcctaacctcaggtgatccacctgccttggcctcccaaagtgctgggattacaggtgtgagccatcgtgcctggccctaaaggtctgacattctctaagtgactttgggcaagttacttaatctctttaagctgtagtttatttgttaagtagagataatggtaccttgtttccaatgtcactgtgaagataaaatgagatttgcatattaaatttttcaacccagggcctggcatatagtaaacactcacatcaaacctggaccacaatcatataatagacataattgtcactgtcaacatcatcaaatcctgtgtctgccaagtacgggatggatccaccaaagggatgtcaagcaattttaggtggtattaaataacaacgaaatcacagattgagaacattttttctttttcagtttcttttgatcctctttgatttc

SEQ ID NO: 16212 - DNA, 581 bp, Homo sapiens
ccatagtctaaccttagataattttactttccttacgagttataactttcttcaagtttacttttcaagcgccagaccggacagtgggaccactgtgccccatgaaggacatgggttattatttrttgagaactcctatcacatgccttgcactttatctatttaggaaacattcgcagtgtacatcagaacatatcaatagcacctttgggacgtgctatgtaccacatgttcagaggttgatcaaccaagcagacttggccttagatacttatgagaaaggcagttatttgtgatttaatttgagagactctatgtatgctcccaggacatagacaacttcccaatgagtttataacccaccctaaagttctaccattgaaattatatccctttgtccaatttaaaaatataaattaccctgggaaggacataaatcaatcacaagtcactcccatcattgagggaaagtgacacttgagagaattattttttgtaagttgggtgagggcaatgtattaaaaacctggagcttttgtgagagaagagaaaaaggtgagggaaaaaaggggtcacttggg

SEQ ID NO: 16213 - DNA, 581 bp, Homo sapiens
ccatagtctaaccttagataattttactttccttacgagttataactttcttcaagtttacttttcaagcgccagaccggacagtgggaccactgtgccccatgaaggacatgggttattatttattgagaactcctatcacatgccttgcactttatctatttaggaaacattcgcagtgtacatcagaacatatcaatagcacctttgggacgtgctatgtaccacatgttcagaggttgatcaaccaagcagacttggccttagatacttatgagaaaggcagttatttgtgatttaatttgagagactctatgtatgctcccaggacatagacaacttcccaatgagtttataacccaccctaaagttctaccattgaaattatatccctttgtccaatttaaaaatataaattaccctgggaaggacataaatcaatcacmagtcactcccatcattgagggaaagtgacacttgagagaattattttttgtaagttgggtgagggcaatgtattaaaaacctggagcttttgtgagagaagagaaaaaggtgagggaaaaaaggggtcacttggg

SEQ ID NO: 16214 - DNA, 548 bp, Homo sapiens
ccctgagcctttgggtattcatttctgaaggcttcaatgtcacataaaactttgaataaataaacttgttatgcttttctttttttaacctgtcttttgttataggagttttggccatgaaccttattgcacctttctatccttgcagaaatacttcaggtatgtgaactgaagaaaaaaaaaatatcccttgattgcttaactatctttctggaatgtctacctgacccatgcaatctgcatttaaacacagtaacgaagacctgattccttaacagaagtagccattcaggttttcatttctatgtttttaaaaagcatatctctaaagaataaggctttctgtcctaataaaccaagatctgaatcatgttttaatttccacagattgatactactgttgctttgtcatctataaaatacaggaaaaagcctacttcctcttaattcattgtagttaaaatcattacaaagcagggaagcaaactttttaaactcaaatatttttcacccwctcataaaatcaccagggctttttttttcttttc

SEQ ID NO: 16215 - DNA, 564 bp, Homo sapiens
atccgcctacaatctgcttgaaaatgtctgaaaacaattcatgccttttttgcctttagtttgcatattccaaacatggctgctcttttrtatctagttgttaacttggcgcatccacaacttttccttaattcctatcttgagaagtgttgaatttccattcgctaatttcgtgtagttttattactcggttactctgccgtccacactatttcctcagtaagatgtgcgctgttccgtaatacacgacatgtatgggttaactttctgtttacccttcactacactgtaagctcaatgcctgacactatagcagatggagtttttggttgcttttaagggtgtgccctacttaactcaatggaatgaaaagaaataggttgctctcttatttcagattcccgtcgtaacttaaagggaaattttcacaatgtccggagcccttgatgtcctgcaaatgaaggaggaggatgtccttaagttccttgcagcaggaacccacttaggtggcaccaatcttgacttccagatggaacagtacatctataaaaggaaaagtgatgg

SEQ ID NO: 16216 - DNA, 564 bp, Homo sapiens
atccgcctacaatctgcttgaaaatgtctgaaaacaattcatgccttttttgcctttagtttgcatattccaaacatggctgctcttttgtatctagttgttaacttggcgcatccacaacttttccttaattcctatcttgagaagtgttgaatttccattcgctaatttcgtgtagttttattactcggttactctgccgtccacactatttcctcagtaagatgtgcgctgttccgtaatacacgacatgtatgggttaactttctgtttacccttcactacactgtaagctcaatgcctgacactatagcagatggagtttttggttgcttttaagggtgtgccctacttaactcaatggaatgaaaagaaataggttgctctcttatttcagattcccgtcgtaacttaaagggaaaytttcacaatgtccggagcccttgatgtcctgcaaatgaaggaggaggatgtccttaagttccttgcagcaggaacccacttaggtggcaccaatcttgacttccagatggaacagtacatctataaaaggaaaagtgatgg

SEQ ID NO: 16217 - DNA, 514 bp, Homo sapiens
ttttttattcttttgcaagtaatcatgcctgaatatattatcacaccactggacaggatatgatgcctatctccctcttctcctgggtgaactacatgaagggaatgataatctgaatgaaaattcctgaagagagttgttgattcagacagggaactgactcatcaaaagaccrttctactgtagtttgtgacagctgtatctttttatttatcagtgcatccctgcatctgggaatcaggtgcagagaatgaggatggatcaaaatattttctctcctctgagaaatcatctgctcttatggttcatgtgatacgttgtttaacaaaggttcgtcccaacacatctaagccaggcaaactcagccttttggtactttctcattgtttaagttttctgtttaatatttttttttctcagtagtgtttagagaatgagtgtgtgtgtgtgcgtgtgtgtgtgtgtgtgtgaaaatgctcccagttttattttgtcacaaaacaccaagaaaatt

SEQ ID NO: 16218 - DNA, 524 bp, Homo sapiens
gccacataatgttcagtccgcattcttactttgaatgggttgttatctaatagttcctgttaaaacttttcgaaaaagcaagcaaaaatctcatgcaaatcgttttgtagatgaaaaaataaaatcttaagcccctcgctgagtgagccccattttggccaaggggaccccagagaaaccttaaaaattgagttcccagccatgatgggaaggaaagtcagacactcttcattataccacctcctttttggagtttaggcacaaccacagaccagcattaatgttagaacagggatcctgaggctgacagaacagactctttgtggcagtaagataccaaattataaacmaaacctaaggccatgcaaggcaagtggtaagtcacatctgcagggcattcatcttgctaaacaggtcacattatagctgactgacaccacatctttatcttaatgtaaacattccttcctgctaactccaagtttttagacaaaattttgtcccttaactatttgcagattaaa

SEQ ID NO: 16219 - DNA, 771 bp, Homo sapiens
ttatgtcttggtcctgcaactgtagttctttatagcataatgcagtggttctcagattgtggtccccagaccagcagcatcggcatcacctgggaacttgcatgaactggaaagtgtgggcttgggtctcatcaatctggtttaggaagttgaactccagatgacaatgatgcacactaaagtctgggatgcacagatgtcctatagtagaaagtgggtggggctttggaatgaggaacccctggcccagaaacccagatcctggccctctgtgatcttagggcaacccctcagttttctcctggtcagatggagctgatgggggcagctaattcacaggcgtgctgacagaattcaatgataccccataggtaaagcacagagcagaaaatccaacatactgtgagcactcaaaatcggcgtgtagtgttatagagtcatgcaacgcatttattggatgcctttgagtaacagtctacatagagtccatgygtttgataattaacaagttgagaaaaaagtttacatataacactctagacatgaaactgttaaataccttcattttacagatgaaaaatccgatattcagagaggctaagtgacatgttcaaaggcacacagctggtcctacaattgatgccttagcagcctgagctccaattcttgataaaatgcccagtggtcaccttaaatttcttcagaacagagtgggatataaataagaaagcaaatataagcaaataaataaccagaacacccaataatggg

SEQ ID NO: 16220 - DNA, 542 bp, Homo sapiens
tgaactggtcattttggccacatttttatggaacagagatggacatttgacccaataagttttcattcgatttttacaactcggagtttgaaattgaggctaagagagtctacctctttgcaggtcagttgctagaacagtaacacataaactgaggagctatgacaaaccataygccatcatgtggaccacagaagcaggtctgagaggaaaacaaagaggctttcagaaagagaaaatattcccttcctagttcaaggtcctagttaaagtctaactgtttccctgtccttgggatttataagatgttctccatatccttatgataaattatccctttgtactagatcaggatataagcaaaataactttagtacaacagggactggataaggaatcagttattttaaaaaggcaaatagatcaataaggggtacacaatctgcccgagatacagtttttttattttttatttttttttagtctacggcggtgggccaaaggtatgcttgtgttgatggcagatttacatatgtgctgat

SEQ ID NO: 16221 - DNA, 582 bp, Homo sapiens
gggcatgtttaccctttaacatttgttccattccatctgcagttaagctttctagaaatatgttgttacagtagctacttaagtgtttttaaattgtcttttcaaatgaatagggcatggaagtttgttactcttttctgtgtgaaaaacagtgtcaaaagtttaagaaggccaggcagcttcacgcttgtaatcccagcaagttgggaggccaatgctgaaggatcacttgagtctaggagttcaagaccagcttgggtaatatggcaaaaccccatctctacaaaaattgcaaacaaaaaaaattagcctgatgtggtggcatgcgcctgtctccccagctacttaggaggctgacatgagaggatcacctgagcccaaggaggtcaaggctgcagtgagccgtgatcatgccactacactccrgcctgggtgacagagtgagaccttgtctcagaaaaaataaaagtttaagaaaaccattgtatttaaattgggctctttgaaaattaaattctgctatagaacttactctgtagtattacttgttaaattctatatccgactgaagaacacaagctt

SEQ ID NO: 16222 - DNA, 494 bp, Homo sapiens
caccccaacctcccaaaggctgggattacaggcatgaatcatcgcgctcagctggcacctgttctcactaggatagatatcatagcgggggagacgttggatggacaaattggcaagggggataagttcaggcactgccgtgtgctgtggagataataaaaggaaagtgggacagacagtggggcgtggggaggctgcctgcttagctgaggyggtcagggctggctctgaggaggtgacgcatccctgagagctgaaggaggagagcaaggcagccaggcaaaggtctggccgtgaggctctgactgtgccttcgtgctgttgttctttgtcgatgcactcacccaggaagcacttgtaccccgtcatggcgctagaatattaacaaatcatggtccctgtcaccatgcaggaattcagagttggcctaacagaatgcttagatttcttgggtttgaatcctggcttcactgctcaggagctgtgtgactgta

SEQ ID NO: 16223 - DNA, 598 bp, Homo sapiens
cagtgcagatgggcatggccgcagagcaccagctcccatcctctctcccctctctatgctgtttaccgttccagggctgagggccctggttacaattccttgacacccactggcagagtgaggtgcttcataagtacacactaagtattgctcagtgatcccaataactgccccaaacagcaaatgcagggtgaaagcgagcacaagggattctccataaataataataataacagcctttattatctcccaggtgcctccttggtgacaggccctctacatgctgtccccattacatcttccygacaacacgaggtagaggtggctcctgattatagaccaggaatctcaggctcggaagaacccgggagctacccaaagccctcagcagttgagtgcaagagctgcaagtgtgaacctggactctgtctcccagggtcacggtcacaacccatatatgaacataccactaacctttgaaggtcttctgtgtatgattcaaactgagcctcagaaagacaccatgcggtggctgtttaatgtctcgtgtttcctcatgcttctgtaacaaggtagcacaaatgcagtgacttaaaac

SEQ ID NO: 16224 - DNA, 600 bp, Homo sapiens
ttcctcgggatgctctcatttcacaagaaagtcgtcagatggcctaattcccaatttcacataataattccacaggggtgatttctggcatatctcttatctctacagaagaaagcaagcagggtccctctatcagggcccacagatgtgtgctttgaggagctggaaaaaatgtaagctggagtccctcggctttcccagcggcctttaagtcctttcaggaggagcctgccgctccctggcagggatttgcggtctttgcctttgtgaacaactttactgctcacttcaggatggcattgcaacatcttctttcttcgtgctcagaatccctcaagattgaattttgttttaagatcccatcagtgttgagaaatgttggtaaatacaacaacattcatagcaaactttgatggaatatctgctgtttatcacaaactcatctgggaactttacacatattgtttaagttaattttcaggcarcccctatgagtcaattactattattattcccaatctacaaataagtaaaataaagttcagagaatataaggaacatgaaaaggtcatacagctaaaaggtacaagagtcatgaag

SEQ ID NO: 16225 - DNA, 526 bp, Homo sapiens
  misc_feature (1)...(526): n = A,T,C or G
aaattataagatgtaatttgatggtacaaaaatatggaaataagccccagaaaataacagtatgtaacattggaagaagtctaataatttttaggrgagtagagattctgattatcctacatggcagggcattagacaaggagacccactttaccacagataaggttcagtggtggtcccatgactgatctattggtcacaccttatgcttaccccaccacctagaagcggctggtgtgacagagcattggatgacctgctgaaggtggtttgaagtaccagcttagtggcagtacttgacaagcacagggcaccgtcctccaagatgcagtcctggaatcacagacttttatctggtagtgattcctcaatagggagtgtacacaggtccaagagccaaggagtgggaacgggatcagctccacttaacatcatttccagtgatcagtttggagactgaagagcaacagtctgaggaatgaccccaggcagtaatttgtttccacagannaaacaaagagcacca

SEQ ID NO: 16226 - DNA, 588 bp, Homo sapiens
aggccagggtggcagagtgtgcaggagaaggcagaatcaggctgaaacagctcctctttgcctccctggattcttttccaaaatgctgtcagcactgccagttggaaaatatttttctccctccctttgtcttctttcttattaagaaaaaaaaaaaagccatctggtgtcaaattcactcctggcacatcataaagggtagcactaaaaatgtccccgaaaaactaaaagcaaaaccacagtagtacacatgggatttaatctcagcatcctagaatttcagagttgatagggccctctgagatcaaacccttcctgtagacgggaggaaactgaggccgggagggattrtgttattctttcaaaaatgtttactgagcgcctactatgttcaagacactcttcaggcgccgcagatgaatcacgaacacaacagtgaggcagaaatccccgcctccttggagctttccgtgggaggttcttgcctcggccctcgggcctgcgtctgccgccgtttttaaacggccccgaagttgggagctctggctgggccacctccgggctgggggcccggcctggggccgcccc

SEQ ID NO: 16227 - DNA, 552 bp, Homo sapiens
ccttcatattcactcaccactcactgactcacccagagcaacttccagtcctgcaagctccatacatgataagttccctatggagatgtatcgttttttatcttttatgcctatttactgtactttttctatgtttagatacacaatacttaccactgtgttayaactgcctacagtattcagtccagtaacattttgtaacggtttgtagcctaggagcagctggcaattccatatagcccaggttgtagtacaatataccatctaggtttgtgtaggtactctatgatgtgcataagccaaaatctcctaacgacgccatttctcagaatgtatcttcctattaagagacgcatgaccgtacaggcaaaaactacacaactctgaaagattaagatgtctaaagtcagccgggcgcggtggctcactcctgtaatcccaccactctgggaagccgaggcgggcggatcacctgaggccaggagttcgagaccagcctggccgacacggcgaaaccccatctctactaaaaatacaaaaaaaaataaaaaa

SEQ ID NO: 16228 - DNA, 572 bp, Homo sapiens
tgtctcaaattgccctggaggggtttccatctaatcagtcctaactcattaaaagaaaaaaattctttttttttttttttggtaacagttttattgagatataattcacacaccaaacaatttaattcactcatttcaattcagtgcatcagccaggtacagtggctcaaactgcactttgggatgccaaggcgggaggatcacttgaggtcaggagtttgagaccagcctggccaacatggtgaaaccccaactctgctaaaaatacaaaaattagctggacgtggtggtgagcacctgtaatctcagctactcggaaggttgaggcaggaggatcacctgagcccaggaggcagaggttacagtgagccaacatcatgccactgtactccagtctgagcaacaaagtgagactctgtctcaaaaataaaaaataaaaataaaaagtaaattcagcgcatcaccacaatcattaacaatcaattttaaaacatttccatcattccaacaagaaacctgaacttctcagccatcatactccaarccccccatgcccctcaatcccttgacaa

SEQ ID NO: 16229 - DNA, 523 bp, Homo sapiens
gccctgatccaggcttgtttgaaaaagtgagatttaactgcaaagagatttwaaaaaaaaatcttaaatacatgtgtcaccttgacttaaaaaacacattgcagttgtgtgcggtgcctcacacatttcctcactgtgggggctggcttggaaactgtagcataagacaacctagaaacatatgaaaacactgtccgttcaatggcgacatcttcagacttcagtggtacgctcatcctcatctgttgtttagcacgcaggcgctgggcaggaaaataattaacaagccagtattttgctgcaaatgaatcaccaaattgctgcctatggaagtgtctcgggaaaggaagccttctttctggaacagtctcaaaacagatccaaaaggaaacctcccacccaatttactaaagtgcaaacgaagggaaaaccaggtccctgcactgaagtctagtggtctgccctggctaatagtcgccctggtgccagtgccatggtgcagtcactcagagagactctcttg

SEQ ID NO: 16230 - DNA, 916 bp, Homo sapiens
  misc_feature (1)...(916): n = A,T,C or G
tgctccgccatgtgaagattgttcttgcttcccttttgccttctgccatgatcgtaagttttctgaggccttcccagacatgccttctgtatagcctgtgggactgtgagtcgcttaaacctctttcattcataaattacccagtcttaggtagttctttatagcagtgtgagaacagactaatacaccagcctaggaaatctttgcaagatagcacaccctttgtaggggagaaaaccgaagcaatatgaagtttggtaacttgttcagggacacacaggtagtaagtggggtacgctagattcaaacccagtatagttagttacaaaactagcctttcttatactgtaccacactgcaaataggctgaataaatattcgatacagtcaggcaagaaaggcattagttcaagtgagatattgataaaaatatcttgcctacaacccctgtggttggaggagtgcagaaagatgcttattttgtgtgttggctacttgaatggattacagtctggcagatgatttgaggaagtattaactaattaatagtgggtgtttcaatgtataaagtcagatgacaaaaatatttaccctcctcctcaagtatgccaagattagttgagccaatacatacatgaatgncaaaatgccagatatcatgatatggctaatgataactantgtgatagatagagattctatcatttcaaccagttnttctttccttcttttttttttnttttttntgagatggagtctcgctctgtcgcncaggctggagtgcagtggygcaatctaggctcactgcaagctccgcctcccgggttcgcgccactctccttccttctcctgcctcagcctcccgagtagctgggactacaggtgccctccacaacgcccggctaattttttgtat

SEQ ID NO: 16231 - DNA, 631 bp, Homo sapiens
aaaaacatgccagcttttagataattttattctcattttaaaattccctacagaaggggttgccaggtgaagaacaagatgcccagttaaatttgaatttcagataaacagcaaataattttttaggtgtggtatgtctcacatattggacatacttatactaaaaaaaaatggttatttatgtgaaattcaaattgaccttttgtatttttatttgttaaatctggcaacactgtctacagataacatattattttattgttagtgttattattagactcttccttctgccccgcttaacattgctacaccattgagtttgtggataaaaaaaatgatgtcgcaaaaagaacttaggttttagaaccagagatatctgatttcagatcctagctttgccatgtaccagccttataactgtaaattatttaagctcagcaagcctaagtttcatcatctgttgggactagtcataactacctggcagaattgctaggtgcttagatgagatgwcttctgtaaacacctaaacctgtgattgaggtataacaggcatggagccaaagttaatcttggttcctgtttccctgctaaagctgaggcaagaggaaaattctgcttagtttcctgg

SEQ ID NO: 16232 - DNA, 520 bp, Homo sapiens
gaatacattttttcatgtatccctttaactacataatattgcatatcaaatcagcatgacatttatattccatttattatagtaaaatastaaccagatttttctaaaatgcttagatttacaatatttcagaggttgtaccctttacaactatttaaaattatgatggaaagttttagatgttaagctaaagtatggaaaaggtagttttacaaaattagcttagggcagtaccaaataaagaaaaataacttaagaactctaaataattgcctcttacatacactagtttttaagaagcaatacctcatacgataatctgccttttgtaagtggtataaagacacaggaacataataacatggtatcagtatgagaacaatttaataaagaaaattggtaccaggagtagggtagtgatataaagttaccctaaaatatggaagtgactttggaactgggcaacagccagagattggaacagtttggaggattcagaaaaagaaaggaagatgtggaa

SEQ ID NO: 16233 - DNA, 983 bp, Homo sapiens
gttcttgactggtaactctcaggttttctaaatatcattaagattgttytgtatagttaagtcaacttacagtgtttttcacattcctctcttctccatttatccctaaatcgattattaacattgtactttgttaggcaaataatccagtgtggaaattaattgaagagaaagagcatgcaaaacaaataggaaggttgttttaaaaagaattttctgtctgctgtctcaaggtaatatatgtccaccttcagaaagtaataagtaaaaaaatgtgtttcttggaatccatcagctctgctcacttgtactctttctacactgctgtctggaaacctgggtgtccttgatgtttcctgcctctaaaggatgcagagtcttacctctcttgcaacaatagatgctgcactaagcttcagaggcctcctattccacaattacacgcttgagcaattaaaaacatctgccaagatctgctcgtgtacgcaccaacagcattcttgtcatagccctctccaggaggaaacctgtctcccaaaagatagtctttagagacagcacacagcttaatgtttttaacaaaaaactggcagatctccataaaggaagatatgtgaaaagatttaagatcaaaaggaagcaaagggtttctaaggaagcccaatggctgatgacaacagctcaacttttcaagtgatgggtcatttactgtgcctgaacaacaacttttgattccccctgcccctactttcttccctatcctggtttctaatcattgcaactctctgcccacagaaacagatgtcctgttcagaattagtctccattgagaattagtaaggtaaacatggtcactatagcaaaaagaagggatgggtagggctcagtggcgcacccttgtcatcccagcactttgggaggccgaggcaggcagatcacttgaggtcaggagttcgagactggcctagccaacagggtgaaac

SEQ ID NO: 16234 - DNA, 983 bp, Homo sapiens
gttcttgactggtaactctcaggttttctaaatatcattaagattgttttgtatagttaagtcaacttacagtgtttttcacattcctctcttctccatttatccctaaatcgattattaacattgtactttgttaggcaaataatccagtgtggaaattaattgaagagaaagagcatgcaaaacaaataggaaggttgttttaaaaagaattttctgtctgctgtctcaaggtaatatatgtccaccttcagaaagtaataagtaaaaaaatgtgtttcttggaatccatcagctctgctcacttgtactctttctacactgctgtctggwaacctgggtgtccttgatgtttcctgcctctaaaggatgcagagtcttacctctcttgcaacaatagatgctgcactaagcttcagaggcctcctattccacaattacacgcttgagcaattaaaaacatctgccaagatctgctcgtgtacgcaccaacagcattcttgtcatagccctctccaggaggaaacctgtctcccaaaagatagtctttagagacagcacacagcttaatgtttttaacaaaaaactggcagatctccataaaggaagatatgtgaaaagatttaagatcaaaaggaagcaaagggtttctaaggaagcccaatggctgatgacaacagctcaacttttcaagtgatgggtcatttactgtgcctgaacaacaacttttgattccccctgcccctactttcttccctatcctggtttctaatcattgcaactctctgcccacagaaacagatgtcctgttcagaattagtctccattgagaattagtaaggtaaacatggtcactatagcaaaaagaagggatgggtagggctcagtggcgcacccttgtcatcccagcactttgggaggccgaggcaggcagatcacttgaggtcaggagttcgagactggcctagccaacagggtgaaac

SEQ ID NO: 16235 - DNA, 1212 bp, Homo sapiens
gagaaaattattttcattgcatagtaaactcttctctctctcccgagttgggcagaataatagaattagcctgcctagaatattaattcatcaatacatgtcatactgattctcagtttccagaaggatcagggcagggatgagttcaaggttattgagacatatttctccaactgcttcttaatgatatcccagtgggaggaggacatgggaggagaaagacttcattcttctctgaatccctggttctgcatctgatcatctatctgaaaattctcttaaccttgtcgttcttttgcgtctttcattttacagtaactctgtatactaagatagaaccaattgggaaccaagatacaggtattcatctcaggcagtgaaatgtacacacatgtgagttatacaaatagccacagtgacaaaattagtttactaactgatatcttgccacctcagaaatttcattcccttccagaatataacctcacactggatacagctcttacttcaaatctgaagacttgcctttcaacttcagtctttcatttgttgctgatggtcgtttggatttctctcttccgtaaagccccgttgatgattctcctcaggggcggccttcttggaggaacatggtaatgaggtagctgtgatcggcccggagcttctgtattactctctctaggtagtcaggtccactcataacaacttctagaaagctagagaaggcactgaaaaacttaaacacaatggtcataataggtggcataccagagttatccaatggagctgacagaatcaaggcacaccttagctcttatgaatttttcttgcccccagtgttcctccctccagctacctaaatttggtctttcttttaaggctcttcaattaagcctcctttaagccscttctaaccatcttcccagaaaccccttctccctctgaattacaagtgctcttattgttggcactatttaaaaatgccactgccctgtattgttggtcattatgtcccatcctttcacatgaaaaagtcactctttaaaatttagaagcttttcttttgtttctgaaaaatccccccagcactcagagcctaataatgtgaggctcactaggacctcagagctccgtcggggagcgctgccccgctcctgccctccagcagggccctgtgctatctgttcttacccctgcctgtatttgcctatc

SEQ ID NO: 16236 - DNA, 554 bp, Homo sapiens
ttgctgcagggatgcctgcttctacagacgatattagttttcagaaaagagctttggatctttaagtgcttgtgtaactgcttgcttgagaccccaaagttctgccccatataacatgtaacataaaagaataccgaacactaaaaacaaaggaattgtgacttactgaattaatcatccagattcagttccgtatcatttatcaatgaagaaacagacgtatttgtgcagcatactaaacgttcagcttgagtctctccctctacctaggcagaaaactcattcctcgaatgaaaggaattctattttttcttccacctcatcctccaacccctcccctgtccaccatgataccaccaaattcaaggaaacattaggaatgtttcctaataactttagcatatgctttctctgattcataggttgggaaatccaacttgttaagcagcttctacccccgtaggtgyggggtggaagtggtggttgaaacagttactattaatgtacttcctgcaaaacactctgatgctcttttaggtgcatgtctccagatt

SEQ ID NO: 16237 - DNA, 560 bp, Homo sapiens
ttaaacagctgggttaaacatcctgaaacacaaagtcagggcatcagaggccctgcatccccgaagtacacaggatgaacgcaggcatctttctgaagcactgactttaactggtagtctttggggagagggggaaggagttgtaggactcaatctgcagggttctttttaaacataaaacaggaggagctgaagaaatgtgagaatatgttgttttaggctgtttcggcagactgtgaccagggacagaactgcctgaacaaatcagtaccgctgaggaagtcacagacacgtcatgtgcagagataaatgtatggaggctgtttaccttaacagtacttatgctaggaaaactggaagagcagtgtaaacgtccaagtgtaggtcactgtgtgaataaatgatggcacattaattcagcaaagcaggargcggccatgaaaatgagcaacctgtttgtaagatcctccaagaaaggtgggggtagaaaggttgtaccacttagaaagggcctggaaggccatggatcaggggttgctccatgacgtggcacagtggca

SEQ ID NO: 16238 - DNA, 558 bp, Homo sapiens
agtgagccaaaatcgcaccactgtactccagcctgggcgatagagtgaagccctgccacaaaaaaaaaaaaaaaaaaaaaaaagctaaaggaaggaaacagggcagacagccatcccctggaaccctagggaggagagggtccttggggtaggtggtcatggaaggtgccactgaggaggccacatctgggctgagaccaggagagaaggagccggtgtgtgaagagaagagggaggggagctctaggcagaaggcccagcacatraggagaattggagagttgggtgcagatcacagagggtttgcctttgccctagtgatgacttgggtttccttttgtccttgaaataaaatgcacagatgtggcctgaaacaccagctgtatgttagctcctacttttttgttgttgttttgctctgttgcccaagctgaagtgtggtggttcgatctcagctcactgcagcctcaaccacccaggctcaagcgatcctcctgcctcagcctcccagaacttacaggcatgtaccaccatacccggctaatttttgtatttttt

SEQ ID NO: 16239 - DNA, 618 bp, Homo sapiens
tgagcagatgaatacacactgtacatgtctgcgtgtatctaccccttacaggcgactgctatgctggccttacagtaaagacaggcttcacgcatacaaatgaacacacaaagtcgatttgctgtccaccaactgcaatgtatacagctgtttgctaagtgccaggtacacttttattcagtacagatcttcacatacaagactagtgatgctcctttttaaaaaacaaaagatacaaaagaaaaagtcctatacatcttcatggtagaatttactcacataaacgacccacattgctattctgacccaacaaaagtaagatccacagaaacgtggaattgaactacaaaaatgcaaggtgtgcctatcaacgttcatgcacaaagctaggtgaacagtctctataaattcacagatgagctaagactttaaaaaaacaggratgagaaagatagacaactggggagagggggagccagtgacaaaagagtaaatcatacacaaaacagccaataaaaaaataaaaatgcagttaatatacatgaataatggatgtctgatttaaaagcagtttactccgatatgatgtaatttttgacaatcagccagagagactat

SEQ ID NO: 16240 - DNA, 520 bp, Homo sapiens
ctccagcactaggacagatcatcatggggggcagtaggtgggggcgctaacactctccaaactagctgtgcaggaaatcccactggggtgatggacaccagaataacaccccaattcttccttgagctcttattctgcactgtgtattggatgtgtgggctgaataagggcatgtggaacacttgtggccatcatgttattaaacatagyagaatatgtccctgattgttctctgcattttttttttttgagatgaaatctcactgtgttgcccaggctagaatgcagtgccatgatcaaggcttaggtgcagcaaaccaccatgacacatttataccaatgtaacaaagctgcatgttctacacatgcatcctagaattgcaagcaaaataaaaacaataaaaagagtaaacccagaatacataccttctgatggaaagcatacccttttctgcaaatagagaaaagaaaaacattatgagagtcagaccacactgtggcctgtgtgcacaggtctttt

SEQ ID NO: 16241 - DNA, 599 bp, Homo sapiens
tgagcccagatctcatgtaatatgtactcatcaaaccaattctatagcaacaatagcccagggccaaggcatctatcaatgagcactgtgtggccattaagatattggtggctgggtgcgttggctcatgcctgtaatcccaacactttgggaagccaaggcgggtggttcacctgaggtcaggagttcaagaccagcctggccaacatggtgaaactccatttccactaaaaatacaagaaattagccaggtgtggtggcaggctcctgtaaccccagctactcggaagactgaggcaggaaaatcgcttgaacccaggaggcggaggttgcagtgagccaagatcacgccattgcactccaacctggacgacaagagtgaaactctgcctcaaaaaaaaaaaacaaaaaaagacattggtgatactattgagggcagtctcagtcccatggtatggaaggttgtcagcatacaataaagtgcggaagtgaggaaccagtaacaacaamagcagaatgactcctcctgaggtttggaaaaagatgtgcaagatccaatgtgatcaggcccctgcatagttttctacacatttcttacc

SEQ ID NO: 16242 - DNA, 840 bp, Homo sapiens
aagacgccacacactgtcccctcagtgtgagacctgtgtaggtgggactgtcctgaaggcgtatcgtgccctgcagaattgtaatttggtgctaactgtactgcctcctggcattccccaagcctgtcgctgtacccagtggatactatagagcttaagtgtgcttgcaggacmctgaacaggtggggagggaatgtcaaactaactgaataatgtgttctgaccccagataggacaggtgcctaggctcaagctgcagaggcccaagatgctgatggcagaaatggttcattctctacaatcagaaggctcatggtttccttctgttttgtacaactaaatgggtattatcagtctctattttagacacacacactaatgagcctttggtatccaatctgctaaggccagagtggggttaagatgtagaaccaaagtgtttggttgcattgggatattcagaaagattgcatggaaagtacatgaaggttgtctcagaagatcatgactagggttggaaatctttttaaaaacaaacacgcttattatgtttgccttggagttcagcttgtagaattggattttccttctgtgtcatactgctaagtaaaacaaggacttggtaatatgctgaactgactgtgacaagaaagcatgggtgatgtaagttaacaataggtagataaccaggacttaaatcagctgagatggttcgaaggcaaggcttggtatttcaaggcatgtgcgggtgattacctgaagagtttgcctaactcatggcctctgagtgaagcagccattaattatgcctggtattattaggaagcaggtcataaaatg

SEQ ID NO: 16243 - DNA, 840 bp, Homo sapiens
aagacgccacacactgtcccctcagtgtgagacctgtgtaggtgggactgtcctgaaggcgtatcgtgccctgcagaattgtaatttggtgctaactgtactgcctcctggcattccccaagcctgtcgctgtacccagtggatactatagagcttaagtgtgcttgcaggaccctgaacaggtggggagggaatgtmaaactaactgaataatgtgttctgaccccagataggacaggtgcctaggctcaagctgcagaggcccaagatgctgatggcagaaatggttcattctctacaatcagaaggctcatggtttccttctgttttgtacaactaaatgggtattatcagtctctattttagacacacacactaatgagcctttggtatccaatctgctaaggccagagtggggttaagatgtagaaccaaagtgtttggttgcattgggatattcagaaagattgcatggaaagtacatgaaggttgtctcagaagatcatgactagggttggaaatctttttaaaaacaaacacgcttattatgtttgccttggagttcagcttgtagaattggattttccttctgtgtcatactgctaagtaaaacaaggacttggtaatatgctgaactgactgtgacaagaaagcatgggtgatgtaagttaacaataggtagataaccaggacttaaatcagctgagatggttcgaaggcaaggcttggtatttcaaggcatgtgcgggtgattacctgaagagtttgcctaactcatggcctctgagtgaagcagccattaattatgcctggtattattaggaagcaggtcataaaatg

SEQ ID NO: 16244 - DNA, 840 bp, Homo sapiens
aagacgccacacactgtcccctcagtgtgagacctgtgtaggtgggactgtcctgaaggcgtatcgtgccctgcagaattgtaatttggtgctaactgtactgcctcctggcattccccaagcctgtcgctgtacccagtggatactatagagcttaagtgtgcttgcaggaccctgaacaggtggggagggaatgtcaaactaactgaataatgtgttctgaccccagataggacaggtgcctaggctcaagctgcagaggcccaagatgctgatggcagaaatggttcattctctacaatcagaaggctcatggtttccttctgttttgtacaactaaatgggtattatcagtctctattttagacacacacactaatgagcctttggtatccaatctgctaaggccagagtggggttaagatgtagaaccaaagtgtttggttgcattgggatattcagaaagattgcatggaaagtacatgaaggttgtctcagaagatcatgactagggttggaaatctttttaaaaacaaacacscttattatgtttgccttggagttcagcttgtagaattggattttccttctgtgtcatactgctaagtaaaacaaggacttggtaatatgctgaactgactgtgacaagaaagcatgggtgatgtaagttaacaataggtagataaccaggacttaaatcagctgagatggttcgaaggcaaggcttggtatttcaaggcatgtgcgggtgattacctgaagagtttgcctaactcatggcctctgagtgaagcagccattaattatgcctggtattattaggaagcaggtcataaaatg

SEQ ID NO: 16245 - DNA, 840 bp, Homo sapiens
aagacgccacacactgtcccctcagtgtgagacctgtgtaggtgggactgtcctgaaggcgtatcgtgccctgcagaattgtaatttggtgctaactgtactgcctcctggcattccccaagcctgtcgctgtacccagtggatactatagagcttaagtgtgcttgcaggaccctgaacaggtggggagggaatgtcaaactaactgaataatgtgttctgaccccagataggacaggtgcctaggctcaagctgcagaggcccaagatgctgatggcagaaatggttcattctctacaatcagaaggctcatggtttccttctgttttgtacaactaaatgggtattatcagtctctattttagacacacacactaatgagcctttggtatccaatctgctaaggccagagtggggttaagatgtagaaccaaagtgtttggttgcattgggatattcagaaagattgcatggaaagtacatgaaggttgtctcagaagatcatgactagggttggaaatctttttaaaaacaaacacgcttattatgtttgccttggagttcagcttgtagaattggattttccttctgtgtcatactgctaagtaaaacaaggacttggtaatatgctgaactractgtgacaagaaagcatgggtgatgtaagttaacaataggtagataaccaggacttaaatcagctgagatggttcgaaggcaaggcttggtatttcaaggcatgtgcgggtgattacctgaagagtttgcctaactcatggcctctgagtgaagcagccattaattatgcctggtattattaggaagcaggtcataaaatg

SEQ ID NO: 16246 - DNA, 840 bp, Homo sapiens
aagacgccacacactgtcccctcagtgtgagacctgtgtaggtgggactgtcctgaaggcgtatcgtgccctgcagaattgtaatttggtgctaactgtactgcctcctggcattccccaagcctgtcgctgtacccagtggatactatagagcttaagtgtgcttgcaggaccctgaacaggtggggagggaatgtcaaactaactgaataatgtgttctgaccccagataggacaggtgcctaggctcaagctgcagaggcccaagatgctgatggcagaaatggttcattctctacaatcagaaggctcatggtttccttctgttttgtacaactaaatgggtattatcagtctctattttagacacacacactaatgagcctttggtatccaatctgctaaggccagagtggggttaagatgtagaaccaaagtgtttggttgcattgggatattcagaaagattgcatggaaagtacatgaaggttgtctcagaagatcatgactagggttggaaatctttttaaaaacaaacacgcttattatgtttgccttggagttcagcttgtagaattggattttccttctgtgtcatactgctaagtaaaacaaggacttggtaatatgctgaactgactgtgacaagaaagcatgggtgatgtaagttaacaataggtagataaccaggacttaaatcagctgagatggttcgaaggcaaggcttggtatttcaaggcatgtgcgggtgattacctgaagagtttgcctaactcatggcctctgagtgaagcagccattaattatgcctggyattattaggaagcaggtcataaaatg

SEQ ID NO: 16247 - DNA, 561 bp, Homo sapiens
acagtggcctgtaatcccagcactttgggaggccgagccaggtggataacgaggtcaagggatggagaccatcctggccagcgtggtgaaaccccgtctctactaaaaatacaaaaattagctgggcacggtggcacgcgcttgtagtctcagctacttgggaggctgaggcaggagaatcgcttgaacccaggaggtggacgttgcagtaarctgagatcacgccactgcactccagcctggcaacagagcaagactctgtctcaaaaaaaaaaaaaaaaaaaaagttatagattgttaagtaacattttgtaatatttttgatatagatactcataggcatttagtaaattttattatcatgtgtttatactttttatcacacttactagtcaattaaggcctatagcaatgtcactggcttttgtgtgtcttgtatctgacaacactatagaactttcccattagttccaaaagtttatctatagttacccttgaaatttttttgtgtagagtaatgacatttatcagttagtataactttgctctttttttcccaat

SEQ ID NO: 16248 - DNA, 1455 bp, Homo sapiens
tgtaagaacratgcccttacacaggggccatgtggaagagttgattttttttttttttttgagatggaattttgctcttgtcactcaggtgggagtgcagtggtgctatctcggctcactgcaacctctgcctcccgggttcaagcgggagccttagcctcctgcgtagctgagattacaggcacccaccaccacacgcgcctaatttttttgtatttttagtagagacagagtttcaccatgttgggcaggctggtctcagactcctgacctcaggtgatccacccacctcggccccccaaagtggtgggattacaggcatgagccaccgcgcctggccagaagagatgcaatattttattcttcaaatactgcaactgaaaaaatgaaaagtttgtcttaaaattcaagaaatcaaattattcttcattttaaactcaatcaaatcatccccatatagaattttttgtcaatttgccttgattcattgtgacttttcagtgtttggctttccatttcttattctccctttcagagatacatacctattgatgactttgttagatatttattgaaagtattttatgtgctaggcaaaaacaataaaaacaaacctggtttctgcattcatttgagcttaaagtatcatcatcaaaagataccattaacttttaatgatgccctcaaagtcacatttttttcttcatcttttgcctcaaatattattttcttctatcttcctaaagtcatatcttcttttaaattatctttcagtaaatactattttttaaaaaaactttctaaataaacattgatgagcatttagttcatgtgctgttttgtgctataaaattttaaactaaatttgggtcagaggtctcttaaatcctttactattttcttattccattttgttagtaattatgcaattgtaattagaagacagatattattttttttaaaagaatcccattttccttataattccaaattgcctgtagtgctaacatatttcactaaacgctttacatatgttttcattactggtcttaatttacacagtgatgacttctcattacttattcctgaagtcacttttaatcttatgtctttggtttgtgattttgtttataccttcccccggctgaaccaccatatgttcaagaggtttagtctgaaatttcttgtctattcaatatttctttgtctgccttaacaatttttcaaactgttacaagttttccccttcatcttctgacacaagggctttatagccatgctgtccctttaatttgtccctgctttccagacatattcctcttcctgctctcttatcactagaatctcctttcttctgttcattctccttttaccagcattaccatatcctccatttttatccccagggttattgctccttttattttgttatatatttgtatcggaaggcaagcc

SEQ ID NO: 16249 - DNA, 1455 bp, Homo sapiens
tgtaagaacgatgcccttacacaggggccatgtggaagagttgattttttttttttttttgagatggaattttgctcttgtcactcaggtgggagtgcagtggtgctatctcggctcactgcaacctctgcctcccgggttcaagcgggagccttagcctcctgcgtagctgagattacaggcacccaccaccacacgcgcctaatttttttgtatttttagtagagacagagtttcaccatgttgggcaggctggtctcagactcctgacctcaggtgatccacccacctcggccccccaaagtggtgggattacaggcatgagccaccgcgcctggccagaagagatgcaatattttattcttcaaatactgcaactgaaaaaatgaaaagtttgtcttaaaattcaagaaatcaaattattcttcattttaaactcaatcaaatcatccccatatagaattttttgtcaatttgccttgattcattgtgacttttcagtgtttggctttccatttcttattctccctttcagagatacatacctattgatgactttgttagatatttattgaaagtattttatgtgctaggcaaaaacaataaaaacaaacctggtttctgcattcatttgagcttaaagtatcatcatcaaaagataccattaacttttaatgatgccctcaaagtcacatttttttcttcatcttttgcctcaaatattattttcttctatcttcctaaagtcatatcttcttttaaattatctttcagtaaatactattttttaaaaaaactttctaaataaacattgatgagcatttagttcatgtgctgttttgtgctataaaattttaaactaaatttgggtcagaggtctcttaaatcctttactattttcttattccattttgttagtaattatgcaattgtaattagaagacagatattattttttttaaaagaatcccattttccttataattccaaattgcctgtagtgctaacatatttcactaaacgctttacatatgttttcattactggtcttaatttacacagtgatgacttctcattacttattcctgaagtcacttttaatcttatgtctttggtttgtgattttgtttataccttcccccggctgaaccaccatatgttcaagaggtttagtctgaaatttcttgtctattcaatatttctttgtctgccttaacaatttttcaaactgttacaagttttccccttcatcttctgacacaagggctttatagccatgctgtccctttaatttgtccctgctttccagacatattcctcttcctgctctcttatcactagaatctcctttcttctgttcattctccttttaccagcattaccatatcctccatttttatccccagggttattgctccttttattttgttatatatttgtaycggaaggcaagcc

SEQ ID NO: 16250 - DNA, 555 bp, Homo sapiens
caccatgggcttccccggtggatttgctcacaaacgctctggagctccataaacctcatggttttctttcatatgaaaaattcttttttgtggtttacaggaagaaaaattctgatgttccagatctttcaggcacattttattggtgaacattattcttcacaagattcatttaatttgtaaatggaacaattaatttctatccagatgttaggattaaaaacataactgaaggagaggtctttttggcttcagtaaaaatgcttatcaacaaaatcccaattttatgtaaagataaagtgctgtgccagaaaaatcatggcttattttcttgcatatttctcgtcatcatttccatttccagcatttactttttttattttaactgaagagaaaattaaatgctctacttaagtttcctcctgttatttacaagttgtcttcttcaatccgtgggtgagattggctgcaaagtttgaagaagatagcaaactctgcaaagagatgagatttgtgtcattaaaaataaaagccacatgcacsagtcatcatttt

SEQ ID NO: 16251 - DNA, 520 bp, Homo sapiens
tatggaaatcatttctcagtttccaagaatatccacattggtttttctacaaatggtgggattttatttaatcatattttattgttcaatcctttttttatttgtaagttttctgaaatgactatgtattacattggtaaatcaaaatattaactaatccaatgtagtccaaacagtaaaaatacgacctaaaattatctcaaggtataaatgcttagcaaagagtgatgtagggcctagctctcttctgagctatttgatgagctctttctagaagatgttcttacaatgaacttgggtaacagaagaaaggattcataatcataatgaaggcctgggrctgggagggcatctggtcaataagaaattggcccctaaacctcgaaggtccaggcccgaggttggtcagttactcctctcaggtcagccttggaggcagctgccttgtattggcttcttgactctttgttcttcctcttctccatgtgttttgggtcacagttcctttcttcctaagttt

SEQ ID NO: 16252 - DNA, 506 bp, Homo sapiens
tgcagccataagaaggaatgagaatatgtcttttgcagggacatggatggaggtggaaaccattattttcagcaaattaaatttctacttttaaactccctatttgaaaaatgagaaaatacagggttagagcrttttaatgacttactcaaggtcatagaactcaaaagtgttgggtcagggatttgaaggcaagctggctcactcttactattccctatttcctaaaaatattttttcagcacttattacgattttctgtatttctgggggcgtgactattgttatcctcctcccatgattgaagaaactgagactcagagagaaaagaaagaagtaacatgcttaaaattgcacagtacaccattgccagatctaaactttcaagccaagagttcatatccctttagattaaaactcgagagactatataaatacaatctaaagcagttagtcttaactttacctgattttctataatgattctctatatttaaaaaaattgt

SEQ ID NO: 16253 - DNA, 1407 bp, Homo sapiens
ggatattactaagaagcatccactcccaggaagaggaggaaggccatatggctcctctctgcattgcctttgacacatgctaggaacctgcaccacctgagacagacagaggccagccagtaactaatccaatgrgagaatgaaggtgggtgttttatgtttattttataatatttaaatgacaaattaaggtggtatgtattcaaggtgtgcaacattacggtttgctatatgtatgcattgtgtaatggttgtcacatttagattaatgaacacatccatcaccacccatgctgtacattacatccccagcacttattcatcttatcacagaaagtgtgtatcctttgaccaacttttccccattttccccaacccctagcccctggaaaccacccttctactcaaaagaacaatctagccttgcctgggatgaagtgcaagaaacactcctgtggatacaatctctaccccagccttcacttcctgtttctgcacttcagagcctctcctgtggggcatttctcctttctcctataagttccactcttccatcttctcgtttatttgagctgttaagctcaacattaggtgttcacatatgggtcagggtggtgagcatgtttttgcagtagaaatgagaaaacagctgggcaccggtggctcacgcctgtaatcccagcattttgggaggccgaggcaggcggatcacaaggtcaggagatcaagaccatcctggctaacacggtgaaaccccatctctacttaaaaaaaaaaaaaaaaaaaaaaaaaaaaaaaaaaaaaaaaattagccgggcgtggtggcgggcgcctgtagtcccagctactcgggagtctgaggcagcagaatggcgtgaacccaggaggcggagcttgcagtgagccgagatcgcgccactgcactccagcctgggcgactgagcaaaactccgtctcaaaaaaaaaacaaaaaaaaacaaagaaatgagaaaacaatttgctcagccactgtgggaaatcccttctcacatgagcaatcagacactcaaacatgccatggctcacagcaccttcactatttggggtaccctggaacacatcccttgtacttatcctttctgctccttcaggaataaatgaagtatctgctggtgcagatgtaataggacaaaaaatatttcagaagaagaggttttaatacctgtctgtaagaatcaaacagggttaaaacaaaaaagggaaaaggaagtactgcatgaagaactttatgtattgcaggtcactgaatactgtattctttattgagctgggttttttgtttaagcatttttattttcctgcattggtaaaaaaaaaaaaaaaaaagtgggaaagatggaatcttaaatttttatttactcagtttca

SEQ ID NO: 16254 - DNA, 1407 bp, Homo sapiens
ggatattactaagaagcatccactcccaggaagaggaggaaggccatatggctcctctctgcattgcctttgacacatgctaggaacctgcaccacctgagacagacagaggccagccagtaactaatccaatgagagaatgaaggtgggtgttttatgtttattttataatatttaaatgacaaattaaggtggtatgtattcaaggtgtgcaacattacggtttgctatatgtatgcattgtgtaatggttgtcacatttagattaatgaacacatccatcaccacccatgctgtacattacatccccagcacttattcatcttatcacagaaagtgtgtatcctttgaccaacttttccccattttccccaacccctagcccctggaaaccacccttctactcaaaagaacaatctagccttgcctgggatgaagtgcaagaaacactcctgtggatacaatctctaccccagccttcacttcctgtttctgcacttcagagcctctcctgtggggcatttctcctttctcctataagttccactcttccatcttctcgtttatttgagctgttaagctcaacattaggtgttcacatatgggtcagggtggtgagcatgtttttgcagtagaaatgagaaaacagctgggcaccggtggctcacgcctgtaatcccagcattttgggaggccgaggcaggcggatcacaaggtcaggagatcaagaccatcctggctaacacggtgaaaccccatctctacttaaaaaaaaaaaaaaaaaaaaaaaaaaaaaaaaaaaaaaaaattagccgggcgtggtggcgggcgcctgtagtcccagctactcgggagtctgaggcagcagaatggcgtgaacccaggaggcggagcttgcagtgagccgagatcgcgccactgcactccagcctgggcgactgagcaaaactccgtctcaaaaaaaaaacaaaaaaaaacaaagaaatgagaaaacaatttgctcagccactgtgggaaatcccttctcacatgagcaatcagacastcaaacatgccatggctcacagcaccttcactatttggggtaccctggaacacatcccttgtacttatcctttctgctccttcaggaataaatgaagtatctgctggtgcagatgtaataggacaaaaaatatttcagaagaagaggttttaatacctgtctgtaagaatcaaacagggttaaaacaaaaaagggaaaaggaagtactgcatgaagaactttatgtattgcaggtcactgaatactgtattctttattgagctgggttttttgtttaagcatttttattttcctgcattggtaaaaaaaaaaaaaaaaaagtgggaaagatggaatcttaaatttttatttactcagtttca

SEQ ID NO: 16255 - DNA, 1407 bp, Homo sapiens
ggatattactaagaagcatccactcccaggaagaggaggaaggccatatggctcctctctgcattgcctttgacacatgctaggaacctgcaccacctgagacagacagaggccagccagtaactaatccaatgagagaatgaaggtgggtgttttatgtttattttataatatttaaatgacaaattaaggtggtatgtattcaaggtgtgcaacattacggtttgctatatgtatgcattgtgtaatggttgtcacatttagattaatgaacacatccatcaccacccatgctgtacattacatccccagcacttattcatcttatcacagaaagtgtgtatcctttgaccaacttttccccattttccccaacccctagcccctggaaaccacccttctactcaaaagaacaatctagccttgcctgggatgaagtgcaagaaacactcctgtggatacaatctctaccccagccttcacttcctgtttctgcacttcagagcctctcctgtggggcatttctcctttctcctataagttccactcttccatcttctcgtttatttgagctgttaagctcaacattaggtgttcacatatgggtcagggtggtgagcatgtttttgcagtagaaatgagaaaacagctgggcaccggtggctcacgcctgtaatcccagcattttgggaggccgaggcaggcggatcacaaggtcaggagatcaagaccatcctggctaacacggtgaaaccccatctctacttaaaaaaaaaaaaaaaaaaaaaaaaaaaaaaaaaaaaaaaaattagccgggcgtggtggcgggcgcctgtagtcccagctactcgggagtctgaggcagcagaatggcgtgaacccaggaggcggagcttgcagtgagccgagatcgcgccactgcactccagcctgggcgactgagcaaaactccgtctcaaaaaaaaaacaaaaaaaaacaaagaaatgagaaaacaatttgctcagccactgtgggaaatcccttctcacatgagcaatcagacactcaaacatgccatggctcacagcaccttcactatttggggtaccctggaacacatcccttgtacttatcctttctgctccttcaggaataaatgaagtatctgctggtgcagaygtaataggacaaaaaatatttcagaagaagaggttttaatacctgtctgtaagaatcaaacagggttaaaacaaaaaagggaaaaggaagtactgcatgaagaactttatgtattgcaggtcactgaatactgtattctttattgagctgggttttttgtttaagcatttttattttcctgcattggtaaaaaaaaaaaaaaaaaagtgggaaagatggaatcttaaatttttatttactcagtttca

SEQ ID NO: 16256 - DNA, 1407 bp, Homo sapiens
ggatattactaagaagcatccactcccaggaagaggaggaaggccatatggctcctctctgcattgcctttgacacatgctaggaacctgcaccacctgagacagacagaggccagccagtaactaatccaatgagagaatgaaggtgggtgttttatgtttattttataatatttaaatgacaaattaaggtggtatgtattcaaggtgtgcaacattacggtttgctatatgtatgcattgtgtaatggttgtcacatttagattaatgaacacatccatcaccacccatgctgtacattacatccccagcacttattcatcttatcacagaaagtgtgtatcctttgaccaacttttccccattttccccaacccctagcccctggaaaccacccttctactcaaaagaacaatctagccttgcctgggatgaagtgcaagaaacactcctgtggatacaatctctaccccagccttcacttcctgtttctgcacttcagagcctctcctgtggggcatttctcctttctcctataagttccactcttccatcttctcgtttatttgagctgttaagctcaacattaggtgttcacatatgggtcagggtggtgagcatgtttttgcagtagaaatgagaaaacagctgggcaccggtggctcacgcctgtaatcccagcattttgggaggccgaggcaggcggatcacaaggtcaggagatcaagaccatcctggctaacacggtgaaaccccatctctacttaaaaaaaaaaaaaaaaaaaaaaaaaaaaaaaaaaaaaaaaattagccgggcgtggtggcgggcgcctgtagtcccagctactcgggagtctgaggcagcagaatggcgtgaacccaggaggcggagcttgcagtgagccgagatcgcgccactgcactccagcctgggcgactgagcaaaactccgtctcaaaaaaaaaacaaaaaaaaacaaagaaatgagaaaacaatttgctcagccactgtgggaaatcccttctcacatgagcaatcagacactcaaacatgccatggctcacagcaccttcactatttggggtaccctggaacacatcccttgtacttatcctttctgctccttcaggaataaatgaagtatctgctggtgcagatrtaataggacaaaaaatatttcagaagaagaggttttaatacctgtctgtaagaatcaaacagggttaaaacaaaaaagggaaaaggaagtactgcatgaagaactttatgtattgcaggtcactgaatactgtattctttattgagctgggttttttgtttaagcatttttattttcctgcattggtaaaaaaaaaaaaaaaaaagtgggaaagatggaatcttaaatttttatttactcagtttca

SEQ ID NO: 16257 - DNA, 602 bp, Homo sapiens
gtttgaggcaacgggcaacacgatttgctgacagatgtgataggaatgggaggagaaaaagagaagtcaaagctggagactgacatgggaagaggaagctcacgttctttaggaacatggtcagtgggagacacccacatagagagatcagttcctaaaagttgtgtccacaaacagaaaaggttttcttcccccccatctaccaccaggtcccaaaggcgaggcaccccctccaggctatcacaaatggaacttgtcctcagagaaagagaacacgacccttcaggagagtcttggccaaagggaccggctgcagctgccttctgcagggcccctgtggctgcagtggctccayttggccaaggaaccctgaatccgctcctgattggcctgaatcacgaacccatttggaccaggaacccctgagtccactcctgcccaggcctctcccgggtcaccctcatctcctcccaaagccattcaccttgccaccttgcaccctgtcatgtcaccatcctggacctcagtgtccacatccacgaaatggggtgggtggagaggagggccccccaagatctgacatccctttccactctaacact

SEQ ID NO: 16258 - DNA, 531 bp, Homo sapiens
tcaatgaaaagatagcatttgctgtgatcagcttctctaatattgttcctctgtaagggtttcactgttctcaactttgaacatccactcgccgttctgtggtatatccatttgtccctagtatttaaattaggttattgtaaaagctcctttgcacctgttgaaaatrctggcacagtttctccattagtaaaccctagaaatctgagctctctttcactgaagtttcttatttcaactggaacattcttcttgaatgtgtgtgataggatcagtgtacggttttcaaatggttcagtctttctgcaaccacaaagtttcttattcaggggagtgcttgcagttctcttcattcccctcctccacttgtagatgaagaaaagaaaggcttatattatttttgaggcagctgctaacaaaaaacttggtttcttgagagctgtgcttgtcattgcttaaagatagtgtatgtcagaccaagctggtgacagttctgcgctactgaattggagatgcctcggcgtggagagt

SEQ ID NO: 16259 - DNA, 555 bp, Homo sapiens
taggcgtgccgggaaactcggaatcccggcggtctacacacccccagcccccgctccactgtgtgtagctttgcatttcccagagtccctggatcacgtccctggatcggcgggagcggtgagcatagcgagggagcagtgtgcaaatgagaggcagaggatgtgacactcggatttcctgcattgccggtccctgtccccgtccccacctcggtctgttggccacgtttctcttatgtctagggacagaacagacacagkgctctgcccccgtccttgcattctccactcttgagaggctgaatgggcacatttgcccaggtcctcctttgcataaaactctccaggtctccccatagcctagccgggcaccccaccacaggatgacagtttggaaaatgtggaatgctcccagaaaagggatcattttaggtgatatgcggattccggattaaattaaaatgcaagaaacagggttatttttccttccatattcctattactctacataacattaatccgtgttaggccctttttagtcactttgcatcgttg

SEQ ID NO: 16260 - DNA, 513 bp, Homo sapiens
accacaagaacaatcattttcatttcccgaaaacaaaaagggtagaaaaagttaggaacawgtttaaatagaaacttagttatggtttatctgctataaatattgtccacactcacatacctttaaatcctaaatttatttactcttgaaatcctaaatttatttactcttgcagtgcccagttaaaaacctggttctcgttagtagccatccacatagttcccccattaacaaatgtttctgagacccaaagtgggggttcgtaaccattcatcatgtctgcattccttccaaaatggaacatataaaatggaacatatatattccatttcaaaaatttcagaaactaattactttgtaataaatattgaaacaagcacctaggcatgtcatccagaccagagcttttgcagttgtcgcaataacttcacatctgctgtgcttgcgtatttctaccgttgtcaaatgacaaatggtgaaatttaaagtatctgacacaaacccggtagttgc

SEQ ID NO: 16261 - DNA, 524 bp, Homo sapiens
aagacacaggatgaggcagagtaggcgtgggagaaacctatttttctcttggcaattgcctctaggacacattctttatttaagaataagaacctttaacaataaccctgagtcacaagtatcacacacggcagacactacatttacaaaaacacctcagtgaaggctgtataaaaacctaaagtttgtgcatctcatatgatcttttttatcagtttcatggctgacacacgagttttctctgargaggtgtacgcttttcacagtcactcagtatttttaaaaaaggaaattaaagcatttaaagaacatgaactatatgctgtgctatgtgccattgatttctcacagcagacttttaagttattttgtttccacgctacatatgagaaaaattgagactctgaagagctaaacaacttaaccaaggtcatagactggtttatttaattttaaataatctattctggaatttttatgaacaccatgaaatttaccctatattaaacagtgattaggtagag

SEQ ID NO: 16262 - DNA, 524 bp, Homo sapiens
aagacacaggatgaggcagagtaggcgtgggagaaacctatttttctcttggcaattgcctctaggacacattctttatttaagaataagaacctttaacaataaccctgagtcacaagtatcacacacggcagacactacatttacaaaaacacctcagtgaaggctgtataaaaacctaaagtttgtgcatctcatatgatcttttttatcagtttcatggctgacacacgagttttctctgaagaggtgtacgcttttcacagtcactcagtatttttaaaaaaggaaattaaagcatttaaagaacatgaactatatgctgtgctatgtgccattgatttctcacagcagacttttaagttattttgtttccacgctacatatgagaaaaattgagactctgargagctaaacaacttaaccaaggtcatagactggtttatttaattttaaataatctattctggaatttttatgaacaccatgaaatttaccctatattaaacagtgattaggtagag

SEQ ID NO: 16263 - DNA, 524 bp, Homo sapiens
aagacacaggatgaggcagagtaggcgtgggagaaacctatttttctcttggcaattgcctctaggacacattctttatttaagaataagaacctttaacaataaccctgagtcacaagtatcacacacggcagacactacatttacaaaaacacctcagtgaaggctgtataaaaacctaaagtttgtgcatctcatatgatcttttttatcagtttcatggctgacacacgagttttctctgaagaggtgtacgcttttcacagtcactcagtatttttaaaaaaggaaattaaagcatttaaagaacatgaactatatgctgtgctatgtgccattgatttctcacagcagacttttaagttattttgtttccacgctacatatgagaaaaattgagactctgaagagctaaacaacttaaccaaggtcatagactggtttatttaattttaaataatctattctggaatttttatgaacaccatgaaatttaccctawattaaacagtgattaggtagag

SEQ ID NO: 16264 - DNA, 570 bp, Homo sapiens
tgaaggagcacagagggtcatatttgggagatctttatgaattgggcctggaacattactctttttcatcttccactggctagaattcagtcacatgaccatacctagttgcaagggaatttgggaaatgtagcttaagtgcacgcccaggaacaagagaaaatagacttggtggacctagcttaamcagtttcaaagggaaaaaccagttgatctcttctccattaagctgtcgctatcagataacacaataaatcaaagataataaatctccttacaaagaaagcgatccttttacaggattatatttatcatccattatggaataggaactttatatttggtcacctgagagccaaacagaatacctctttaaaaaacatctgccctaaaggtacattttgcttttgtctctagaataataaaaatatgtcagtttttagaaatagtgatatccaattttaggtaacgccatcataagtatatctatatgtataaataagcctaactttttactacttataattagaaggaagtaacttctgttttcttctgtggatgaaagaagct

SEQ ID NO: 16265 - DNA, 569 bp, Homo sapiens
ccacaggcaagcttccaggggtccaggaagagcccgtgtctaggctttttgactcctggcctttggaaggcaagtacctatctgccaaacctaagaggctcaatggtgggttaactaaaagcaaagacagcaaatggtcactataatgcattgtaatgtggagtccgactcaatttttgatgcctgactactgacagctttgaagcttcatcccttcattgtccctttgtgccctacatttggacaagcagataagaaagcctgggtgctcctgcctttgattcaaascatgaagcccctgccatgaaaaactctcacctcagcgctaccttctaactataataaaaacccaggcagtcacttttccttgctcacttaagccatctcagacctgcttgagagtaatgccgtgctctcccacagacctcaattatgtaagtaataaaccgttttaatactctcttggggtgtgtgtggtatcatcagtcacaacatctgaacaaaacctgggtgaaggtccttctgcctctacagatgaccataacatggattcaaaatatggtatatta

SEQ ID NO: 16266 - DNA, 501 bp, Homo sapiens
ctagcattatgttggtctctgttatccctaaagtaaaatcaactttttattttccggtgaggacaactattccactaatgagaatcagaacacaaactctatatttgtttgacttcagcagcaaaccaaattattgctaaactttagtggttttttttttttttttaaatttcagtaagtgatagacgttccagtgtttacaagctgaaagactatgcaatccattaaacaagtatgcctactaggaaattgttattacttcaatattatcattyatccagttacaacatttgttttcaatttctaaaaacatgattgagttagtcccacgagttgaaacgggcttaatgtcccgtgatgtgatacagtagtaatgtgcaaaaagaaaaaattaagaggcatacagggactgttttatgctaaagtcattctggagatgtgtttaaaagttggcttttctgattaatgtggtggagttttaatgctgaccctttcctggta

SEQ ID NO: 16267 - DNA, 501 bp, Homo sapiens
gtcattgtagagaggagactgcttggcaaagagtaaaaaaaaaaaaaaaaaaaaaaaaaaaaaatctagagttagggagatgacccagagccatgatcactccagaaaggtaaaatgtagtacacttgagtggtgtcttctgaggataaaggaagttcacatttcatcaacagagaaggggcagaaactaagcacaaagttcccaaactgcctgataaggatccttgtatagaatactgaaagatcagrgatgagctaccaggttatatccctttgggtgttttatttttccatgctgggtgaaaaggtaatttcctaaaaaaccaaaactccgtctcgagaaagaaaaaaaaaatccacatgggcctaatctgattttttttttttcaaatatgtagactcaaactaaaatcttccaaagacttctgcatgatcttggctttgtcccaatattatctgctgaacacactccctattattcttaaaatgtgattctcatga

SEQ ID NO: 16268 - DNA, 573 bp, Homo sapiens
gggaagtgaacaccaatgagatttcaccaaacacccatgagagcagagcagagggtgcagctgggccccacggaccctgtgggtgctcagagtacccccaggaagtgcacgtgggtgtgcaggctcccggcactccaagccgcctcggtggggccacagcgtctgtcccggtcatagcccgccctgccaagccctgcccagcccgccccacggcccaggccagaaacgcctccagccctgcagctcttggcctcagaagcggaaaagcctctgcagttagcaacacaagacggttyctgcgtcctcccgacccccgcccccaaaacacacacacacacacatcagagcgtcttggcagctggtgagcgctaacgtggctgaattgcttttggggactttgaaggaaattaattaaaaccagctgagatgggaaagctggaaggtggcgggagccagggacaactttccacagggcctgggagggagcagcccggagccgaccacgccaccacgagccaccgtgtccagccaggcccgacgacctgcccggcctcgccaaaggtgggactgccc

SEQ ID NO: 16269 - DNA, 526 bp, Homo sapiens
cccacccaccagccttttgcagtgaggaaatagacgtggcgagttatttgtcagtgcacccaggacaagcccagactcggacctggtcagtctgatccccagccggccatccccagcccctaccccccctcctccctgaatctgcgctctgccctgcagggaacgtgttggagcctgtccctggggtggggcccagctgtcatcctccggctgccaggactctggtgtttgacacctggtgccaggcctcaggccgaggctggggagacacacgcagcttctggaccatcaggggcaggaaagggagcccagggggccaggcaggagccttgggtacagcatgttccatcctgcgctrcccaccacacgaggcctgcaccctaacaggccccctcctccaggcagccagccctgcctgatgcctgtggggagaacccagcctctcctcctgccaccatgcatctcccttacaccagcctaagcatccactgggagagtcacttccttgcggggttccagggtggga

SEQ ID NO: 16270 - DNA, 706 bp, Homo sapiens
gacgaaggaggatcccttgagcccgggagtttgagaccagcctgatgacttcatctctactaaatatatrtgtgtgtgtgtgtgtgtgtgtatgtgtgtatatatacgtgtgtgtgtgtgtgtatgtgtgtatatatatatgtatatataaatggaatatggccaggtgtggtggctcactcctgtaatcccagcactttgggaggctgaagcaagtgaatcacttgaggtcaggagttcgagaccagcctggccgacatggtgaaacctgtctctactaaaaatacaaaaaattagctgggcatgatagtgcgtgcccgtaatcccagctactcaggaggctgaggacaggagaattgcattgaaaccgggaggcggaggttgcagtgagctgagatcccactgcactccagcctgggtgacagagcaagaccctgtctcaaaacaaaaacaaaatacaatataacataaacaataacataaacaaataaaaacgacacaagagagcagctttcttttggttgggagacaaggaagtaaaggagggatatttttcaggcctggaaggacaaaacaaaggcagtgatgtgagaaggtggcgatgggatgagccaaggaccaggaggggacgtggggcccaaagcagggactgcttggaggccttctgcaggagacgaggatagtggggtacagatatgcccagatc

SEQ ID NO: 16271 - DNA, 706 bp, Homo sapiens
gacgaaggaggatcccttgagcccgggagtttgagaccagcctgatgacttcatctctactaaatatatatgtgtgtgtgtgtgtgtgtgtrtgtgtgtatatatacgtgtgtgtgtgtgtgtatgtgtgtatatatatatgtatatataaatggaatatggccaggtgtggtggctcactcctgtaatcccagcactttgggaggctgaagcaagtgaatcacttgaggtcaggagttcgagaccagcctggccgacatggtgaaacctgtctctactaaaaatacaaaaaattagctgggcatgatagtgcgtgcccgtaatcccagctactcaggaggctgaggacaggagaattgcattgaaaccgggaggcggaggttgcagtgagctgagatcccactgcactccagcctgggtgacagagcaagaccctgtctcaaaacaaaaacaaaatacaatataacataaacaataacataaacaaataaaaacgacacaagagagcagctttcttttggttgggagacaaggaagtaaaggagggatatttttcaggcctggaaggacaaaacaaaggcagtgatgtgagaaggtggcgatgggatgagccaaggaccaggaggggacgtggggcccaaagcagggactgcttggaggccttctgcaggagacgaggatagtggggtacagatatgcccagatc

SEQ ID NO: 16272 - DNA, 706 bp, Homo sapiens
gacgaaggaggatcccttgagcccgggagtttgagaccagcctgatgacttcatctctactaaatatatatgtgtgtgtgtgtgtgtgtgtatgtgtrtatatatacgtgtgtgtgtgtgtgtatgtgtgtatatatatatgtatatataaatggaatatggccaggtgtggtggctcactcctgtaatcccagcactttgggaggctgaagcaagtgaatcacttgaggtcaggagttcgagaccagcctggccgacatggtgaaacctgtctctactaaaaatacaaaaaattagctgggcatgatagtgcgtgcccgtaatcccagctactcaggaggctgaggacaggagaattgcattgaaaccgggaggcggaggttgcagtgagctgagatcccactgcactccagcctgggtgacagagcaagaccctgtctcaaaacaaaaacaaaatacaatataacataaacaataacataaacaaataaaaacgacacaagagagcagctttcttttggttgggagacaaggaagtaaaggagggatatttttcaggcctggaaggacaaaacaaaggcagtgatgtgagaaggtggcgatgggatgagccaaggaccaggaggggacgtggggcccaaagcagggactgcttggaggccttctgcaggagacgaggatagtggggtacagatatgcccagatc

SEQ ID NO: 16273 - DNA, 542 bp, Homo sapiens
cagcttaccccgcttggcccatttcttcctaagaaaaccacagtaaaacctttttcccacacttcttgctccttctaccttctgacccgaccctggtgcttccttgtgtagccctgtgcagcttggcaggtcttcttctcttgggaacgctgactaacgaactgtgttttcagtggctattctctcctgatctgttggtcttaccatactgaataaaaatgaaatcctggatgcattttaaaacaacagctacaaacaaggcctgtgttctcttagaggatagagacactaaatgaatgaacaaataatgttagaaggttataaagtctctgaaaaaaataaaacagtgttgtgagagcagctggtgatagggctaatttagaatggagaaggaagagttcagtggggaggtggtgacttttgaaaggacgtcagaatgtaggagacgcttggctctaagaatgctgtagatggcgaggattctgggtgtgaacttagacatttttgtttactagaaactgtgtgcyaactaatcaggttga

SEQ ID NO: 16274 - DNA, 739 bp, Homo sapiens
ttttctaaatgttaagaactttctgtcattaaatagtattttgggataaattttctagaatattctattacatcctctttactaagcatggtactaggtaggtaattagagaatatgagcaagattcatgttatttatttttaataaagcaggtattgctgtctctaagccagatctggtcacctgtctggagcaaggaaaagatccctggaatatgaagggacacagtacggtagtcaaacccccaggtaggtgagagtgaatgaaacagttgacatagaygaaaggttgaaagatttaaaaaaaaaaaaaaaaaaaaaagccagtcctggccgggagcaatggctcatgcctgtagtcccaggactttgggaggccaaggcaggtggatcacctgagctcaggagttcgagaccagactggccaacatggtgtaaactctgtctctactaaaaatacaaaaattagccaggcgtggtggcagttgcctgtaatctcagctcctccggaggctgaggcaggagaattgcttgaaaccgggaggcagaggttgcaatgagccaagatggtgccactgcactccagcctgggggacaagagtgagacttcatctcaaaaaaaaaggaaaagaaaatagttatcaagtgaatataataccatcaccaaatctgtcctgctgatttgggaagctatgttccaaagcaaagagtttctcggaagcctttggcatttttttgtt

SEQ ID NO: 16275 - DNA, 392 bp, Homo sapiens
tatatatatatatataatcaagtgagtataataccatcacaaaatctgtcctgctaaataaaaagaaaaaaaaaacttcaaaaataaatgaattctaaagaagtatattggcactgccttatatataaaaggcgctgaaggcagttgcttccaatgtaaataacaagactcaacaaaacaacatataatcatattaaaatacattattttctgggaaagatatgcacatacacaaaaataaatttcttagcacaaagaatacatctatatasatacacaaaacaaaataaggaagaagtaaaagcatataaaataaaaataaagaagacacaaagagacagaaaatgtgggacaaagatacaagaatcaaatagaacaataaattaacatta

SEQ ID NO: 16276 - DNA, 626 bp, Homo sapiens
attgtacattactattgttagagttagaccacagcttggaatcactaatttgaagcaaagctctagtaagaacaagttcatacattgaattcattttgtccaatggcctggaagggtgatcttaactgggcactagcccttgtgcatgttttctgtagataacagagcaaaagtgatactttaaaaaaatgtacgtatttattagcacaatctataaaccattttgggtgaaaacaatattctaatagagaggttctaaaagawattagttactttggctttaatgtgctaattttattacctccatcacttcatgtaaatattcttgtgttgccatctacattcattttcgtaagggaatcctcaagtgtttgcaggcctaagtttggtctgtaaaccactgcctggttacctccctgactgatagctttgaaaatgtgtcaacagttttcgtgttttacattttatcatagtgccaagcataatataatatttatattccctgtacatacaggtttttttttttttcattgtaaaaaaaaaaacaaaatctggtttagttaattttgttcttgcagaatttaatcagtttcacatggaacttctttacttatttatgggagaca

SEQ ID NO: 16277 - DNA, 626 bp, Homo sapiens
attgtacattactattgttagagttagaccacagcttggaatcactaatttgaagcaaagctctagtaagaacaagttcatacattgaattcattttgtccaatggcctggaagggtgatcttaactgggcactagcccttgtgcatgttttctgtagataacagagcaaaagtgatactttaaaaaaatgtacgtatttattagcacaatctataaaccattttgggtgaaaacaatattctaatagagaggttctaaaagaaattagttactttggctttaatgtgctaattttattacctccatcacttcatgtaaatattcttgtgttgccatctacattcattttcgtaagggaatcctcaagtgtttgcaggcctaagtttggtctgtaaaccactgcctggttacctccctgactgatagctttgaaaatgtgtcaacagttttcgtgttttacattttatcatagtgccaagcataatataatatttatattccctgtacatacaggtttttttttttttcattgtaraaaaaaaaacaaaatctggtttagttaattttgttcttgcagaatttaatcagtttcacatggaacttctttacttatttatgggagaca

SEQ ID NO: 16278 - DNA, 626 bp, Homo sapiens
attgtacattactattgttagagttagaccacagcttggaatcactaatttgaagcaaagctctagtaagaacaagttcatacattgaattcattttgtccaatggcctggaagggtgatcttaactgggcactagcccttgtgcatgttttctgtagataacagagcaaaagtgatactttaaaaaaatgtacgtatttattagcacaatctataaaccattttgggtgaaaacaatattctaatagagaggttctaaaagaaattagttactttggctttaatgtgctaattttattacctccatcacttcatgtaaatattcttgtgttgccatctacattcattttcgtaagggaatcctcaagtgtttgcaggcctaagtttggtctgtaaaccactgcctggttacctccctgactgatagctttgaaaatgtgtcaacagttttcgtgttttacattttatcatagtgccaagcataatataatatttatattccctgtacatacaggtttttttttttttcattgtaaaaaaraaaacaaaatctggtttagttaattttgttcttgcagaatttaatcagtttcacatggaacttctttacttatttatgggagaca

SEQ ID NO: 16279 - DNA, 1714 bp, Homo sapiens
cacaggacgagcttaactgccctggcaccgagccgtgtcaagtgctgtctgccgggaagctgggtagagactccaggcccatggtttccatcaggactgatcacacgggcaccccctgcctggcgtgtaccaagttccagactaaggaaagcaggtttcagcacagaccacattgtttgtacagacagttcaggcacagggaaccacacctaccacctagggaatgggggagccctcctgagatccagactccagctgagggccagcctgcagcaaccctgtctgaggttgtatctcgggccagctgttagctgtcttctgcacagaaccatgattaaagtttgttagtttcccactgttagatatttaggtagttatctttgtttttctattaataaaaaatgtgatgaggatctttctaactcagttattttgcttttttcaggggagtaattcctagaagtagagaaagtagctttactgagcattttaatatcttttatatcttcctaggatatttatgtatttcatccttccgtttatcttctttttatcctatatcagtaaaatattcataatattatattgataaaacatatagtatggattgttcaaaattacgatcttcattagtactttgtgaatgttttgtgtgtattaaggggacactgtagctacttgttggctcagctattgtttttgatgctccgtcaggccccagttgtgacagcgttgaggaagatatgaatgcttctgctcaaggtgcttctgccacagttttggaagaaacaaggaaggaaacggctcctgtgcagctccctgtttcagggccagaactggctgccatgatgaagattggaacaagggtcatgagaggtgtggactggaaatggggcgatcaggtactcagagatttgatgtgaacacattagccacacattagttatcttctgcatagttctgtacgatattggtgggtggaaattggaataatccaggatgtgtcagttgatcgatgacacaggtgttggttcccgagcagctgaagggagtgaacacaaacagggaatcrtaagtagggcatctgagcagaatcaagtctggaaagagaggcagctcttttcaggaaactcactggcatgaggctcagtttgatgggtcactggaacaagagtgtgagagtgagcaagagagtaaatctcattctgaaagttggtgtagtgaaggctctgaggcaggaagcccagatgctgcccctgtgggctgatggccatgtgctgcgaagtgccctgaagccagtagttagggatctacttcatgggcctgtggccacgtttccatcttccctcatcgcagatctcttctaaatctctgccaggtgcccccaggtggaagtcacttaccacagccctagctaagttagggcagtgttcaccttcccatggtctgtctggcttttctcagccacgctggtaagccctggctttgtcacagtcatcttagaaatagcagtgtctggagacagcatccatcctagaaacagctttctcctgcagaagtgagagacagagcttccccctggggcccaggggaaactgaagcaaagggaatgtggaggtgctggtgcttgtttcaggtttccgctcttgcaaggcccgtgagggattgtggggacaggacttgctgcaaagccctgtctctgcattgactcaga

SEQ ID NO: 16280 - DNA, 544 bp, Homo sapiens
cttaaatatttactttcatgatcatttcaatattgcaagggggtcaggaaagtctttctaagaatgacatcaaaggcaagaaatagaaagaaaatatgtttaaaaaatgtgaatacatagaaatgaaacatttctttatgacaaaataagacacatttaataaacaacaaaatggaaaraatagttgcattctatattacaaaggtttaataggaagaacgtataaataagaacatgaaaactccaaaaagagaaaggacaaagttcataaattggcattgttaaaagaaaaacttcagctgaattaaatttaatggagtttaattgagcaatgaacgattcatgaattgggtagctcccagaatcacagcagattcagagactccagcacagccacatggtggaagatttatagacaaaaaaaaggaagtgaggtagagaaacaactgggttggttacagctcagcatttgctttctttgaacgcagtctgaacactcagaagtgtatgagtgattgaagtatggctgctgggattggccaag

SEQ ID NO: 16281 - DNA, 565 bp, Homo sapiens
tcaagcccttacagacctgccctctctgtgccatcctgcatatgcctcccttgagctgggtgtccctctgatggacgcatccattcactgcctgtcccatgggttgtgtccaaaggtggaatctgttatcaatgtggatttctaatgggagtaacttcctccataagggaagcctcagcctcaccagcaatggcagacatggccaggcatgtagacacagaggtagtgagatggaaagtgggcacagcccagagagcctgcccacctcatcctggggcraccaggacaaggaagcatcagcaatcttgcgagcacatgtaggagtgactttctggagcaggacgagcctcatgggcatgagaccattgtgagtgctcagggtctccccctagaaaggcacacatttaattctccattttgaaatttgaagtagtgcccccacaaattatgcagcccgttctgttctggaggaaccattcttatcagaacttggtgctggattgacttggagaaaagcctggccataatcttcaggatgaaataaaggcctggatgaatggatact

SEQ ID NO: 16282 - DNA, 1098 bp, Homo sapiens
taagccaggtgctatgccagcctctttacgtgtattaatttatttgtcctttccaaaaccttatgagattattattattgatccccatgttacagttggggagacaaaacacaaaggtgcgaatkcatggatgaactgggtttgaacccaggcagcctatctctacacctgtcctcttacctctttacctgatatgtccttagcactttcatggtcattcacatatgtaggtatgagtaagtgcgtgtgatgcagacaatgagtgctctttaaggtaattgtcaggaatctgtagacaatctctgagattgggaagagagctgtcaccacccaaaacaagtacattttccaattctaagccttcactattccatggccatggcagtggagcggttaagagcacaggtcatggagtcaaaattccagctctgccatttaactagttatatgaggaaggccaagttattatcctccctatgcctcactttcctcatctataaaatggtacaataatacctacctaatatagtttttgtaaagattgaatgagataatgtttgaaaagtacttaacatagggccaggtgtagtggctcacgcctgtaattccagcactttgggaggccaaggcagatggattgcctgagtccaggagtttgagagcagcctgggcaacatagtgaaactgcatctctacaaaaaaaatacaaaaattagccaggcatggtggcgcacacccgtcctcccagctactcaggaggctgaggtggaaggatcacttgagcttgggaggcagagattgcagtgagccaagatcatgccactgcactccagcctgggtgacagagtgagaccccgtgtctgaaaaaaaaaaaaagaaaagaaaagaaaaagaaaagtgcttaacaacttaacgtagtacctgagacgtagtaatgactgaaagggagctattcttatttcaaatttattactgtttcttacaaaggaaaaactaaatggacttgcttttgttcatcgatcagaatcttgaatgcttaatatgtgccaggcactggtctaggtgctgtgggcacagagatgaataatcaggttcctg

SEQ ID NO: 16283 - DNA, 1098 bp, Homo sapiens
taagccaggtgctatgccagcctctttacgtgtattaatttatttgtcctttccaaaaccttatgagattattattattgatccccatgttacagttggggagacaaaacacaaaggtgcgaatgcatggaygaactgggtttgaacccaggcagcctatctctacacctgtcctcttacctctttacctgatatgtccttagcactttcatggtcattcacatatgtaggtatgagtaagtgcgtgtgatgcagacaatgagtgctctttaaggtaattgtcaggaatctgtagacaatctctgagattgggaagagagctgtcaccacccaaaacaagtacattttccaattctaagccttcactattccatggccatggcagtggagcggttaagagcacaggtcatggagtcaaaattccagctctgccatttaactagttatatgaggaaggccaagttattatcctccctatgcctcactttcctcatctataaaatggtacaataatacctacctaatatagtttttgtaaagattgaatgagataatgtttgaaaagtacttaacatagggccaggtgtagtggctcacgcctgtaattccagcactttgggaggccaaggcagatggattgcctgagtccaggagtttgagagcagcctgggcaacatagtgaaactgcatctctacaaaaaaaatacaaaaattagccaggcatggtggcgcacacccgtcctcccagctactcaggaggctgaggtggaaggatcacttgagcttgggaggcagagattgcagtgagccaagatcatgccactgcactccagcctgggtgacagagtgagaccccgtgtctgaaaaaaaaaaaaagaaaagaaaagaaaaagaaaagtgcttaacaacttaacgtagtacctgagacgtagtaatgactgaaagggagctattcttatttcaaatttattactgtttcttacaaaggaaaaactaaatggacttgcttttgttcatcgatcagaatcttgaatgcttaatatgtgccaggcactggtctaggtgctgtgggcacagagatgaataatcaggttcctg

SEQ ID NO: 16284 - DNA, 1098 bp, Homo sapiens
taagccaggtgctatgccagcctctttacgtgtattaatttatttgtcctttccaaaaccttatgagattattattattgatccccatgttacagttggggagacaaaacacaaaggtgcgaatgcatggatgaactgggtttgaacccaggcagcctatctctacacctgtcctcttacctctttacctgatatgtccttagcactttcatggtcattcacatatgtaggtatgagtaagtgcgtgtgatgcagacaatgagtgctctttaaggtaattgtcaggaatctgtagacaatctctgagattgggaagagagctgtcaccacccaaaacaagtacattttccaattctaagccttcactattccatggccatggcagtggagcggttaagagcacaggtcatggagtcaaaattccagctctgccatttaactagttatatgaggaaggccaagttattatcctccctatgcctcactttcctcatctataaaatggtacaataatacctacctaatatagtttttgtaaagattgaatgagataatgtttgaaaagtacttaacatagggccaggtgtagtggctcacgcctgtaattccagcactttgggaggccaaggcagatggattgcctgagtccaggagtttgagagcagcctgggcaacatagtgaaactgcatctctacaaaaaaaatacaaaaattagccaggcatggtggcgcacacccgtcctcccagctactcaggaggctgaggtggaaggatcacttgagcttgggaggcagagattgcagtgagccaagatcatgccactgcactccagcctgggtgacagagtgagaccccgtgtctgaaaaaaaaaaaaagaaaagaaaagaaaaagaaaagtgcttaacaacttaacgtagtacctgagacrtagtaatgactgaaagggagctattcttatttcaaatttattactgtttcttacaaaggaaaaactaaatggacttgcttttgttcatcgatcagaatcttgaatgcttaatatgtgccaggcactggtctaggtgctgtgggcacagagatgaataatcaggttcctg

SEQ ID NO: 16285 - DNA, 847 bp, Homo sapiens
attttcaaatattgcatattttgacatgtaaaaatttgttagttttattttttcaaccgatctgacctgtatagttgggcttgaggaagcttcctcattctacatgttactatggattttctaatattaacacagggttgtattttttccatataactttctattgaatttctttttccatatgataggtggtgaaggtttagcccagtaaagcagagaggttaagaggttagattgggggctctggagccagacctrtgtagatctgagtcctggctctggcacttgaaagccgtgtgaccttggttaagatacttagtccctctctgccaaatggagaaataagggcacctaccccatagggtagttgtgtgattacacaagttaatacacttcaatcagtagcaagaaagtgaatgtcaagctgtatttgttcaggcagccatatggtagccccacgtccttagtaaactgaggtattgaagtatcttctttttctttcagaaaatatttgtcaagcaccttctgtgttctaagaactgttctagagctttgcatgctatggaggtctagaaattcacattatggtggcaggtgacagacaatacaaagagataaagcaatttcatatagtgataagctagggaggagtgctaaaaggagccaaggtgtagtggtgactggaaggtgaccagggaaaccactgtagggtttctaagtgatgagatctgtgacaaatccctgtggtcagcagcaggcattggatatgtaactttattctgtcccattgatcttgtagtcaaccctggtctgttctgtattggtttaattacataatctttgtaat

SEQ ID NO: 16286 - DNA, 847 bp, Homo sapiens
attttcaaatattgcatattttgacatgtaaaaatttgttagttttattttttcaaccgatctgacctgtatagttgggcttgaggaagcttcctcattctacatgttactatggattttctaatattaacacagggttgtattttttccatataactttctattgaatttctttttccatatgataggtggtgaaggtttagcccagtaaagcagagaggttaagaggttagattgggggctctggagccagacctatgtagatctgagtcstggctctggcacttgaaagccgtgtgaccttggttaagatacttagtccctctctgccaaatggagaaataagggcacctaccccatagggtagttgtgtgattacacaagttaatacacttcaatcagtagcaagaaagtgaatgtcaagctgtatttgttcaggcagccatatggtagccccacgtccttagtaaactgaggtattgaagtatcttctttttctttcagaaaatatttgtcaagcaccttctgtgttctaagaactgttctagagctttgcatgctatggaggtctagaaattcacattatggtggcaggtgacagacaatacaaagagataaagcaatttcatatagtgataagctagggaggagtgctaaaaggagccaaggtgtagtggtgactggaaggtgaccagggaaaccactgtagggtttctaagtgatgagatctgtgacaaatccctgtggtcagcagcaggcattggatatgtaactttattctgtcccattgatcttgtagtcaaccctggtctgttctgtattggtttaattacataatctttgtaat

SEQ ID NO: 16287 - DNA, 797 bp, Homo sapiens
tttacccgtattcagcttctcacttctgtatctaaaaacactagattttatcattctactttaaagtttcttttttttttttttttttacttttcctaaaatactcaaatttccataaaggaacaagggataaagcttaagcataacttcaaaagagacataagcggggtgaacaagatccagacacaggctctcttgatgtaaacatagacctttaaccatgtgcaatctgtctattaagaaaatagaggactctaaacacaaaattaagagtatagttgtctctgtgtgactgaaaaagagtgaaagataactgcaaaattattgatactgttcttatgcttaaattgggttgtgtgcttacatgtgttcattatgttaatatgtctcataggttaggtatctyaatcaaatatgcagttatataaatacaatacactgagataagataactagcaacacattgaaacaaaaaaacgagaataggattgaatactgtcacgatctttacaaggcctggcctttcactatgtaaatagatatcttttagtccaagaaatcacagaacttacacatttttaggaaaagaagaaaaaattcatagaataaattaattttatgtcctgtaagcaaaagtctactaaggtgaattcataatatcccataacagcaaaaaagaatgcattcagaagtcctaaatctataaacaataaaaatagttaagcacatagaatttacttaagttcaaaagcatcatgttcattagacttatataattcttgtagcatttagtacat

SEQ ID NO: 16288 - DNA, 797 bp, Homo sapiens
tttacccgtattcagcttctcacttctgtatctaaaaacactagattttatcattctactttaaagtttcttttttttttttttttttacttttcctaaaatactcaaatttccataaaggaacaagggataaagcttaagcataacttcaaaagagacataagcggggtgaacaagatccagacacaggctctcttgatgtaaacatagacctttaaccatgtgcaatctgtctattaagaaaatagaggactctaaacacaaaattaagagtatagttgtctctgtgtgactgaaaaagagtgaaagataactgcaaaattattgatactgttcttatgcttaaattgggttgtgtgcttacatgtgttcattatgttaatatgtctcataggttaggtatcttaatcaaatatgcagttatataaatacaatacactgagataagataactagcaacacrttgaaacaaaaaaacgagaataggattgaatactgtcacgatctttacaaggcctggcctttcactatgtaaatagatatcttttagtccaagaaatcacagaacttacacatttttaggaaaagaagaaaaaattcatagaataaattaattttatgtcctgtaagcaaaagtctactaaggtgaattcataatatcccataacagcaaaaaagaatgcattcagaagtcctaaatctataaacaataaaaatagttaagcacatagaatttacttaagttcaaaagcatcatgttcattagacttatataattcttgtagcatttagtacat

SEQ ID NO: 16289 - DNA, 797 bp, Homo sapiens
tttacccgtattcagcttctcacttctgtatctaaaaacactagattttatcattctactttaaagtttcttttttttttttttttttacttttcctaaaatactcaaatttccataaaggaacaagggataaagcttaagcataacttcaaaagagacataagcggggtgaacaagatccagacacaggctctcttgatgtaaacatagacctttaaccatgtgcaatctgtctattaagaaaatagaggactctaaacacaaaattaagagtatagttgtctctgtgtgactgaaaaagagtgaaagataactgcaaaattattgatactgttcttatgcttaaattgggttgtgtgcttacatgtgttcattatgttaatatgtctcataggttaggtatcttaatcaaatatgcagttatataaatacaatacactgagataagataactagcaacacattgaaacaaaaaaacragaataggattgaatactgtcacgatctttacaaggcctggcctttcactatgtaaatagatatcttttagtccaagaaatcacagaacttacacatttttaggaaaagaagaaaaaattcatagaataaattaattttatgtcctgtaagcaaaagtctactaaggtgaattcataatatcccataacagcaaaaaagaatgcattcagaagtcctaaatctataaacaataaaaatagttaagcacatagaatttacttaagttcaaaagcatcatgttcattagacttatataattcttgtagcatttagtacat

SEQ ID NO: 16290 - DNA, 797 bp, Homo sapiens
tttacccgtattcagcttctcacttctgtatctaaaaacactagattttatcattctactttaaagtttcttttttttttttttttttacttttcctaaaatactcaaatttccataaaggaacaagggataaagcttaagcataacttcaaaagagacataagcggggtgaacaagatccagacacaggctctcttgatgtaaacatagacctttaaccatgtgcaatctgtctattaagaaaatagaggactctaaacacaaaattaagagtatagttgtctctgtgtgactgaaaaagagtgaaagataactgcaaaattattgatactgttcttatgcttaaattgggttgtgtgcttacatgtgttcattatgttaatatgtctcataggttaggtatcttaatcaaatatgcagttatataaatacaatacactgagataagataactagcaacacattgaaacaaaaaaacgagaataggattgaatactgtcacgatctttacaaggcctggcctttcactatgtaaatagatatcttttagtccaagaaatcacagaacttacacatttttaggaaaagaagaaaaaattcatagaataaattaattttatgtcctgtaagcaaaagtctactaaggtgaattcataatatcccataacagcaaaaaakaatgcattcagaagtcctaaatctataaacaataaaaatagttaagcacatagaatttacttaagttcaaaagcatcatgttcattagacttatataattcttgtagcatttagtacat

SEQ ID NO: 16291 - DNA, 645 bp, Homo sapiens
tgctattgatacaaataataagagatagagtgaatgggataagctaatgattctctgtcttacaagacttatataaccttgagggccaaatatatatattcagagaacagtaacaaacatacaggtttagttactatacatgggattatacggagaaaaagcatttatatcatgtgcacaacagggagaaattaaaaatcagaagagaaaatagaaaggcagctcacttgaattaatttacttttgaagaaaatataaataggatttaaaaagtaagccttgatagaatttttaataagaaaataaaagcacattatcaacttttgaatcagaggagaggagtactgtagcccccaccaatcccttaaagaatcrtagaaaatttgctttatttattgtggctgaaagagttcaaatccaattatgaggatagtgatatagaacagaacatacttgaacagggggctgagtttactgccttaattaaagccgtagaatctgaaaacaattaaataaagaactgaggtctgttcattccagccccagtcatggatctgaggccatatatataatttgaacaaagttacctggggtggtattcaaagtttcttatcattggtaggatgtagagcagaatttacagta

SEQ ID NO: 16292 - DNA, 527 bp, Homo sapiens
cagtttggctttaaaaaaaataagaaaaagaaaatgttcacaaatcacaaggctaaagttaaaattggcttctatcacctcaaaatttaccagccaatcccagagaatggcggttggcaatacaataattaaatatttctctgaacaaagaaaagtctggaaaaataaccagtgattttttaaatgagtgtatggtaactttcgtcttatcactttgtgccctgattgtaaccagaaatgcaaaatgctgtctaaaaccgtactctccctactcctatatattttccaaattgtgcatatctatatagtcttccaaagctcttggctcaaatggcaattacttaaagctactggaattcccagatgcagcatcttcaccttcatcacactgcagcctttaaggcttagagagacacattatactcaacaggagtgaggactgctaatggtggaatgacagaatgttaaacctgagacacctaagaaactatttaatcagccgcctaaatttatatgtaarcagatca

SEQ ID NO: 16293 - DNA, 540 bp, Homo sapiens
gctctgcctccaatttctcagcgaatgaatattccatgaggcattacatttctcaacttttttcctctctgccttatacctatctttacctctctttactccttgctcttgtgtctcaaatgactaattctacccccatattcttgtctttcttccttcccataccttgttctacagatttaacatcttcctttttttctctctactagaaaacctacatactcatttctcccacatctttttttgctcttgttgcccaggctggagtgcaatggcatgatctcagctcactgcaatctccacctcccgggttcaagcaactctcctgcctcagcacccccgagtagctgggattacaggcatgcgccaccaygcatggctaatttttgtatttttagtagaaatggggtttcatcatgttggtcaggctggtctcaaacacctgatctcaggtgatccgcccgcctcagcctcccaaagtgctgggattacaagcatgagccaccatgcccagccctatttctcccacatcttaagcca

SEQ ID NO: 16294 - DNA, 582 bp, Homo sapiens
gcatgatctcaactcactgaaacctccagcttccggattcaagtgattttcctgcctcagactcccaagtagctgggaattacaggcatgcgccaccacgcctggctaatttttgtatttttagtagagacagggtttcaccatgttggccaggctgatctccaacttctgacatcaggtgatctgcctgcctcagcctcccaaagtgctgggattacaggggtgagccagcatgcccggccagaattgcagtttttaactattatctttcaatattttttgtcttatttgccatgaattattttataattcaacattgaaaataaatccttttattctaattcgtaaattttggagaattgcatatctctcttayatccataaaaaatcaaaatattatttaattgcattttacagtttcataaatgccttgaggaacatcatctcccttttgggaagttatgccaagaaatccttgcatgacattgttttataaaggaaaagactgagatatccagtactaaatgaggtattagataatgctttgagggaaagtggaattaaattcacacagatcagact

SEQ ID NO: 16295 - DNA, 432 bp, Homo sapiens
taagctgactctcccggtgccccacccatatggccgaggccacttcagatgccatctgcagggcctcctgtccacatctttgactttctatgtccttctacctggcagggtttctagccagggaagctaacatcctgaggagcccctttccatcaatgaggggaggagttggtggattgaaactcccacctcctcacccctcagtggagaattatgcggtgtgtttttttgttgttgtkttttgtttttgggacggagtctctttctgtcgccaggctggagtacagtggtgcaatctcggatcactgcaacctccacctcctgggttcatgccattctcctgcctcagcctcccgagtagctgggactacaggcgtgtgccaccacacccagctatttttgtatttttagtagagacggggtttcaccatg

SEQ ID NO: 16296 - DNA, 666 bp, Homo sapiens
tgggtgacagagtgagactccatctcaaaaaaaaaaaaaacaaaaaaaaaaacaaaacggaaatatcaacatgccattgctttcagtgatggcacaggtcctgcctttctaagatggtgagaggctcgggggcagggaggggcagaatacagcttgtaacctgatgtccataaagctttttggtcctggggtgttttttgctgagcatactgacckaatatgtgcatgactgtagggatggggcatctatgagacggaagtaaccatgagaacagctattaaacaaatgaaaacaggtcggccattcactgcagagttcaactgatgccttcccggaaatctcatttgaacccccaacttgcttttatgagtttaatcctcttcatcccctctccttagccaagtttcattcccatttgtttaattaccagttgtatgaacaagtccttccattttctcttactaggttttacattttcattcattgacacattataaaaattaaagttctttactagagagaggtgaattctgcttcagaagagtgagtttttatggggtgtcaaaatttaatgtggataagaatgcaccatggaatcaccagggtgtctggttaaaatgccgatgtggcttccatcggtctgggaggtggcctaggattttacg

SEQ ID NO: 16297 - DNA, 666 bp, Homo sapiens
tgggtgacagagtgagactccatctcaaaaaaaaaaaaaacaaaaaaaaaaacaaaacggaaatatcaacatgccattgctttcagtgatggcacaggtcctgcctttctaagatggtgagaggctcgggggcagggaggggcagaatacagcttgtaacctgatgtccataaagctttttggtcctggggtgttttttgctgagcatactgaccgaatatgtgcatgactgtagggatggggcatctatgagacggaagtaaccatgagaacagctattaaacaaatgaaaacaggtcggccattcactgcagagttcaactgatgccttcccggaaatctcatttgaacccccaacttgcttttatgagtttaatcctcttcatcccctctccttagccaagtttcattcccatttgtttaattaccagttgtatgaacaagtccttccattttctcttactaggttttacattttcattcattgacacattataaaaattaaagttctttactagagagaggtgaattctgcttcagaagagtgagtttttatggggtgtcaaaatttaatgtggataagaatgcaccatggaatcaccrgggtgtctggttaaaatgccgatgtggcttccatcggtctgggaggtggcctaggattttacg

SEQ ID NO: 16298 - DNA, 536 bp, Homo sapiens
cgagaccatcctggctaacacggtgaaaccccatctctactaaaaatacaaaaaattagctgggcgtgatggcgggcgcctgtagtcccagctactcgggaggctgaggcaggagaatggcgtgaaccygggaggcggagcttgcagtgagtgagccgagatcccgccactgcactccagcctgggcgagagcgaaactccgtctcaaataaataaataaataaataaataaataaataaataaatacctggcgcagaggtattgaatatgcataactgaaaatatacagtgtatactatcataaatacagaagaacatgtgggtcttcactgtctgttcttacagaggaatccagtagctgtctcacatcttcatgagatgtctgctaatgtggggttggaggcaatgaagaatgctgggtacaattgacataagggagttttcagaaggcaagggaaaatattctgggtataattaaggaacctggaaattaacaacttgatgtcattaaaagttgaggggaaagtggaataag

SEQ ID NO: 16299 - DNA, 536 bp, Homo sapiens
cgagaccatcctggctaacacggtgaaaccccatctctactaaaaatacaaaaaattagctgggcgtgatggcgggcgcctgtagtcccagctactcgggaggctgaggcaggagaatggcgtgaacccgggaggcggagcttgcagtgagtgagccgagatcmcgccactgcactccagcctgggcgagagcgaaactccgtctcaaataaataaataaataaataaataaataaataaataaatacctggcgcagaggtattgaatatgcataactgaaaatatacagtgtatactatcataaatacagaagaacatgtgggtcttcactgtctgttcttacagaggaatccagtagctgtctcacatcttcatgagatgtctgctaatgtggggttggaggcaatgaagaatgctgggtacaattgacataagggagttttcagaaggcaagggaaaatattctgggtataattaaggaacctggaaattaacaacttgatgtcattaaaagttgaggggaaagtggaataag

SEQ ID NO: 16300 - DNA, 536 bp, Homo sapiens
cgagaccatcctggctaacacggtgaaaccccatctctactaaaaatacaaaaaattagctgggcgtgatggcgggcgcctgtagtcccagctactcgggaggctgaggcaggagaatggcgtgaacccgggaggcggagcttgcagtgagtgagccgagatccckccactgcactccagcctgggcgagagcgaaactccgtctcaaataaataaataaataaataaataaataaataaataaatacctggcgcagaggtattgaatatgcataactgaaaatatacagtgtatactatcataaatacagaagaacatgtgggtcttcactgtctgttcttacagaggaatccagtagctgtctcacatcttcatgagatgtctgctaatgtggggttggaggcaatgaagaatgctgggtacaattgacataagggagttttcagaaggcaagggaaaatattctgggtataattaaggaacctggaaattaacaacttgatgtcattaaaagttgaggggaaagtggaataag

SEQ ID NO: 16301 - DNA, 536 bp, Homo sapiens
cgagaccatcctggctaacacggtgaaaccccatctctactaaaaatacaaaaaattagctgggcgtgatggcgggcgcctgtagtcccagctactcgggaggctgaggcaggagaatggcgtgaacccgggaggcggagcttgcagtgagtgagccgagatcccgccactgcactccagcctgggcgagagcgaaactccgtctcaaataaataaataaataaataaataaataaataaataaatacctggcgcagaggtattgaatatgcataactgaaaatatacagtgtatactatcataaatacagaagaacatgtgggtcttcactgtctgttcttacagaggaatccagtagctgtctcacatcttcatgagatgtctgctaatgtggggttggaggcaatgaagaatgctgggtacaattgacataagggagttttcagaaggcaagggaaaayattctgggtataattaaggaacctggaaattaacaacttgatgtcattaaaagttgaggggaaagtggaataag

SEQ ID NO: 16302 - DNA, 531 bp, Homo sapiens
gtaagaaatttctagctatttttacaactgcctgtaatctttgctcatttttttctcttaggttgatggtctctttcatctcaatttattattatctttatatatattaaagagattaaccctttgttatatttgtcaaagaattttcccaaattttttgtctyttgatctttatgatattttagtttctttatacaaatttaatagtagtatatattcaaatttatcaatctttttctgtacaaccttggttatgtgtctggttgtagcttctggtcaaaagttattcttatttcaagattattataacaaatatatttgctaattgtttaaatctttatcaggaattaatttgatataaggaatgcagtagtaattcaagtttattatttctctctaaatgactagttggttacctcactgacaattattatataacccgtggttttcttactgatttgaaataccacctttataatgtaataagtttctgcaagcatcagaaccttcttttaaagtattttttctgtt

SEQ ID NO: 16303 - DNA, 1125 bp, Homo sapiens
tatgttcccttttatcctttatcataacactatgaactatgtaagtataggaacttgttcatcattgcatcctatttttagcaataatgctgtttaatttgaacaataaatgaactaattattggaacttaatttctcccacctccacattcttttgcatttgaactagaaggaatctctagtttaatcctggcgggtgcttttggtggctgaaaaaacattctctgagtctgtctatgatttcaggccaaaagtggtagacagttcttacttccattgacaaagtcctacctaaacataatgtgtttgcatttctactttttggaccctacagtttctctaaagtcttaaaaatgatcagctcatgtaaaagcacatcatggaaataagggagagttaactcccatcagagcaactaacaatttaaacagtaagaatcttcagttaataactcgacttccaacctgttccacagacaatttctggcaggctttctgtaagcttctctgaagtcctggagtaatattgcttaattctaaatcagtgccttttataaaataccctgatattggctttstctccattgtatttcacatcccatgctttttcactcttgttctttagaaacaaatccaaataacctgtactcaattccttgcttcaaactgagaccttcagaaactataaaaatctattgatcactagatttctagattcattcaggtttttcctccaaagacaacttttcctcactcctctctgaacttgaatcattagcctgctttctacttttagattgctatgacatatagcatgacaagatgtaatactaatatagcaatgatagattccatttctgtgtctattcttcccagtctttctgcagttcctctactaattttaagtttacacaatgactacctcttcatactcaatctccttgtaatgctgtaggtctcaacttactcattataccatagcccttattctagatactgagatgaaatacctagagaccaaggaaaggttgagttggaattgctttgaattgcaatgaatcttaattcagaagcatattattattgttatttaaaaacatctcttacctattaatttatctttatg

SEQ ID NO: 16304 - DNA, 516 bp, Homo sapiens
tgccatttttaattgtggtaaaatatacatagcatgaaacacaccatttagccacttttgagtgtacagtttgatggcattaagtatattcacattgctgtgcaaccatcaccgccatgcatctccaggacttttcatcttcccaaacagaaactttgtacccattaaacaataattctccactactgaatttatcagttttttctttagaacttttgaggtttatatcatacatagaaaagctttctcctttctcaggttttaaaaaatctgtcccttttgtcrttatgtcttagccctggctgcattccaatcaacaggaactttaaaaaaataccaatttctactatgcagccataaaaaaagaatgagtttatgccctttgcagggatatggatgaagttggaagccatcatcctcagcaaactaacacaggcaaagaaaaccaaacacctcatgttctcactcataggtgggagttgaacaatgagaacacatggacacagggaggggaac

SEQ ID NO: 16305 - DNA, 1016 bp, Homo sapiens
gtttcttctgtctttttttttttttatgagatgatgtctcactgtgttactcaggcttgtctcgaaccccagggctcaagtggttgtcccacctcatcctcccaaagtgctgggattacagatatgagccaccatgacaagctggaaaatgtcttaaaaaaaaaagataaaatatataaggacttctaggatcctctctagtcataatatgctatctgttatataggaattttgatcatttagtatatcttgttgatatggtttggttgtgtccccacccaaatctcatcttgcattgtagctcccataattcctgtaggtcatgggaagggcctggtgggagacaaatgaatcacggcggcaggtctttccaaagctgttctcatgatagtgaataagtctcatgagatctgatggttttataaatgggagttcccctacacaagctctcttgcctgccaccatgtaagatgtgactttacttctcctttgccatttgccatgatttgtgaagcctccccagccatatggaactgtgagtccattaaacctctttcctttataaattacccagtcttgggaatgtctttattagcagtataagaacagactaatacacctgttaaatggtatgaaaagtgtatgktggctcttaaccactgtgaattgactttcctagtatttttagtttttacttttaattatccaatgtatctttatatctaaattctaaggataattgttaaatttctaccaccatctattttaggtagaactgacttgaaactaagcaaaacaaaaaattatacacagaacttttcctcaatagattgttttaattagtactaatttttgtttgtttgttcgagatgcagtctcgctgtgtcacccaggctggagtgcggtggcgtgatctcagctcactgctagcatgatcttggctcactgcaacctccacctcccaggttcaagtgattcttctgcttcagcctcccaagtagctgggactacaggca

SEQ ID NO: 16306 - DNA, 510 bp, Homo sapiens
gctcaggctggtctcaaactcctgggctcaagcaatcctcccaccttggcctcccaaatagctgggattacaggcgtgagtcaccatgcccagccaagttggaacagttctaatctatcatggagagttgctgtgagagaaagggaagtattaggctgagagatttcagcttagttcatgagtcactggcttcatcttgtgaacsctgaaattctctagccgtcactccctccatggtcacgttgatgcctgtcaatcagaccaccaggaacacgcctgcagtcaacaaatttgggtttattatgcttgctgtggcaagggaggccacacagcacggggaagccagggcatctccaaaagcagtgttagtgctggtatcggatttggagaaagatttaaggaagtgtgggtttgctctggatgtgtgctgtcagaaagcggggtgattgtatggttcagtgactcgatccctttatatctacagctgtgattgggggcgacgcagcagca

SEQ ID NO: 16307 - DNA, 620 bp, Homo sapiens
aaaggtaatgtatttttgactatggagaatgcagtcaaaactgacagtggcctctatttttgcatcattgagcacaagcagtgattgaatgacataaaaagcaccctataattggatattaaaccagctgggataccagtgttctaacatcacctgggctctctacctctggtcaaatgtaccttagagtcacaagccagtagttacttcgttaatacagccagctaaacccacctgaagacagtgtagaaaagaaaaggacacaacccaccatctccctactgcactcttacccaacagatggaaatggaactatgacagtcttcaaatgtcccttggaatagtaatcaaactcaagtgtccttgactcaaaacatttgtagatgatcaccactgagaacttttatgttgaagtcagtaaatctgctgtggtgctgctcatttttttggttgtcatgactaccaaaaagtatgtatacaccagacaacctctagcaactaaatatagtttcwctgactagtccttaaattggagctttacaaagtgcagctgaagggcatgtctccgcagaagacaatacctacattagaggagaagctttacttcatagattaagatc

SEQ ID NO: 16308 - DNA, 510 bp, Homo sapiens
ataaaaagtgtggtatggccattttaagattgctcatagaaaaaaaaaaaagagtgaaaggatataactaaaatgtcaattaggttatccctcaatgtggagtcgtaaacaccttttgcacttttctatatttttcaaaatgcctgcactgagcacaaatcatttttatagtcataaagcactaaagagtatttttaaaaatataagtagatccttaagagaaaatcatttttaaaggcacactgatgaaactggggcatggggcatgaataagatccattaagagaagaagggkccctctggagagaaaagtcagtttgttcaaaactaacttaaaaataattagtttccctccaccaaatttaaatatacttattaacacaaagacaaaataaacattcactaactacatgaaacaacttttcagaacttaaaaggagacattagatggatcacataaagtgcttatgtagtttgatatcctagcaacaatactctcaaatattctat

SEQ ID NO: 16309 - DNA, 530 bp, Homo sapiens
acttggacttcattctttctaaagtcctggcacgctgcaccagcatatgctcagttatgctgtgggaaagagcagttctcaaacttcagtggcttgaaaaataaaggttcataccttaatcacacacatgtccattgatggacagctgggagtttcctctgtttcttcatcattactcaagatacatggtggtgaaacatccactatctagaacattctcaatccctgtggcagagggaaaggagtatcttgtagcaggaaataattgctatgtcaggaaatacttgcagccccaattcattggccagaggtagtcacatgacattaccaggactcctggaagtgcartcctactatgtgcctggagtctggagacctgcaaatatttggttagcatcattaacagctagcacacagaactttttttttaaagacactatccactatccttttttagaaataaacttattttggaatagttttggatttacagaaaagttataaagaatgtatgacaattttttaaaaat

SEQ ID NO: 16310 - DNA, 732 bp, Homo sapiens
attacaggtgtgagccactggtcctggccaggatacagtcttaatctcattatccttctgacacttctggggactcaatctgctcaagccatagtcgattcaactgtgaccccacatccttggaatctcagcccttgccccagaaggaaagcctctactcagagtccttttctcctcatactgtccagggcttctcccgtcctcctttactctgctgttccttctcctaaaagttctgttctgtcctgaaagaggacaaggatgcttggtccttgatcttaatcttctctgtgaatgttcttttcaccatctgctcagtagaaacctgttagagatctgtgcttagcgttttgctgctacaaacccagtttcttacctccaattttgaaataaagaaatgcattgagagctgaaagtttttcctgtcccatttggtaacaaaaacttaagttgatgtgcaggtatttgttatacttgctgttaatatccatatatttctttgtagaaatatgtgtgtttcattatggagtgctttccaggtgttatgtattgactgtatgtgttccattattaacttctctaaaatctgaaaaattctgaatccagaaacacatctggctccaaggttttggataagggactgcaggcctgtttttcttttttwttattattattattatactttaagttttagggtacatgtgcacaatgtgtaggttagttacatatgta

SEQ ID NO: 16311 - DNA, 251 bp, Homo sapiens
agggaactaactatttatctcccagaacgtgagggccatgattgcacygaaggtgaatcacacatttgattccatgaatctagcaatggactgaaaacaaagtgggaaacatggcccattctgtgatttagagtccaggagacaaaaatacaccagatactcaagagaaacagtgacattgcagctgagacgagagagaaatgcctctcaggagttcataaacagaacaacaacataatataatggacagc

SEQ ID NO: 16312 - DNA, 259 bp, Homo sapiens
aatataatccttatatttatccttataaataatcatggcttgaattcttcctttagctacagttgrggtctgagagtgttaagaaaataattggaatgatcttgtacaaatcactaatattacaaaaaatttacagccaaagggaagggtcagtaatgatatatcattacatctactggaatggctacagttagaaagtgtaataacaccaggtctgaagtgactggaactttcatacagtgctggtgggaatatagga

SEQ ID NO: 16313 - DNA, 527 bp, Homo sapiens
ttgtgaaaattaattattcaaagagttatgccaattcttactgaataactaaaatttagtttcaagcaagtgttcagatcccattttatttcctttaatggaaaaacccatttgttcctctctcccaagtgcctgtctgataaaaatagcaaataacttctacatttttctctcactagactgtttgaataataataataaaagctaccctttattgactgtctactttatgccagaacctatgttaggcaatttrtatatctctaactcacacagtaaacttgcaaggtattaacatgacaattttacagctgaggaaaaattgaggctcagagaggttaaagattcacaaaaaataaatgatgtgatcaaagctgaaatatatttgacttaagtctagtctgcctttatagaaatatatacagacacaaccagtcaaaatagggctcaaacaaataaatatataaaaataagagtctcttttgcatagcataccaggtgtcttggggcaaataaaagaccgaggg

SEQ ID NO: 16314 - DNA, 636 bp, Homo sapiens
atgaacagaataagtgcttccaggaacttggtatgtctgtacatatgaattcctttgtgactttccattcatttatctaaattcaggaatagagattctgcaaggtggtatattgggagattctagtccttataccttcatagaaacatcaatttttacagtcatccatggatgtaaataactctgtgcccacatgacttatgagataacatcaaayaaaacaacatgagcaatatgaccgtgccagaaaggacagggaaagagaaaggggaggaagacttactttaaaaaatagtgacagaaaacttctcaagtctgggagacaaattaacattcataactttgatatccatagaaccaaaaatagactgaacaagagatattcaccaagacacattgcagccaacggagaaactcataagactattgaaatgggaggagttttctcttacccatcccagggggcatgcgatgggggtgtggctcacttcttcagtgccccacagctcaaacccctatgggcaagtcatggggagcgtgggctctgaccccacagcagcgtctagggttgagtgtttatagctcctgaagccccagagggtgtgttttgcactgtgctctttcagcttagccatc

SEQ ID NO: 16315 - DNA, 654 bp, Homo sapiens
ttttggtttggagctctggttctcattaacttggctgaagcttttgatgatatgttggaactgcttaaacaccagctcacaygcctgctctcaggtgttcctaaacccgctgctttccctggggaccgcaggcctgcggcgtcctgacagccccacactgtagcctggtgttcccctcgctccatccgtgacttttttgaaagggagctgaatggtttaatgtgatgttttggtaatctctgccactctgctgaagtgcacagggcaggaatgacagtacttgggggtctggttctgccttcaaacacttgcaaaaatcctctggtatccatgatctctcacctctcctcctgtcatgcctctgtggccaggaacttactgtcactggagttcattgtacgtgagtattaaagaaaaaactttggctgaggctgaagagtctttcaagcctgataggggtgtattcagtattattagaccaagccaaatgtaatctctataactactgttaaacctaggatgtgtggaacaaaaaagacattccagaggcctgtcaaattacatgtctactttaaggcattccttttgtctgtgatgttccaagtacattaagagcatttccagccaggcgcagtggctcacacctgtaatccc

SEQ ID NO: 16316 - DNA, 538 bp, Homo sapiens
ggggctagtgtccacgtgtcccatattctcaccctgagccccctgagggctggcccaagccccacacaatcattcaagtggaatttragcccctcttacatggcctcactgcatctagcccagaaaccgcaagctcagaaggtaggtaggtaatgtcagggaggcaggtgggcaagtgtgaggcagtggggcgtggtggagactgtggtaaagtggatggagcagctgctaatcagctccagccactgtggccaggcagggacatagccccatatggccacatcttctgatctttcaagagaagccagaaatccttatctttatataaaatgaaattgcctggtttaaaaacaccagcaactaaataaaagttgtttaatcaccgcaaaagtcaacaatcccccaccccctgcagccttaggaaggcagtttgtgatggatctcccataacccagcacacagcaggctataaatatctgaggaccagttgaatacattagacccattccaagtcttagggaagtctcatctctccact

SEQ ID NO: 16317 - DNA, 600 bp, Homo sapiens
agagatggaaaaaggatcctgatttcagaaatcaaattaagatcaggcatataacaaaaacaatgaaagaaatcaaataaccatgtgattttactttgcaattgctacataattatttattagtgtcattaacattcacgaagataaatttctccattttaaacagagacactcagtgagcagtaacctgattttttttggaatttcattctttaggagggctttcttctgtgtttttgtgaagttgcccataagagttatgtcattacatataaccaaggaaaccacaggaaacttggttgctaggaaacccctgaattgtcttgatgaagatcaccgcagtaggcttggcttgaatagaacagatgctaggaaaataaaattaygaagttacggtcacttttttttaaacctagggtgtctcgttaattggcagttaaatcttttcacctaaagaaactagaaaaactgtttgtcatgtctgaaaggccatcacataggtggaacaggggccacaacagggtgctgtcaagggcactgtgatagtgtgtgagactccactccaatgaacacattttttcttttcccaattaatttggc

SEQ ID NO: 16318 - DNA, 570 bp, Homo sapiens
gacctgttgttatatgagaaataaactcctatctcatctgaggaataaaatgtaaccattttagggctggacatagtggctcacgcctgtaatcccagcactttgggaggtggaggcgggtggatcacttgaggtcaggagttcaagaccagcatggccaacatggtgaaaccccacctctactaaaaatacaaaaattagcagggcgtggtggcagatgcctgtaatcccagctacacgggaggctgaggcaggagaatcacttgaaactggaaggcgaaggttgcagtgagctgagatcatgccactgcactccagcctgggtgacagagtgagactgtcccacaccctccccccacctgccaaaaaaaaaaagaaaaagaaaaataagccattttaaagtgaacaattcagtggctatgttaaggtcatttggattaccgtgaaaacataactgctttatgtgtctctctctttttycttttataaacaagtctctcctttaaaaaaattctgttgggatcacagaaattagatctggactgacatctcaatttcatctgagtcctg

SEQ ID NO: 16319 - DNA, 1142 bp, Homo sapiens
attacagtggagcgtgatttctaatacagtcttccttccaaaaactgtgtgcagctttaattacctggtcaccagggtggcctagtaaatttaagtgtgtatgtgcttggtattggtctctggtgggcaaagtacaagctgaagtcccgagaagaaggtaaacatttcaaatacacaggaatctaaagaactcggagtagaaaaactcgtacgtgccgggaactcccacaggctcctatgctgggtggagtctccagtactttccaggcccctagccaagtgttaccagttggcttgtagagtcaactctatctgctgcaaagagagcttcaccccggctcccccacagcacagagccccagtgggctcacctccggctggcctgccagggggccgcctcaccaagaaagatgaccccgcggtcgggggctggcaggactcaaactctgggccaatgttgcgactctgacacaaggctctgcaagtaaccaggccactggcctcctcctcccaactcaaacatcaatttctaccaaaatatcccagaaagggatggcagcactttcagaaatggattccttcaggcctgagtcacttccacgctatattttcaatgtgctgacttatttgtttcatgggcctgggtttatgggggctccaccatatcgtttaccaggaaagygcctgccagttgcaccaataacccttcccagtggaaaaattccatcgtatggcaaagacaccagcagagcagctcagcagacgggctgacagcgacagtggttcctgtgttcttccagaaggcccttgccaccatccaagagacaggcagggacagggagtcccaccaccacagggaccacccagcctccacgggctcctctgctgcccctccagggtgctttagaactcagcttggaaagcaacgcccagcacaactaaaggactgtaaccctgcctcataactcacagaaattctggccttggtgagatgatctgtttcttatacaggggacagtacccaaagagatagacatacaccaccaacccctgtgtacaatgtgctgggcttacaggtgtgagcccccaggcctggcctgtacctgtgcttgttttcagaattctttctccatgtgtatctg

SEQ ID NO: 16320 - DNA, 1142 bp, Homo sapiens
attacagtggagcgtgatttctaatacagtcttccttccaaaaactgtgtgcagctttaattacctggtcaccagggtggcctagtaaatttaagtgtgtatgtgcttggtattggtctctggtgggcaaagtacaagctgaagtcccgagaagaaggtaaacatttcaaatacacaggaatctaaagaactcggagtagaaaaactcgtacgtgccgggaactcccacaggctcctatgctgggtggagtctccagtactttccaggcccctagccaagtgttaccagttggcttgtagagtcaactctatctgctgcaaagagagcttcaccccggctcccccacagcacagagccccagtgggctcacctccggctggcctgccagggggccgcctcaccaagaaagatgaccccgcggtcgggggctggcaggactcaaactctgggccaatgttgcgactctgacacaaggctctgcaagtaaccaggccactggcctcctcctcccaactcaaacatcaatttctaccaaaatatcccagaaagggatggcagcactttcagaaatggattccttcaggcctgagtcacttccacgctatattttcaatgtgctgacttatttgtttcatgggcctgggtttatgggggctccaccatatcgtttaccaggaaagtgcctgccagttgcaccaataacccttcccagtggaaaaattccatcgtatggcaaagacaccagcagagcagctcagcagacgggctgacagcgacagtggttcctgtgttcttccagaaggcccttgccaccatccaagagacaggcagggacagggagtcccaccaccacagggaccacccagcctccacgggctcctctgctgcccctccagggtgctttagaactcagcttggaaagcaacgcccagcacaactaaaggactgtaaccctgcctcataactcacagaaattctggccttggtgagatgatctgtttcttatacaggggacagtacccaaagagatagacatacaccaccaacccctgtgwacaatgtgctgggcttacaggtgtgagcccccaggcctggcctgtacctgtgcttgttttcagaattctttctccatgtgtatctg

SEQ ID NO: 16321 - DNA, 582 bp, Homo sapiens
agcttgcagtgagctgagatcgtgccactgcactccagcctgggcgacagagtgagactccatctcaaaacaaaaaacaaaaaacaaaaaacaaaacagttatagctgctaaaaccttatgcagaaagtccacgaaatttgaaaatatacatcatataaacgtaagcaaggctgaaaacacgtgaatcccagttagctcaccctgcattcctgcccatgcagctcgtgacccagctacagccttgggtctgtactctccctgcagtcagaggatggggacaggtggcacactgctggcctgagcacaacaggagtccgtttgcttggggacatttcttggaaataaagtaagtataagggygtactcaggaacactgcattttatctgggactcggctttgttgcccagcccagcacagggaaagaggagttttaaagtgtttcagaggaagaaagagaaaaccttgttggcctcaggggagtgaggtatagcacactcattcagcttcatttactgagtacctacctagtatacacagcagggcatgttcacccctttttttgcataacaacatacaccca

SEQ ID NO: 16322 - DNA, 557 bp, Homo sapiens
tccgcatgattccatacatatgaaatggccagacagaaagtgaatgstgagctggggcaggagtgggcatgaagaataactgcaaatggatgcaggaggtgttctgggggtgatggaaatgttccaaaattggattgtggttatggatgcacaactctgtaaatttcctaaaaatgtacaaaaccgcactgtacacttaaagctggggaatcttatatgtaaatcagatctcaataaagcagctgaaaaaagaacaaaacaaccactagaggcagggagtgctgggctgtgcaggagggcagtccatggctttatgctctgccctcaagagcacatggtaagaccctgtagcaggaacagaggaagctggaggcctctcggcatcacctggacaaacagccctcggcagagaggctcaacagataacctgagagcggcagggtcagcgaggtcagttccagtctacacgggaggcaggaagagcgccagccctgaaaatgcattcctgaggctcaggctgcactgccaggctcgctttaaagccaggccaaaggaaa

SEQ ID NO: 16323 - DNA, 673 bp, Homo sapiens
gcaagcaagaccctgcttcagaaaaacaaaaagaaaagaaaaacaaaggtattttgtattaaggtatttcctgaatggttctgccttgaagtgctttctaagcaggttattagatttgcagtaatatatgtattttacgtcagctgtagggaaaaccggtagcacccccacctggccacgctgtggtcctgtcccgctctctttgtgtctgggcagatgatgtggatggcagccagagagactgctsaggttctggatgttagggccttgattcctgcaaaaagaaaaagcacaaacaaaaccaaaacagaatacttgcaggggttgctctcacgggaataagaggtggtttctgaaatggttggcgcctattaagcacccagtgatccagtggcatgaaccccaggggacagccgagggcgagtggtctcggaagcgtgccatgtgcaggacacagcagagctgggagtgtcagccgggagggaagctgcttggagggaggctgagatggctcacttcaggtgtctgagggatgccatgtggcagagaacttgcacatccttgaggtggttctggacagaggactctctgtgctggaggctgcagtgtaaggcagagctgccaaacagccagcaccgcgtgacacaggctgactggggacatggtgcatttt

SEQ ID NO: 16324 - DNA, 568 bp, Homo sapiens
gaaatggatgaggcggagcagacctggccttggaatctggccccgcgcttaagcgaggatggtcttcgtggcctttctgagcttggcttcctctgagtggcgggaagcctcattggtcatttttcagagccccttggtccactcctcggcactaagacacttgagaaaggctcctctcttcactcagcatgctatggggttacttaagtttatttcttaattgaattttctcattaaaacctgctttcccagatctgtttggcagcaggacagtttcgaggtggtagaagagaggcccagcttcctctgtatttcctttccctgactttctggaggcattatcgaagyacgctaagccgcacgtagctgaagtgcacaactggatggcttgtgtttgtttcagtgataacacacaacatctgcctccctgctctccccagcctcccgtctctgatcgcgcactccctagttttccagcctcttcttaagcagcgattccagctggcagcgccgtgacaagtgtttccgtaagcattcccacgatcctctaagtgaggagcatgacctc

SEQ ID NO: 16325 - DNA, 645 bp, Homo sapiens
tcagttatttactagctatatgattgtgagcaagttatttaacttctctgaccttagtctcatcagttaaagaggggtaacaatacctacaccataagggttgctgtgtggattacataagatgatatacacacctggcacattgcaggtgctcaataaatgttaatgctgtgccccttatccatttgtagagaatcaatagtaacacaggcaataattatcataccctatgatcaatgctataatgctaaggaagtgtagataatagaggaacttgttttattgagcagagaagaaggaaagggaaaacttcaaacagagaatgagcaggagctggctaggaggatcttccaagggaatagtgtggaccaacacgtggctgtcctggctccaagtcttcctttttgtctacttccagatgaggtggcatctagggcctgaagtgagccatctcttccttctgtgacagatgactgatgttttcatttctttgccatactatakaaagtgcctcctctctcaaccagaaatatgaactaatccaatttgcagatgagttaatgctgggacctgaaatgcactgaattctgaagttctgattccaagaagaatgtcaaatgagtctcactctcaatgcatgtgaca

SEQ ID NO: 16326 - DNA, 624 bp, Homo sapiens
tttcccaggtatccaatgagcattttcaatgagtagactgaagtctttttaaaatttttagaatatttgtttatattattgttttaaatattagtactcttaagtttttctcagagactgcaatattatgaacaatttttcttctttgtttcctatttccagtactttcatgctttccatttttacttatttctttatatcattctcttaattcttaattgttttcctgcttttctctgatgcctcttactaaatttacttttgcaactattttcctctgggaattttacaattatttgtttatttattttgagatgagttttgctcttgttgcccaggctggagtgcaacggagtgatctcagctcactgcaacctctgcctcccgggttcaagcaattctcctgactcagcctcccgtgtagctgggattacaggcatgtgccaccatgcccggctaattttgtatttttagtagagatggcgttcctccatgttggtcaggctggtctcgaactcccgatctcaagygatctgctttccttggcctcccaaaatgctgtgattacagatgtgagccgctgtgcctagcctacaattcactttttatattgagatttttttt

SEQ ID NO: 16327 - DNA, 555 bp, Homo sapiens
tacacccctatggaataattgctacagcctccattttaagacaggtgattgagattcagagatgaattgtctaagacacagacctgagtggcaaagctgcgattagagactttttccttctaaactctctcttaagcttccttcccacagggacctgttccaaacctcagggaaataatggcccttcacccctgaagatggcatttgccggtctttgtgcctaaacacaggcctggctctagtctggcccctttcctactgaattgagaccttggtgaacaccattgtgcagccatatgccctgatcggattaccctaagcctcctctcttacatcctcagcccccaaatctgtttcccctgtttggctttggcacctagctgaactgatcattaaaatcgggtgatttctgttcacagtggctgcagagactgaggctgacagactgatcactctctccaagaagagtaagcagaggggaatttggaaaargacagcctggaatccagtggagaaatatttcaaatatctaaaaatctgtgctcagtcctgtga

SEQ ID NO: 16328 - DNA, 527 bp, Homo sapiens
aaaggggatggaaacccagagtgtctcaatgcaggatgaaatactagtgttaagggataaaataaaaagtgagataagtgaaaggcagctgaaagctcaacacamggaccctgcccattgtggttctgtgctttcttgatgggtgttctcttcctctcctcaagagtccccaaatcgtatggaagcagaagccatgatggtagcaatattcttgctctgcatggtctttctgttttgataccagattctttatggcagctggggctcagaagcaaatcatggttagggaaacagtctggcagggagaaggcaggttgtcagcctacaatctcagtgaaaaactaatgtgcttatcaggagccaaactggaaatggaggcagatgcaatggtgattaggtgtctagaggtcttgtagggacaaaaggctcaccccagacttgttgaattgcatgactatgatagtgttgaagaaaaagtgagtcagtgattcttgttaaagcgtggtgataagagtttactcaagacc

SEQ ID NO: 16329 - DNA, 557 bp, Homo sapiens
ggcttcttgaacctttgctcttcctctcaaatcccgatttctgactctctgcattgagtaaatgtcacacattttacttgtctcaactttaccattgttttacacaggcttttgctgaccctatacaggtgtcatttcatatagtcccayaactttaaatattcatcaaccacatttcattgagattaatttatacataggtttgttcactttggtttccccggcacttaaccctgcatccagaaacgagtaggcttgaagtaaatataggtttgtggatgaataaataaatgccattggagaaaataaaaactgagaaggcaccctaaatgtggactcctgctctgagggagaaattagattaagagatgaaaattgtgcttaataatttttctgtgccctggaaatatactgaatattatttatttgggggaccattttcctcactaggttgtgggctccatgaggagagggaccccatgttatttatgtcatatacccactgaatagaaacatatttggcccagggattgatcatacttttttttccccgggca

SEQ ID NO: 16330 - DNA, 557 bp, Homo sapiens
ggcttcttgaacctttgctcttcctctcaaatcccgatttctgactctctgcattgagtaaatgtcacacattttacttgtctcaactttaccattgttttacacaggcttttgctgaccctatacaggtgtcatttcatatagtcccataactttaaatattcatcaaccacatttcattgagattaatttatacataggtttgttcactttggtttccccggcacttaaccctgcatccagaaacgagtaggcttgaagtaaatataggtttgtggatgaataaataaatgccattggagaaaataaaaactgagaaggcaccctaaatgtggactcctgctctgagggagaaattagattaagagatgaaaattgtgcttaataatttttctgtgccctggaaatatactgaatattatttatttgggggaccattttcctcactaggttgtgggctccwtgaggagagggaccccatgttatttatgtcatatacccactgaatagaaacatatttggcccagggattgatcatacttttttttccccgggca

SEQ ID NO: 16331 - DNA, 557 bp, Homo sapiens
ggcttcttgaacctttgctcttcctctcaaatcccgatttctgactctctgcattgagtaaatgtcacacattttacttgtctcaactttaccattgttttacacaggcttttgctgaccctatacaggtgtcatttcatatagtcccataactttaaatattcatcaaccacatttcattgagattaatttatacataggtttgttcactttggtttccccggcacttaaccctgcatccagaaacgagtaggcttgaagtaaatataggtttgtggatgaataaataaatgccattggagaaaataaaaactgagaaggcaccctaaatgtggactcctgctctgagggagaaattagattaagagatgaaaattgtgcttaataatttttctgtgccctggaaatatactgaatattatttatttgggggaccattttcctcactaggttgtgggctccatgaggagagggaccccatgttatttatgtcatatacccactgaayagaaacatatttggcccagggattgatcatacttttttttccccgggca

SEQ ID NO: 16332 - DNA, 557 bp, Homo sapiens
ggcttcttgaacctttgctcttcctctcaaatcccgatttctgactctctgcattgagtaaatgtcacacattttacttgtctcaactttaccattgttttacacaggcttttgctgaccctatacaggtgtcatttcatatagtcccataactttaaatattcatcaaccacatttcattgagattaatttatacataggtttgttcactttggtttccccggcacttaaccctgcatccagaaacgagtaggcttgaagtaaatataggtttgtggatgaataaataaatgccattggagaaaataaaaactgagaaggcaccctaaatgtggactcctgctctgagggagaaattagattaagagatgaaaattgtgcttaataatttttctgtgccctggaaatatactgaatattatttatttgggggaccattttcctcactaggttgtgggctccatgaggagagggaccccatgttatttatgtcatatacccactgaatagaaacatatttggcccrgggattgatcatacttttttttccccgggca

SEQ ID NO: 16333 - DNA, 577 bp, Homo sapiens
gtgaactgaagatttaaacaaactggtgaggctgaatgactattatagagccactgactgtgaacaactttgtgtagactattagccaaggggttgaggtttctggctctgggtctctgtagtgaaacagacctggacttactttccagtccagtcacttactgttacctcatatgtatattaccaatagtatctacctcagagagtgcttttcattatttttttaaatgaacattaaatgcataacttatgttctgatacataactaacactcaatagatattaccatgcttattaattatgaattgttactattagttaatcaaaggggcctcaactcatatttgcaataaaaccaaatttagtaattagcaatgctcattagtttgattgtctttataattttatgtttgaatttcaaatacttctatatatttacccacatagtttrcatgaattcaatattttttaaacacaatatatttagtcaaattccaccgacactccgatatgataatgagaaacctgaaaatgatgtcagctatgatgttagcaggtgctaaggtgatttagaatg

SEQ ID NO: 16334 - DNA, 583 bp, Homo sapiens
gtattcatgcatttcatccaggagcattctttctaatcaatgttattgtagcaaaagatgatgaattatgaagatgacagaactatagttcttaaaaaaaaaggccctaagaaaaattcaagttagggtttccataggtcaacattaattatattaacatcattttgaaaacttcctcaattaatgctttccactataatttagggatttagtttttagctacatctgcaggaattataatacaaatcaactggggaaattaagaaagaacaaaaccacattttatcccttattcctgaaagctggtaaggcttttatgttatgtccacatgaaaccagacaactgawcaattttgtcgattccttccaattgattaattttgtgaaaagaaaaggtgggaagcccaagtctaggtcaggcaaatgggctgtgagtcccagctctgcctttcaagggagaggcctggctgtcccagaccctgtggaaagagaggccgctgtacgctctccacagccctggactcagctcatttctcctactctcacctcagcttcctcacagctgaccttcatttcatttcct

SEQ ID NO: 16335 - DNA, 530 bp, Homo sapiens
ggtgcatgcctgtagtcccagctatgaggggggctgaggcaggaggatcgcttgaacctgggagacagagsttgcagtgagctgagatcatgccactgcactccagcctgggcaacatagcaagactacgtctcagaaaaaaaaaaaaacatttagaaacaagaagtcttgtgtgaaattaaacctatgtcactgataagtgtgagatacaaaagattattcatacaccaaaggaacttagaaaatacagtgcactgttcctatgggaagattgcctagacacccagtgcatgcagacaatgcgaggtcagcttccatccttcctcaactcagaaaaatcaggtcagcaaattagcaagtgccaattttacactaaattaccagaaattacctctggctaatttcttcttttgcttcagggtggggagaaagagaagaaaataataacaaaatcacccttggcagccaagtacagagctgaaaggaataatccactagaactgttctttgactttctattgtctgatgtt

SEQ ID NO: 16336 - DNA, 530 bp, Homo sapiens
ggtgcatgcctgtagtcccagctatgaggggggctgaggcaggaggatcgcttgaacctgggagacagaggttgcagtgagctgagatcatgccactgcactccagcctgggcaacatagcaagactacrtctcagaaaaaaaaaaaaacatttagaaacaagaagtcttgtgtgaaattaaacctatgtcactgataagtgtgagatacaaaagattattcatacaccaaaggaacttagaaaatacagtgcactgttcctatgggaagattgcctagacacccagtgcatgcagacaatgcgaggtcagcttccatccttcctcaactcagaaaaatcaggtcagcaaattagcaagtgccaattttacactaaattaccagaaattacctctggctaatttcttcttttgcttcagggtggggagaaagagaagaaaataataacaaaatcacccttggcagccaagtacagagctgaaaggaataatccactagaactgttctttgactttctattgtctgatgtt

SEQ ID NO: 16337 - DNA, 530 bp, Homo sapiens
ggtgcatgcctgtagtcccagctatgaggggggctgaggcaggaggatcgcttgaacctgggagacagaggttgcagtgagctgagatcatgccactgcactccagcctgggcaacatagcaagactacgtctcagaaaaaaaaaaaaacatttagaaacaagaagtcttgtgtgaaattaaacctatgtcactgatargtgtgagatacaaaagattattcatacaccaaaggaacttagaaaatacagtgcactgttcctatgggaagattgcctagacacccagtgcatgcagacaatgcgaggtcagcttccatccttcctcaactcagaaaaatcaggtcagcaaattagcaagtgccaattttacactaaattaccagaaattacctctggctaatttcttcttttgcttcagggtggggagaaagagaagaaaataataacaaaatcacccttggcagccaagtacagagctgaaaggaataatccactagaactgttctttgactttctattgtctgatgtt

SEQ ID NO: 16338 - DNA, 454 bp, Homo sapiens
ttcctagctgtgttaaacctcaaagaagttacttaacccctgagattcttgtttccctccacagtaagcatgagggaaacataatttctgtcctgtttatttcttggggttgtcaaaaggctcaattgagaacatacttctattataattctgcataaaagagcaatataattagtgatcatgggaattaactgattatcaatgatggtgatttctcctagtagatgtttaggctgattcattagtttatccttatatatatctccatgcacatacgaataaatgaatatctatctatatatacacacacatacatatatatatgtatatacctttccttcaggaaaggtttggtctagcaatgtcaccaagttaytggttttgtgttgacatctcagcctccaggaaatttcagagattgtgtgttacatcatattacatcaatattacagcc

SEQ ID NO: 16339 - DNA, 552 bp, Homo sapiens
ttgtatatgtatacattccaccttttctttatttcttcattcatcagtggacacttaggttgttttcatgtcttggctattgtgaataatgccktaatgaacagggagtgtggatatcaattcgaaatactgatttcaatttatttggataaacactcagaagtagaattgctgatcatatgggaattctatttttagttttatgggcaacctccacattgtttttcataatggccacaccaatttacaatcccaccaacagtgtacaagagttccattttctccacaccctcaatgaacacttatcatttgactttctgataatagtcattttaacaggtgtgaggagctatgtcattatggttttgacttgcatttccccagtgattagtgatgttaagcaccttcgtatatgccattggtttattcccaagtcagacagtatcctcgtccttgatattttgaggaatacagtcttctcttcctttttgcagattctatgggacaaaggatgtggggctgtgggagagaggagaaatgggaggaattaga

SEQ ID NO: 16340 - DNA, 518 bp, Homo sapiens
aaaattactgtctttttcctgtaacaaaaacacatattttatgtaagcattacctaccaaaaacatgttatactttcccctcataaggagttgtctytcttattattctagttttaattacaatatattaattagaatctgaatcttagcaattgtgaatcagcatactgtagataaacaccatgtcatgatttccagaaatatatggctacctcaaagtttaatttttaatatttattaatagacccagatatatttagcttctctatgccatattgaaaataagatgccaaaactatataaacttaaacttatatttagcaattaatgtttcagtattttcctttttttggaaatgacccaggtattcaacgaatatccatattttaacttaatttagcaaaactctaaaggtttaagtttccaaatttatttgggaagctatttttaagtaggcacactgatacaaaacaaagttagctagcatcagattatttccttgttaactatttttactg

SEQ ID NO: 16341 - DNA, 1490 bp, Homo sapiens
gggcaccatcctccaatatacaaaatccatactaaatcaatgaccactatttgatgcactgtcccccaaagaaaaaatatatgggtctcagaatcaaggcatgaaagccacatggcccctcctactatcacccccagtaacccactttgggaatgtgtgctccccattcccacaaytctgggcaccacaggtttagagaactcttctaccagcagacatagcaaagtcccattagatagaagatacagctgccatttccacactttgggcaccttgtgtccagggcccgaaaaaaaaaaaaaaaggatttgggataatcaccatcctggaaaaggtacacgacctagtcgtcaggaggaaagctgctgctacacattagagaagtgggcaatcagcttaacaccaaggtggttggcatatgttagtattccatcatctaattttaataataaacccataattgccacagcagccacagcctatgaaaagtaaacattaacttggtcccctcaggaaggaaggtctgggttactcacaaagttagcatccttgtaccattataagaaccaaggtaaagggctccagaatggatcagagagtttagcctagagctccctgtccccagcagcagctggggttgcagtttctcctactaacctttttcccttataaccttataactttatccaaagagaaagtcttaccagagtcttaaagcagctaccctgaaaacttgtatgaaacaaatggccccagaaatatgggtgaattgtcacaaatgctgcactgcccagatctctacgctctattcccctaaagactcaaggatatataccctaagctgggtatgacctcactgaaagagcttccctcttccccagtgaatcccgacccaagtactggggataaatgaccagctcctctccccaaaaaggaacaaccctgaggggctacccaagcttcagagatccttttggagtcagctgagtccctgttgtgatgcatcacagcctcaattcttcctaggcccaaccctaattcctttcctttccccacaccccaggtgctgaacccaagtccactcctaagaaaagtccttcacactcattgccatctgagtctgtttcctagggtaaacaatctacaacaaattttatgtatccctggcagactaacagcaaaaagttaatattgctattttacttgggccataatttttttctatagttttgcagtattttttctccttactgtcttctaagagcaaagaaaattctccaatcaatgtgtttatactctggtaagagctgtactacacaagatttttaaatatgtaagacatctttgattcctccaatataaatacatgtttaacatggccaaaaaatgttaagacaaacagaaaaaaagaaaatttgattatgaaataaagtatttgtgtatttaaagcaaagaaatggctaaaatgtttattgtacttaattggcaca

SEQ ID NO: 16342 - DNA, 522 bp, Homo sapiens
ccaccatattcagcatcctaatttccttctatttcgcctgcatccttacctcaaaccttaatcttcaatcaaggcatatacttgttttctctctttctaaagtgctgatgagaaaaccacaaaactgggtggatttatgccactgtatatacctggtttccagcctttagctggggagttccactttcctaaaggtagagtatcaacataaattatttgaaattctkcttaggagatttttcttttctcttttattagttatttattcaaccatttatttatatcactatagactcatggatgtctgttttgcactttgggtgataatccaatactacttaattttgctcaaatttttccggctttggccattgtgagctcttttgtttaactcctgggtccctttgacatacgctcataattgtgtgtgtttgtgtgtgattgtgtgtgattgcgtgtgtttgtgtgtgattgaagaagcatatgttagagtgtttctttacatactggtattacaagatg

SEQ ID NO: 16343 - DNA, 548 bp, Homo sapiens
ttttgattgtggtagaatacacatagcatgaaattgaccatcgtaaccacttttaagcccacacctccagggcattaggtgcattcatgctgttgtgtaaccaacatcactccatctgcagaaaccccttttcatataaatcctccttttgcctttgatggatgaatttaatatatgactgttttcccttatatccaggtaactggtgggctaatggttgactatatatgcctttgagttattctttgacacctgagacttcccatgggaggccaggctactggggagggaacggggtgtgggatgttttgagttggcaraaagcagtagaggggcctgccattgctgagtgtctatgagacaccaggcacttacaagacatatgaacgatgggatgtaatgattcacttcacctagtattatggagtgaccacatggagtgctaaggagaattcaatcaagttttgcatacaccctcctcacctttggagaccctcagtcctcacataaggatagaaagcctacgataattcctctctgggcctttt

SEQ ID NO: 16344 - DNA, 544 bp, Homo sapiens
tcctagaatcactttgaaggctttgaaaagctactgatgcccaggccttacccacaggactctgcatgacttgggctggcacaggcctggccatgacaacttgttgaatgtttcccaggtgatcctactgtgtgcccatgactctggggcacccagactgtgcctcttacctagggggatccttttccaagccatccaatgcagagtactcaactgcggggagatcttgccctccccaggagacactgggaaatgtctgcgggtgtttttgattgtccagttggtggttggggaggagagcatgatggcatctggtggggagaggccacaggtattgctaaacatcctacaaygcacaggacagcccccaccgcaaagaaccttcagggccaaatgtggatagagctggagtggagaaacctttgccgtgaggagccatcctgtgcactgtagaattattggtctgaaatgtgaatagtgctgctgttgaaaaaccctgctctcacagaaccagagacacacactggtgcattcaaacacccat

SEQ ID NO: 16345 - DNA, 593 bp, Homo sapiens
tcttatggttatatgccacacatattttctcttttgtgaaacaccagttcatatcttttgcgtatttttcaattgtgtggtcatctatcttatagatttatatatcattgaatatgttctatactaatcctttgttggtgatatgtattaaaatatgttctcctggccaggtgcggtggctcacgcctgtaatcccagcactttgggaggccgaggcaggcagatcacgaggtcagaagatcgagaccatcctggctaacacratgaaaccccgtctctactaaaaatacaaaaaattagccaggcgtggtggcgggcacctgtagtcccagctactagggaggctgaggcaagagaatggcgtgaacccgggaggcggagcttgcagtgagccgagatcaagccactgcactccagcctgggcaacagagagagactccgtctcaaaaaaaaaaaaatgttctcctgagtttggcttgactttcattttctttatgtcacattttaagaagtcttcaaaatgtaatacatatgaaagccctaaaattaatcctatttctaattggaaaaatgtttaaattgaaaactcatta

SEQ ID NO: 16346 - DNA, 685 bp, Homo sapiens
aattgagcctgagttctgcaattcacagtcctaaaactattttttatttatcctgctcagtactcaaagtatacttttgatatggaataaatcttttctcaattctggaaaatttttagctatctttgtttagaatattgctttttcaaaattttcttcattctcttgttctgaaactcgtactagaaatatgttagcattgctgatctttcttacatgccccttcactggctctgtcatgttttttatctctaggttttagatgaaatcaatagtactagctggttaattygctcatcagttcctcgattatgcctagtaaagaacttttttctggccaggcgtggtggcatacacctacttgagagactgaggcaggaggatcacttgagcccaggagttcaaggctgcagtgagctatgatcacaccactgcactccaacttgggtgacagagtgagaccctgtctcattaaaaaaaaaaagaatttatcctattacttttttgtatttttccagaattctgaaatgccatattggcatccaggaaaatatattactcacctgtgacacaaagaaagaagtcttgcttttttttttgagaaggagtcttgctatgtcaccaggctggaatacagtgacgccatctcagttcactgcaacctccgactccctggttcagcaat

SEQ ID NO: 16347 - DNA, 521 bp, Homo sapiens
taatgggatacagtgtaaaattctcaggcttgataatagctacattcctttgggggatgtgtgtttgttctttgtgactggaaatcctttgatagaaaattgtgtgtagcaatgataattaatattttctgaatttgacaagtgatttaggtcaattcaatatcacttgggctttctagccatattaggtttctcagcctcagcactagtgactttctgggccagataactcctggttgtgggggctatcctgtgtgttgtaggaggtttagcaacttccttggcctctacccactagctgcaagtagcaattccctaagtgtgacaaccagaaatgtctccagacattgccaaatgcctactgggggacaaaatcagccccagttgagaatcaatgatgtagatggatacgaattcctactctgccccttacttaygattaatagttttgtgaccttggacaaagtatgcaataccagtaaagttcatcttccttatctgccaaatgggatcagctcata

SEQ ID NO: 16348 - DNA, 608 bp, Homo sapiens
gaaagtgctaatatgaaggtaatcacttcttactgtaggtaaatgaaaacatctcttgatttctttattggtagtaatttccacaagaaagctatttttctcagatagtgaaattgcatttaatgttttctagaaatagtactttaactttatttcatcttattttatcttattatatttttttcaaaaaagagatggagtgctttgttgcccagtttggtcttgaattcctggcctcaggtgatcctcctgccttggcctcccaaagtgctttgattacagacatgagctactgtgcctggccattagttctctagctttaaacaacaaagatcaagagtagcctttaccacatggtataattcgaatgtgtcccccaaatttcrtgtatgggaaacttaatcctcaatgtgacagtattgaatctccaatgtggggcctttaagaggagactggatcatgagtactctgttcttatgaatggattaatccacttatagattgatttgttattggataaatggatgaatgagttatcataggagtgtagaactggtggtttataagaagaggaagaaagacctgagtaagcatgttagcatgctcag

SEQ ID NO: 16349 - DNA, 734 bp, Homo sapiens
tgcttacattgcctcatgatctccttggaagacatccagctctccccatgctgttcagttggtgctgcacattgtcctccccttacatctgtgcccttggccatcaggacttctctcgcttttaagagactgaaggtgcaattccagggatttccatccaggtacaggtgcctgaggtgaggcagaccctctaaggcttttaggtctaaggcagagatcttattgttcctcaggtttagaacatgaagctgcttgaggtccttgatctcccgttcagcaatattctggatgacattgctttttaggtccagcctggttaaggtccctgggagcctgcaaarcatggaaacaggatgtgagaggaggccatgcccatcattccacaactgtcagggcaacagtaactgagcagcattgccttttcgtacagctctgtctcttctcaagctaggaaacaagatttatttgagaaaattaattataagcacaaatctcagtgttagtctatggatctttaactttttctcatagatcttatgttctaaccctctgatttttctggctcctattcataaaatctttagttttttttcttgtgaaatgagatcactcaaacaaattgataagaaaaacactaagttccccatttctaaggtggcaaaggccattaatcaataatttacagaagcagtaaaaatgtcaaataaaagtatgaaaaagtgttgctcttcatg

SEQ ID NO: 16350 - DNA, 734 bp, Homo sapiens
tgcttacattgcctcatgatctccttggaagacatccagctctccccatgctgttcagttggtgctgcacattgtcctccccttacatctgtgcccttggccatcaggacttctctcgcttttaagagactgaaggtgcaattccagggatttccatccaggtacaggtgcctgaggtgaggcagaccctctaaggcttttaggtctaaggcagagatcttattgttcctcaggtttagaacatgaagctgcttgaggtccttgatctcccgttcagcaatattctggatgacattgctttttaggtccagcctggttaaggtccctgggagcctgcaaagcatggaaacaggatgtgagaggaggccatgcccatcattccacaactgtcagggcaacagtaactgagcagcattgccttttcrtacagctctgtctcttctcaagctaggaaacaagatttatttgagaaaattaattataagcacaaatctcagtgttagtctatggatctttaactttttctcatagatcttatgttctaaccctctgatttttctggctcctattcataaaatctttagttttttttcttgtgaaatgagatcactcaaacaaattgataagaaaaacactaagttccccatttctaaggtggcaaaggccattaatcaataatttacagaagcagtaaaaatgtcaaataaaagtatgaaaaagtgttgctcttcatg

SEQ ID NO: 16351 - DNA, 447 bp, Homo sapiens
ccaaagtgctgggattacagctgtgagccaccacacccagcattgtttttaaagaacagaaactcaaagttatatatatgcatactccagagctaagaggttcagtaaaattgtccccaaattgtttactttcagcwtagaggtaacagcattctctctgcattctgaacatgtccattgtgggctgagaggtagagtttaattagttaatatgaaaatggtgatacataaatgacaaaggaaattcggaaactcttctgtgaaatctaaggatggaaaactgcatgtacgtaccggccccggcagaagatgctgacaaagatatgaagaggcaaggtagactggtgcagtggtagcttaagcctgtaatcccagcactttgggagggggaagtgggaggatcagttaagctcaggggaagggaggggaaggaagactggagtgggg

SEQ ID NO: 16352 - DNA, 539 bp, Homo sapiens
  misc_feature (1)...(539): n = A,T,C or G
ccccttctgggagtgggccttctcatgctgcttgtggggcctgctataatgaggtgctctgtccaggttcagactcctgccaccctctccacccactgctgcgggccagacctccggagtagcagcttggggtggttcttgttctccaggttcttatcgatgaggtcagagagcagctgcttgaggacatcagtggcatattccaggcggccctgcaggcsntacatgatgagcgaagcacgttgccccggtcgcgcatggagaaactgcgctgcagctccagggtgcggatgaaggtcagcaggaacaccttgttgttgatgagctgggcaaagagcttcagggccttctccacgtgctgctgcccgtttccttgtacctggggtgagtgtggtggagcgacgccctcagaggacaggcatcgggcctcctacctgagggtctcactgagggcctgctggcgatgacactagctgtaggaccctatgtttgaggcctataaccaaccccaccccattccactcacccgtgatgatgta

SEQ ID NO: 16353 - DNA, 539 bp, Homo sapiens
  misc_feature (1)...(539): n = A,T,C or G
ccccttctgggagtgggccttctcatgctgcttgtggggcctgctataatgaggtgctctgtccaggttcagactcctgccaccctctccacccactgctgcgggccagacctccggagtagcagcttggggtggttcttgttctccaggttcttatcgatgaggtcagagagcagctgcttgaggacatcagtggcatattccaggcggccctgcaggcgnkacatgatgagcgaagcacgttgccccggtcgcgcatggagaaactgcgctgcagctccagggtgcggatgaaggtcagcaggaacaccttgttgttgatgagctgggcaaagagcttcagggccttctccacgtgctgctgcccgtttccttgtacctggggtgagtgtggtggagcgacgccctcagaggacaggcatcgggcctcctacctgagggtctcactgagggcctgctggcgatgacactagctgtaggaccctatgtttgaggcctataaccaaccccaccccattccactcacccgtgatgatgta

SEQ ID NO: 16354 - DNA, 539 bp, Homo sapiens
  misc_feature (1)...(539): n = A,T,C or G
ccccttctgggagtgggccttctcatgctgcttgtggggcctgctataatgaggtgctctgtccaggttcagactcctgccaccctctccacccactgctgcgggccagacctccggagtagcagcttggggtggttcttgttctccaggttcttatcgatgaggtcagagagcagctgcttgaggacatcagtggcatattccaggcggccctgcaggcgntwcatgatgagcgaagcacgttgccccggtcgcgcatggagaaactgcgctgcagctccagggtgcggatgaaggtcagcaggaacaccttgttgttgatgagctgggcaaagagcttcagggccttctccacgtgctgctgcccgtttccttgtacctggggtgagtgtggtggagcgacgccctcagaggacaggcatcgggcctcctacctgagggtctcactgagggcctgctggcgatgacactagctgtaggaccctatgtttgaggcctataaccaaccccaccccattccactcacccgtgatgatgta

SEQ ID NO: 16355 - DNA, 539 bp, Homo sapiens
  misc_feature (1)...(539): n = A,T,C or G
ccccttctgggagtgggccttctcatgctgcttgtggggcctgctataatgaggtgctctgtccaggttcagactcctgccaccctctccacccactgctgcgggccagacctccggagtagcagcttggggtggttcttgttctccaggttcttatcgatgaggtcagagagcagctgcttgaggacatcagtggcatattccaggcggccctgcaggcgntacatgatgagcgaagcacgttgccccggtcgcgcatggagaaactgcgctgcagctccagggtgcggatgaaggtcagcaggaacaccttgttgttgatgagctgggcaaagagcttcagggccttctccacgtgctgctgcccgtttccttgtacctggggtgrgtgtggtggagcgacgccctcagaggacaggcatcgggcctcctacctgagggtctcactgagggcctgctggcgatgacactagctgtaggaccctatgtttgaggcctataaccaaccccaccccattccactcacccgtgatgatgta

SEQ ID NO: 16356 - DNA, 841 bp, Homo sapiens
  misc_feature (1)...(841): n = A,T,C or G
acaagcatatggtgaatcattaccgtgctggcgaatcctgcccgcgcccaggactctgcaccgggtccttttagccaaattcatctctcacagacatctgtaacgattgtgcctgctgctcactgcccgggatggaggctttaatgatgttagcaaactctgaaacctcgggagtggtaatgagcctggcacagctggaaaccagggctgcatccagcgaggcatggggtgtgctctctgtcttctgcctaccccatacctgaagtggtggttttctggggcgaccaccagcctctgcaggaatgcatggggattgttcccctccccaggctcctttcacagcctcacgtgcagcttctctcgacactttcttccccgtggccctgggtgtggggtgagtgcagtacatttcctttcataaatagcactgaaattccttacatttgggcagcacattaggctaatgaaggtcacagagaytgaacagcttgctaaggtcttggggctggtcagtagaggaggcaggtctaaaacacggtttcattccaaacctcatgtgattctgagggccagttgccagcgaatttgcacttctcagctaaaagccttacctcccaccctcactccataccctagccctttccatttgattcctgtggtatctcaccaagttgggatacaggtctgtgatcagggggcccaaggggaggtccttgaaggttgagggtcgatttggggtcnnnnnnnnnnnnnnnnnnnnnnnnnnnnnnnnnnnnnnnnnnnnnnnnnnnnnnnnnnnnnnnnnnnnnnnnnnnnnnnnnnnnnnnnnnnnnnnnnnnnc

SEQ ID NO: 16357 - DNA, 841 bp, Homo sapiens
  misc_feature (1)...(841): n = A,T,C or G
acaagcatatggtgaatcattaccgtgctggcgaatcctgcccgcgcccaggactctgcaccgggtccttttagccaaattcatctctcacagacatctgtaacgattgtgcctgctgctcactgcccgggatggaggctttaatgatgttagcaaactctgaaacctcgggagtggtaatgagcctggcacagctggaaaccagggctgcatccagcgaggcatggggtgtgctctctgtcttctgcctaccccatacctgaagtggtggttttctggggcgaccaccagcctctgcaggaatgcatggggattgttcccctccccaggctcctttcacagcctcacgtgcagcttctctcgacactttcttccccgtggccctgggtgtggggtgagtgcagtacatttcctttcataaatagcactgaaattccttacatttgggcagcacattaggctaatgaaggtcacagagactgaacagcttgctaaggtcttggggctggtcagtagaggaggcaggtctaaaacacggtttcattccaaacctcatgtgattctgagggccagttgccmgcgaatttgcacttctcagctaaaagccttacctcccaccctcactccataccctagccctttccatttgattcctgtggtatctcaccaagttgggatacaggtctgtgatcagggggcccaaggggaggtccttgaaggttgagggtcgatttggggtcnnnnnnnnnnnnnnnnnnnnnnnnnnnnnnnnnnnnnnnnnnnnnnnnnnnnnnnnnnnnnnnnnnnnnnnnnnnnnnnnnnnnnnnnnnnnnnnnnnnnc

SEQ ID NO: 16358 - DNA, 841 bp, Homo sapiens
  misc_feature (1)...(841): n = A,T,C or G
acaagcatatggtgaatcattaccgtgctggcgaatcctgcccgcgcccaggactctgcaccgggtccttttagccaaattcatctctcacagacatctgtaacgattgtgcctgctgctcactgcccgggatggaggctttaatgatgttagcaaactctgaaacctcgggagtggtaatgagcctggcacagctggaaaccagggctgcatccagcgaggcatggggtgtgctctctgtcttctgcctaccccatacctgaagtggtggttttctggggcgaccaccagcctctgcaggaatgcatggggattgttcccctccccaggctcctttcacagcctcacgtgcagcttctctcgacactttcttccccgtggccctgggtgtggggtgagtgcagtacatttcctttcataaatagcactgaaattccttacatttgggcagcacattaggctaatgaaggtcacagagactgaacagcttgctaaggtcttggggctggtcagtagaggaggcaggtctaaaacacggtttcattccaaacctcatgtgattctgagggccagttgccarcgaatttgcacttctcagctaaaagccttacctcccaccctcactccataccctagccctttccatttgattcctgtggtatctcaccaagttgggatacaggtctgtgatcagggggcccaaggggaggtccttgaaggttgagggtcgatttggggtcnnnnnnnnnnnnnnnnnnnnnnnnnnnnnnnnnnnnnnnnnnnnnnnnnnnnnnnnnnnnnnnnnnnnnnnnnnnnnnnnnnnnnnnnnnnnnnnnnnnnc

SEQ ID NO: 16359 - DNA, 841 bp, Homo sapiens
  misc_feature (1)...(841): n = A,T,C or G
acaagcatatggtgaatcattaccgtgctggcgaatcctgcccgcgcccaggactctgcaccgggtccttttagccaaattcatctctcacagacatctgtaacgattgtgcctgctgctcactgcccgggatggaggctttaatgatgttagcaaactctgaaacctcgggagtggtaatgagcctggcacagctggaaaccagggctgcatccagcgaggcatggggtgtgctctctgtcttctgcctaccccatacctgaagtggtggttttctggggcgaccaccagcctctgcaggaatgcatggggattgttcccctccccaggctcctttcacagcctcacgtgcagcttctctcgacactttcttccccgtggccctgggtgtggggtgagtgcagtacatttcctttcataaatagcactgaaattccttacatttgggcagcacattaggctaatgaaggtcacagagactgaacagcttgctaaggtcttggggctggtcagtagaggaggcaggtctaaaacacggtttcattccaaacctcatgtgattctgagggccagttgccagsgaatttgcacttctcagctaaaagccttacctcccaccctcactccataccctagccctttccatttgattcctgtggtatctcaccaagttgggatacaggtctgtgatcagggggcccaaggggaggtccttgaaggttgagggtcgatttggggtcnnnnnnnnnnnnnnnnnnnnnnnnnnnnnnnnnnnnnnnnnnnnnnnnnnnnnnnnnnnnnnnnnnnnnnnnnnnnnnnnnnnnnnnnnnnnnnnnnnnnc

SEQ ID NO: 16360 - DNA, 506 bp, Homo sapiens
ttgaattttccagttttcctcctgttaattgatttctagttgtataccattgtggtcaaaagagatacttgataaaatttcaatcttcttaaatgtattaagacattttgtgacttcaagtatgctctattttagaggatgtttcttgttagcttgaaaagaacacctgttctccggctgtggatgaaatgtgaacatacatctgttaggtccgtttggtctaaagtgcagatcaagtctaatttttttttcctwacagattgtctgtctaaatgatctatccattgttgtaattggagtattgataatttcaacagtgtcaataaggttacctatatctgtagtattattgattgctctgtatctctccctccagatattaatgtttgctttacattttcaagtgctctaatgttaagtgcatatttatttataattgtttcatccctttaatcaactcatccctttatcattatatagtgaccatctttatcacctgttagagt

SEQ ID NO: 16361 - DNA, 508 bp, Homo sapiens
agactcattttaactttcttttaaatttcttggccacttgtttgggactttcttttaagtaataacctacgaataaatactgcaagattatgagatctcaaaaataaaaaatcttagacgtatatctgaaactgaaactacaacactgctagaccctcagactgcaagaccttgatgaaatcgagggggctctaagtctgcaagatgtgaaaacacttcactctcattgaaacagtaacataaacaagaacacatttttttttcttaaattcattaaaaagctatgagcctaaaattttttacatacaaaaataagcacaaggaggatcatcgtaagagacaaaggttactttcatagctgacacagcttggagyaagcagtttgggcaaagaagaaagaactctcggattgggaaataactggataatcatttaacatttctagagctaggttgatgtcaacagagtgcaaacattcgcccgtattactgagcacctacccattgcg

SEQ ID NO: 16362 - DNA, 545 bp, Homo sapiens
attgtgaccccttaattaatggactacggggagaaattacagcagtggcaggataattaacgtgtgcacttcgcaaagccggtagaccagggtgttggaggacgggatggccaggctggtgcagggcggccggggagggcagacgggccctgcgaggggtgaggctcatgggcaacagtgggcagcctggcaggccctggcaacttggggcaggtcacaggaagccttcaccctcattcctatagctagcttaaaaaaatccatcactctcagcagaaaccacacgtgcccctgcagcaccccttccccagctgtctgccttagcagaggcacaagggtgtgggaaccccagagttccctgaagaagggcttcttacccctaaccccagcctcagagtccattggggtcactagagtattctaatattcctggtatattcgaggagggcagccgtgagccatgacccagtccagggctcccagcctgccccaccgcatgcctcagggtgaggggcagygtgggaggcttccccatgctgcgccaa

SEQ ID NO: 16363 - DNA, 570 bp, Homo sapiens
cggaattatcagcaacgttggacaaatatattggcccagattcatcataagctccttgtattgattgagcaaaatcgatgaatgtgttaattgcttcaaaccgtaggagaaagataattattacagctttatttattttgtatatgaaagggaaaggcattttagagattctgaaaataactcaagaaagaagtgctttttgaacataattgttacattggtaaaatcactcagattgaaggaatgkctaccttaaaataatttctctaaaataaatactaattcttcatcacagtatttggcaggcattctcgaggtgtttgactgagttctttgatgaaggagctaaggaaatactgtctggtaaaggatcagttacacgtaaagttgaattgtcctcagctcacttggaaattgaagggaaaatttccagaaaaatatttgaagggtaattctcattttttgatcttgaagatcagacatttgcaaatatcagaatatggagttacagaacttattacattttggttctaataaaaagctgtgattaatattttatgaatttggaca

SEQ ID NO: 16364 - DNA, 550 bp, Homo sapiens
agcacaactcacctcaggttctttgctgcagctgacattcaaggcagtggttactcccttagcctgtgtacctgagtatctgtgatgaagagccccgccgtatgacctatgatagacatttaatgcaaataaaaagttaaaacttctttttgtgagtaacttcaatttttaagttagtgtattatctaacttgcctttgttgatataataaggcggtgcagcttaaataataagatttaatggaaagttactgagctatgttgaagcctgttttcagttaaaatgctctaatttctctgtgatatcatgtgtagtatataataaatagatgtattgatttctgtttgtagtcttttgataattagcttagcataccaaattatgaggttttgttattaccattctagttagtgtgtgtcctgaggctagttggtgcattattccttaaatgatatcgatctcttttccmaagatgtaattaatccccactgatgttttccaagaactttgagattattctttcaaagttgtaatttaattgcaagactct

SEQ ID NO: 16365 - DNA, 550 bp, Homo sapiens
agcacaactcacctcaggttctttgctgcagctgacattcaaggcagtggttactcccttagcctgtgtacctgagtatctgtgatgaagagccccgccgtatgacctatgatagacatttaatgcaaataaaaagttaaaacttctttttgtgagtaacttcaatttttaagttagtgtattatctaacttgcctttgttgatataataaggcggtgcagcttaaataataagatttaatggaaagttactgagctatgttgaagcctgttttcagttaaaatgctctaatttctctgtgatatcatgtgtagtatataataaatagatgtattgatttctgtttgtagtcttttgataattagcttagcataccaaattatgaggttttgttattaccattctagttagtgtgtgtcctgaggctagttggtgcattattccttaaatgatatcgatctcttttccaaasatgtaattaatccccactgatgttttccaagaactttgagattattctttcaaagttgtaatttaattgcaagactct

SEQ ID NO: 16366 - DNA, 374 bp, Homo sapiens
cagagcragattgtctcaaaaaaaaaaaaaaaagaataagaaaaaagttcacctcctttcccaaggcaaaaagaagccccatggttcttagggaacttggcatgagtaaagcctcttgggcattttaccctttgagcataaaattcatgtttccaaatgatacttctgcacacaggcagtagttccataataggctaagagcaggtgtccctgagtgagagttctcacagtcttgttgcattgttaaaggctctaggtcaggtacagacccatggtttggttgattgcaattcccagtaaagagaaaaaaagcgtctagcattgacgctttcaagactgcctttatccacccccctacacaatacctggttttt

SEQ ID NO: 16367 - DNA, 499 bp, Homo sapiens
tgagatgcttcacctaggggactagtcaaagatgcagaatcttggccccatctcacacctaatgaatcagaatctgcatttttaaaaacatcccaagggactcatatgcacattcaagtttgagaagccaagacagttaatatgaaatctgtttgggaaaaataatttacacatacacatgcacacacacacacacatatrtaatatatatatatttacttgtatttgtcttggctggtactaccttgctaagaaattggggcatagctgtataaatcagtgttcttcaaagtgcaagtgatggctgttttgtggattgtgaaaacatcttaatgaattgcaatcagaaactaaaaaaataaataaaaattatcagagtgcatcttatgaagaaagggtgtgttattgcatgaaacttttatttcaagtgtgtgtgggggtggtgagtgtactggctcttgaagtaaaatgtctacctcctgtccccttcgtcagaaaa

SEQ ID NO: 16368 - DNA, 502 bp, Homo sapiens
actcaagatgatagagcagaggcagctcctgatcaccactgttaaagagaggggacaaagtgatgagtaaacactgatcctggaagctgattatctaagaaaccatatggggatccatcaaaagagtgaggggagaacagagaagaatgaagctgagtagctgcctatctgggattggtatggagccaggagaagctcctcaacatggggaaagggtgaatgagtgagagcccccacgggatccaaactttccacaagggcctgtgaaatgctgagaatgagagactccctctaaacctcttcgcctctagaccaataaagaaagtgcytgcagatttgtggaggcaacactcatgtctatggggccccacatgggccttgggatctggagaagcctggtgccagtgccatagctcccatagaggccacagtgacagtgcctggaagcagtaagattgctccacaaaccctcactagacaaggctcaatgacagcttccagg

SEQ ID NO: 16369 - DNA, 502 bp, Homo sapiens
actcaagatgatagagcagaggcagctcctgatcaccactgttaaagagaggggacaaagtgatgagtaaacactgatcctggaagctgattatctaagaaaccatatggggatccatcaaaagagtgaggggagaacagagaagaatgaagctgagtagctgcctatctgggattggtatggagccaggagaagctcctcaacatggggaaagggtgaatgagtgagagcccccacgggatccaaactttccacaagggcctgtgaaatgctgagaatgagagactccctctaaacctcttcgcctctagaccaataaagaaagtgcttgcagatttgtggaggcaacactcatgtctatggggccccacatgggccttgggatctggagaagcctggtgccagtgccatagcycccatagaggccacagtgacagtgcctggaagcagtaagattgctccacaaaccctcactagacaaggctcaatgacagcttccagg

SEQ ID NO: 16370 - DNA, 583 bp, Homo sapiens
atgatttcccagtttatggttaaacacctgtattagtccatttttacactgctataaagaacttcccaagactgggtattataaaggaaagaggtttaattgactcacagatctgcgtggctggggaggcctcaggaaagctacaatcatggtggaaggggaagcaggcacaccttacatggtggcaggtgtgtgtgagagagatcgtgtcagaacacaggaaaagctaccatttataaaaccatcagatcttgtgagaactcatacactatcgcragaacagcatgggggaaaatgcccccattataaaatcacctcccacaaggtccctcccttgacacgtgggaattataggaattacaattcaggatgagaaatgggtgggaacccagagccaaacacaactggaacgtataaacacaactggaatatgaaggtgtagatttttgagaggggtagtagaaacaaaagcagtagaaagaaaacatttttcagccttgtgtctcaagtatgtttgacatggccttatttttaatgctgaagcctaaaaacaaatgaactatgcaataaaaaagaattggag

SEQ ID NO: 16371 - DNA, 906 bp, Homo sapiens
ctgttagataatagaatgatttgctcattgtttggatgaatttaaggagagggaacaggaaggctgtttaggaaagttgtggacgtcatatatccggagggctaaaagcatgggcttgggagccgagcagattgatgcttgagttctggctttgctagtggctgagtgaccttgggcaatgcatttaatatttccatgactcaagtttctaatctacacaatgcagaaaataatagcacctttctcctgaggtggytgtgaggatttaaatgaaataattcatgtgaaatgcttatattacctggcattgagttaatattcaataaatgacaggtattgctatgaccagtcctgatgtgagggagggctaaactagatactctccttcccaaatcttatatttcatatttctgttcaatgtagggattaaaagggacaaatgcatctaggtcatagccctagagagcctttgattgctttccccccctttgttctactcagtgctcctttcaacttcttgaggcgtgcatcttggggaagaagtgtcaatcttctttttctcaaatacatgtcactaaaaataaagtggcagtgtacttgagaaggtgcgctccattctgaggacccagggagtgtgcttttgctcatgttcttgggaaatggtaatcatattatgcagaaaaccagaaaaggatatgcctaaattcaaattgtgtcagagatttttatgcctaccaatttgttattgtttctatgccttgtattaatataatatgacttgaataagtatttaaataattgtgcaattaaaaagaattatattcattgttagagaaaaaaaggcaaatgcaacagaggcggcataaccacacattatgtttttatccaacttcctggtcgaatcct

SEQ ID NO: 16372 - DNA, 616 bp, Homo sapiens
catgagcaaccgcgctcagccctaatcattctttttgaagctcaaaaaatctcatcttagacctaaaatccttcaggctggcacctgtgtctatctgatcagcccccatcatgtttatagctttttatctctggcactacaaagcagcctaggtaatttcctgcttctacatagaatcacttccaggcaccctagatttcttttcttgatggtacttagacaccaatatcttgtttataaggagtgttcattgctattatgttgttactgcttccagactttttcaatggagagagctaggatatactaactttaaagaggaaaataataaacccacttaatatgtatattatacctactttaaattgaaaatatatctactttaaactgaaaagtgcagttttgytattttttttaattttcataattgtaccttttaaaaatattgaaacattttagatattaaaaacagtgatggactggactatttcaattaccttgcaatatatttataatcacttcaaattagtaacaacaatattattatgatcaaagaataactgaatgtagtgtaagattatttgtagttctgtgtttctaatgttaggtacttaaa

SEQ ID NO: 16373 - DNA, 536 bp, Homo sapiens
ccaaggcaggcggctcacctgaggtcaggagttcaagaccaggctggccaacatggcgaaaccccatctctacgaaaagtacaaaaattagccaggcatggtggcgggcgcctataatcccagctactcaggaggctgaggcaggagaatcatttgaacccagcaagtggagwttgcactgagccaagatcatgccgctgcactgcagcctgggtgacagagtgagactctgcctcaaataaacaaaaaaagtgagatgaggagggtgaaggaaggctaagcctgagggagatgacacattttacatacttggtagaatacatagcattttaaaaaattacatttgcacagaagagcctaaaagcagcagaaaatattgaaggagatgatacacaatattaaatggaagatccaagtaaaatgccatattaaaaaaatgtcagatatcaagtgagtggagatgcctaaaattaagacacaaatttcaaaggaaatcactcagaatcaattacatgactttgggcctctcacccact

SEQ ID NO: 16374 - DNA, 413 bp, Homo sapiens
ttaagagaaaggccctccctgcagcccagggttagtcttgcatgcagaagacaccctggcggtagttttctccaaactgcctatggtaccagaacccggcacggcctagcagcctctgcatgaaaggtcttctactgcttccccaccttctttagagggccaagaggagcaggtccctggcctgtgctcctaactgcagggctgacatgacacagccactcccaagccctggtgtacagcaggatcacccagggagtctgctgagatgcaaagtccttgggcccctgctgaaagtttggttctgtagctttggaatgggccctargagttgactgtttaaacaggctccctgggcagtgtggatgcaggtggcctccagagcacacttaggtgctcaggaagggacggctcaa

SEQ ID NO: 16375 - DNA, 574 bp, Homo sapiens
ttgaatctggaaaagagatttttaagaaagaacactcatccatagtttcctaaaacttttcacaggcttttttcttaaaatgaaatcaataaagataatatagtgtcttcattgtgaaatttaacaagtataataaatcaaacaccctatgcaactaatttattattcatgaaataaactatgattagctcctataaaagaaacaaatgtatctcttcccaatcagaattgcctctttctgaataaagtgaatcttagtatttactttttccccctggttctgcactaatgtatccatcaaactattatctagttgcttttttttgcttttgaatttttttaaggggaatcatctatattgtttgcggaatttatttatttatttatttatttatttatttattatttttgagacggagtcttgctctgtcgccaggctggagtgcagtggcacgatctctgctcactgcaacctccacctcctgtgttcaagggattctcctgcctcagcctcccaagtagctgggactacaggcatgcattatcacacccagctaacttttgtayttttagc

SEQ ID NO: 16376 - DNA, 555 bp, Homo sapiens
tagtattattcagaagctgaggaacatttaatgaaaaagctgatgcctacttgctccaacatactatatagacaaacaaaccgagttagaatacacacaagcacacacacacasagaactccgtaacttacttgtggaagtgaaaggatctcaacaacaacagagaactcagttaaaaaacattaagaaggatttggatataactataatctagcactagaattgtaagaatgtcttgtaatcattgtgtgaatcatttatagattttgaaattagggttctccaaaactcactgtctactcttccccacaataaacttaatgatagtccaataaaaaagcaaaactggccttgccacattttttgctggggcttgggggtagggaatcactgcttcagcaatggtcacaaaaagatgatcattacaaagtcttagaaattactcaagaacacaaggttcatactcttcctttctccctccacagacaatcagtgaacagaacaagcaactaaaacacaagcttttatcacaatttaaatcaaagccaagttcca

SEQ ID NO: 16377 - DNA, 555 bp, Homo sapiens
tagtattattcagaagctgaggaacatttaatgaaaaagctgatgcctacttgctccaacatactatatagacaaacaaaccgagttagaatacacacaagcacacacacacagagaactccgtaacttacttgtggaagtgaaaggatctcaacaacaacagagaactcagttaaaaaacaktaagaaggatttggatataactataatctagcactagaattgtaagaatgtcttgtaatcattgtgtgaatcatttatagattttgaaattagggttctccaaaactcactgtctactcttccccacaataaacttaatgatagtccaataaaaaagcaaaactggccttgccacattttttgctggggcttgggggtagggaatcactgcttcagcaatggtcacaaaaagatgatcattacaaagtcttagaaattactcaagaacacaaggttcatactcttcctttctccctccacagacaatcagtgaacagaacaagcaactaaaacacaagcttttatcacaatttaaatcaaagccaagttcca

SEQ ID NO: 16378 - DNA, 549 bp, Homo sapiens
agccaggacacttttggagggaatacgtgctgtgagtttcctggcaattggctacagaagggaatgagaagtctacattctatggtgtttctttaacgactcacagagatttactagacgctagatgcatgtggctttacctggaaaagtaaagttgcctaacagggaactctgaaggaaatttgaaagttcatcacaactattcctaagccttcaatttcccatattcactttcttttcctttcacagttttgagtatttatattaattaattttctatatgcctgtcctttatggttaataatctaaaattctatttaaaaagtaacacatgcaattatatacatatatatgtatgtatgttgtatgtatgtatgtagtggaactaggatggtttgagtctgaactgcacatgtagtccaaacctgtttttgtttcaaggattcgatttggccttctttttgcccagactcatgcattctcacaggctctagccttttattattcygtggaaaagaccgctgagtgaaatatctgaaggtagtagac

SEQ ID NO: 16379 - DNA, 641 bp, Homo sapiens
tttgaaatacccttcagtgtcttagtataatcatcctttatgtattcaggctcataaataagtaggacaaatgagagtatgtaaatattccagaatgtaagatatttctaccatctttgttcttcaaagcagcatccatgacaaggctggtgtaattatttaagtgcattcctgtgaggggcaaaattaatgcgactsttatcttactgaacaataaacgcatcaggtgaaatgattagcatttagacattaaatacacaatttcaaaaaaaactatactaactccaaatagaagtatgttgaagtttgttaataagctacttgttcctttctgaagagtcatgataggtttttaagacataaatttgaatattttatgtcgagtccatattaacttataataaacattaccctttttactgatattagataggtttaacctaggctttctgaaattttacataaatagtaatgctttcaggagaattcttttctgttttttttttttttttctaaaaaagacatgttaattgttgctttaataatcaccaaacatttgtgttgaataagtatttattcatcactttccttgtatcaggaactgtgaaaggcattagggctgcaaagacagataagctaca

SEQ ID NO: 16380 - DNA, 640 bp, Homo sapiens
gagaactttctcctttctttgaaatgtatataaattctattgaaagctggattggcctttgtcatctttatgacctgtgaatcgttcccagagacctggaagccacatctttgaaatgtaaacaaggaagagatcatccaaatctcacagtttccactggagtgcaggagcctaattgttgctttatgttgcaaaaatgtatcttgtcataaagatatgtgaagttggtttcttctctgaatgaagccaactagttaacacagaagatcaccctaattaccaagcaaatttagggtgtactttaaattcttacttgaggatgagctatcttttatcttgaaatcatgcccataataggttgtatctgcttggctgataaaaggaaagatttctttctgttttcataatctcttagcagatcccatgtgatatgtatcayattccggtttaaagcctattcagtaataaagcagttgtctttctctgctaccactggggagattattttgttttcaattgtgtttctccaacactcactatacagctggattttgtgttttatttcagctgttactttctttctttcttttttttttctttttatgagacagtctcacactctgttgcccaggctgcagtg

SEQ ID NO: 16381 - DNA, 544 bp, Homo sapiens
actaaagactcctcctgttttgctgaaactgttaattcattaatttactatgtactaggtacattttgttatttcattgtaaagtttgatataaacatctctcgtgatgcttgtgagattattctggaaagaggccatgacttttttcatcagtatggccttatcattttacagagtgaatgacaacaatagtttgttgaacaaatgcattgatatgagatctacttcataaaaatgcaaatgaatrcatgatggaaattagaagaaatcatattgaaaattataactgtgactcttctcttccagcttatctacattttttgcttcagaataattcttacttttctattagtgtcatagaaattacaaagggtctagtccaaaatgcttatctcatatctattatccaacaacaggaggccttgaagctatgtatttttaattactttataattacatatatttcatgattgaattcaaatcgagaaacatgtttctctcgtggatacaaaaagttgtatcattgccaaggtgcagccatttc

SEQ ID NO: 16382 - DNA, 535 bp, Homo sapiens
ttagagccagagtctttttccaaagagaaaaaggactgaataattctctttcgttgaagtatagtgaggtcaggagtgtagcatcttacgcttggggttttcttcctctagctttaaaaggttggcttatactttcagtcagtcaattagaacagtaatagagtatcaaatgtatatgattaggcattaacttccatatagactagtgcaaaaackaagagatgaaggtgtgtacctgtcattacaaagggccccctatgggaactgggacggcaccttggttaagggacaagtgagatgcagctagttagaaaagatgaatttggaatcaggagaggtaagaaacacatgaatacaatttctatggaatctagttgagatgtgggtgttgagtcctacagctccaggagctggagttactagtatagagaggttaacacaatgcttttagtcaaagtttttgaaatacatattctcacagagtcaagaacatggacagtgcaggaaatggaaaggagaagatatcttcagatgg

SEQ ID NO: 16383 - DNA, 535 bp, Homo sapiens
ttagagccagagtctttttccaaagagaaaaaggactgaataattctctttcgttgaagtatagtgaggtcaggagtgtagcatcttacgcttggggttttcttcctctagctttaaaaggttggcttatactttcagtcagtcaattagaacagtaatagagtatcaaatgtatatgattaggcattaacttccatatagactagtgcaaaaactaagagatgaaggtgtgtacytgtcattacaaagggccccctatgggaactgggacggcaccttggttaagggacaagtgagatgcagctagttagaaaagatgaatttggaatcaggagaggtaagaaacacatgaatacaatttctatggaatctagttgagatgtgggtgttgagtcctacagctccaggagctggagttactagtatagagaggttaacacaatgcttttagtcaaagtttttgaaatacatattctcacagagtcaagaacatggacagtgcaggaaatggaaaggagaagatatcttcagatgg

SEQ ID NO: 16384 - DNA, 593 bp, Homo sapiens
gctctttttgcccaggccggagtgcaatggcgcgatcttggctcaccgcaacctccgcctcctgggttcaagcgattctcttgcctcagcctcccgagtagctgggactacaggcatgcaccaccaggccckgctaattgtatttttagtagagacaggttttctccatgttggtcaggctggtctcgaactcccaacctcaggtgatccactcgccttggcctcccagagtgttgggattacaggtgtgagccactgcgcctggcctctttcttaactttttcttatggggtccacctgactgacctcattttaacttagttacctctttaaagacccctgtctccaaatacagtcacatgctgaggcactggggtttacaacatcaacatataaattttgggtggaggtggggttcacagttcagttcacaacagggagaaggatatttactgaccctctaaaattccatcaacaacctgttttccttcttaaatacattctcatacacaattttgaggcagttttttttttctccctcactccatttatttcaatgtcaagagcttggaaaattttaatcagggcactgt

SEQ ID NO: 16385 - DNA, 593 bp, Homo sapiens
gctctttttgcccaggccggagtgcaatggcgcgatcttggctcaccgcaacctccgcctcctgggttcaagcgattctcttgcctcagcctcccgagtagctgggactacaggcatgcaccaccaggccctgctaattgtatttttagtagagacaggttttctccatgytggtcaggctggtctcgaactcccaacctcaggtgatccactcgccttggcctcccagagtgttgggattacaggtgtgagccactgcgcctggcctctttcttaactttttcttatggggtccacctgactgacctcattttaacttagttacctctttaaagacccctgtctccaaatacagtcacatgctgaggcactggggtttacaacatcaacatataaattttgggtggaggtggggttcacagttcagttcacaacagggagaaggatatttactgaccctctaaaattccatcaacaacctgttttccttcttaaatacattctcatacacaattttgaggcagttttttttttctccctcactccatttatttcaatgtcaagagcttggaaaattttaatcagggcactgt

SEQ ID NO: 16386 - DNA, 554 bp, Homo sapiens
gaaggttacagaaggccttctaaaatatgaattcccatctgtatgaggtacttctttccaactcagtgactttttgcccagagacttggaagactgggcaatgttttctttcccctttcccaactcctggagacaaggccctaggagcaatttcctccagtagggcaggccgtagtcctgctctgtcttacttcccactgcagcaggaacatgtcctcgcctctgattccttctgtaccaagccattggtccaytgaggtcaattgaggactcactgtaaattttaaatctgttaataaagcaaggatattggcatgttcctcttctcatcaatatcctaaaagacatttattttttacacactccttgggaaaaattaactttttttcactgaaaatatttccttttttggttatcttgatctcagattattttgtgaaagaattttactgtacttagttcaaaagagtagaaagaatgatttactattgcagacatatgtagggtaaaatcataatttatttaaactgactgtacaacaccatttagagttg

SEQ ID NO: 16387 - DNA, 524 bp, Homo sapiens
agaaaaaaaaatttttttttttttgaaacagtttcgctcttgttgcccaggctggagtgcaattgttttgtctaggctcactgcaacctctgcctccaggttcaagagattatcctgcctcagcctaacaagcagctgggattacaggtgcctgccaccatgcctggctaatttttctatttttagtagagacggggtttcaccatgttggccaggctggtctgaaactcctgacctcagatgatccacctgccttggcctcccaaagttctgggattacagttgtgagccactgcgcccagcctagaaaacaatttttaaggggaggttagtgtcattgttcagamagtcctgtggctatagtggcaaaaataaggagaaaatatgactactatttgaccgttacccaactttcaaaagaacattgcttttctgtctaaaagaagtaagaataaagttattttcacattgaagatagccaacaaaaattcctgaaaatggatgtatctttaacacacacttaa

SEQ ID NO: 16388 - DNA, 485 bp, Homo sapiens
catccctcttgcaacctgcgtcttgtttgkaggtggctgtctggggctgtgagtggccgttgaggctgtgagtggccatctggagctggcatgactgtccagggctgggagtggccatctgggctgtgagtggctggccgggactgtgagtggccggctgggactgtgagtggctgtccagggctgtgagttgagtggccatctgggctgtgagtggccgtctggggctgggagtgactgtctggggccatgagtggctgtctgggctgtgagtggctgtctgggctgcaagtgggcatccagggctgtgagtggctctccagggctgtgagttgagtggccctcttggctgtgagtggccatcatggctgtgagtggccagccaggactgtgagtggctgcccagggctgtgagttgagtggctgtctggggctaggagtgtctgtccaggggctgtgagtggctgtctggggctaggggtggc

SEQ ID NO: 16389 - DNA, 541 bp, Homo sapiens
tcaccatgacagtaaatcaccatggtaggagactggctggagagcgttagcttcagggacagtttagagcatccagttctgagggtacaagtggacagaggagtttgtatccccatatccagatatatttgagtactgggaaactcagggcttgaaatgtcagctgggagcagatgtagggatgagagtgcaggcatatagrtcaggaacctcaggtaagcaaccccaggggcttctgggggacctctttgcaatcttgacctcctttaaaactgcatctggcaggagaatcacttgaacctgggaggtggaggttgtggtgagccaagatcgttccattgcattccagcctggataaaaagagcaaaactccatctcaaaaaaaaaaacaaaacaaaacaaacaaacaaacaaaaaacagcactcctggaaaatctgaatgcttgggcacagagaaaattgccatggggtgaaacaagtgcccacagctgccctttgggacaggatgggaagggaagtgcaggaactcgtgatattaatg

SEQ ID NO: 16390 - DNA, 595 bp, Homo sapiens
ttggtctttgggagattcagaaggacgatacaccagagaaaaacaactcctctggcctgggagattttgactttcygcttttcatgtgtgtttgcttttatcgaagagggaatctgctacttgcctgatgcaactgcatttggatactgaactggggcccaaggagtctcaaatcactgcctgggaatgccaatttctcatcatgaattagaaatcaattctagcagcctccctgctaagtaaaaaaattacataattctttctgcactactgcattaggctgatttttttttttccttttcctgaatgtacagtaaatctctagtggtttaagccatggtgcctctgcttaaacacaatatgaaatcgctaccaaatttaaataaaaaataaattctgtgttgtgttaggagtctctcctgccaaaaactctcacacaattaacacactaacagaatgtgttgctaatttcatgccactggagtcttttctgcttcagaatatagaaacaaaatcaggtcagagctccaataataacaggattttgttaaaatatacagccctgtgttgtagatacgttgtaagaatgggtgaa

SEQ ID NO: 16391 - DNA, 549 bp, Homo sapiens
gcagacagacagacagaagggcaagggcggttctgtgagacctgtgtctcagatgtgtgtgggagagaggcaggcagacattcagacagggagaggaggagagagacagaaagagactcagcaaagcagagagaacttagatcagggtcaaagacttctgacggccctcccctagtcagggtggtcggccatcccggtcygccccggactgaggggtttcctggattcaggatttctggggaccagtggtcgcccctgtccttagtactggccagccctgctctgctgagttggggagagcagccccaggcaaggaggtctgaggaaggggtatggagcgcgagatgggggtggcagaggggagatcacaggagagcaggtggggcaggctcagaccagctccccatgtgtcggggtgcaggaggggcagcagtggccgtgcacagcgggagggcggtgtttggggtggactgaaggtgccgagctccagccccgctgtgtgggacgcactcagcctttaaggtgctgcacctgcacttgcgcagcaag

SEQ ID NO: 16392 - DNA, 560 bp, Homo sapiens
cactctgtcgcccgggctggagtgcagtagcgtgatcttgactcactgcagcctccacctcccaggttcaagtgattctcctgcatcagtctcccaagtagctgggaccacaggcgcgtgccaccacagctggctaatttttgtatttttagtagaaatggggcttcaccatgttggccaggttggtctcgaacttctgacctcaagtgatccacccaccttggcctcccaatgtgctggaattacaggtgtaaaccaccatgctgggtcaacattgcctttttaatgtagtcaaataagggtaatgcagattgagcacatcgagtttgtatgtttttttctaattatgctttattcctactttgattattttttaaaagtcaggtttgttgaagttgaagttgcataacacagaatttatcattttaagagtttaatttcataaactttgasatgtgtatatggttaggaaaccactaccacaattaacatagagaatatttccttcaccccaaaatttccatgtgctcctttggagtcaaccattcctcaactcccca

SEQ ID NO: 16393 - DNA, 569 bp, Homo sapiens
tttttctactttaatcacaattaaaagggaatttaagtctccatatgtgcgaaagactagattattttattttattatttattttatttttcagacagtcttgctctgttgcccaggctagtggtgcaatctcagctcaccacaacctccgcctcccagttcaagtgattctcttgcctcagcctgccaagaagctgaaatcacaggtgtgcaccaccacgcctggttaatttttgtatttttagtagagacagggtttctccatgttggccaggctggtctcaaactcctgacctcaagagattctcctgcctcagcctcccaaagtgctgggattacaggcatgagccactgtgcttggcttttattatttatttatttatttatttatttatttatttattttgaggccaggtcttactctgtttcccaggctgtagttcaatggcatggtaggcttactrcagcctcaaactcctgggctcaaatgattctcctgcctcaggctctggagtagctagaactacaggcatgcactaccaccacgcctggctaatttttttattttg

SEQ ID NO: 16394 - DNA, 1363 bp, Homo sapiens
caaacacaacatgaaaaacacactctcttaagaaaaatataagcaaaatatgatttatttttatctccacagctgtggtagatccacaagatgctgtgctggaggctgaactacacctggcattttactatgagggagaacctgctggcagaggagatggaaagacagcgggaacttgcactgcaggggagggtgctacaggggagtgtggcaacaagtgtgttttattataagccaattagtactatttgtctttttaaataacacacatatgtttgtatgtgtgtctttgtgtgtgttggtgttgtatggtaacccgacctgatagtaataagttaacaagaaatgasggtttccagatggaggttgctggggggagagtgctaagtgaacatgctatgcgaactgcatgctttttacaagaggttgaggttctcccatccagtccaccaccactgaactgccctgtatttaagtccccttcaggaaaccctgtgcctgctttgctggctccaggtctcttcttcagcctcttgaacctggtgccatccctactgcagttaatacgggtccagtacaacaagtgtctatttagtagcctggagaaaatgcataatgatttaatagtgattatgtctgggtgttagaattattagtgatttgtattttctttgtaatatttttctgagcttttgttccttaatttctttccatgagcgtaatgtatcgtaaaacaagaaaaatctgtcacttgagttctcagataggacaatattatggtcatgtttttggtttgttcatttgtttaagcttttatttggacataatttcagacttacagaaaatttgccaaaggaaaagtagtacaaagaacacttgaatccccactgcccagattcagttactgtttacattttagcccatttgctttgtcctttgtgccatggtcatttaaaaaaatgtgatgcgcattaagtacttatggatgaaatcatatgatgtctgggatttgccttaaaatactagaatggggaggaaaaaaggaataagggagagaaataaaacaggaagagcagaaaattatggtcattgaagctgggtgacaggtaaaggaaggttcgtttttctatttccctttcttttttttagttttaaatttttttccataataaaaaatgttaaaaagcagtggaaggataaaaaatactattagtcaaaaaaaaaaatcacaccaaagaatttcactgatttgactggttcaattagccacaagaaaagtttgtcaaacactcacaaaaaagagaacctgaaagtctgccaggcagctaaaattgtagttggacagcaaaaaatttaaaatcaa

SEQ ID NO: 16395 - DNA, 1363 bp, Homo sapiens
caaacacaacatgaaaaacacactctcttaagaaaaatataagcaaaatatgatttatttttatctccacagctgtggtagatccacaagatgctgtgctggaggctgaactacacctggcattttactatgagggagaacctgctggcagaggagatggaaagacagcgggaacttgcactgcaggggagggtgctacaggggagtgtggcaacaagtgtgttttattataagccaattagtactatttgtctttttaaataacacacatatgtttgtatgtgtgtctttgtgtgtgttggtgttgtatggtaacccgacctgatagtaataagttaacaagaaatgacggtttccagatggaggttgctggggggagagtgctaagtgaacatgctatgcgaactgcatgctttttacaagaggttgaggttctcccatccagtccaccaccactgaactgccctgtatttaagtccccttcaggaaaccctgtgcctgctttgctggctccaggtctcttcttcagcctcttgaacctggtgccatccctactgcagttaatacgggtccagtacaacaagtgtctatttagtagcctggagaaaatgcataatgatttaatagtgattatgtctgggtgttagaattattagtgatttgtattttctttgtaatatttttctgagcttttgttccttaatttctttccatgagcgtaatgtatcgtaaaacaagaaaaatctgtcacttgagttctcagataggacaatattatggtcatgtttttggtttgttcatttgtttaagcttttatttggacataatttcagacttacagaaaatttgccaaaggaaaagtagtacaaagaacacttgaatccccactgcccagattcagttactgtttacattttagcccatttgctttgtcctttgtgccatggtcatttaaaaaaatgtgatgcgcattaagtacttatggatgaaatcatatgatgtctgggatttgccttaaaatactrgaatggggaggaaaaaaggaataagggagagaaataaaacaggaagagcagaaaattatggtcattgaagctgggtgacaggtaaaggaaggttcgtttttctatttccctttcttttttttagttttaaatttttttccataataaaaaatgttaaaaagcagtggaaggataaaaaatactattagtcaaaaaaaaaaatcacaccaaagaatttcactgatttgactggttcaattagccacaagaaaagtttgtcaaacactcacaaaaaagagaacctgaaagtctgccaggcagctaaaattgtagttggacagcaaaaaatttaaaatcaa

SEQ ID NO: 16396 - DNA, 513 bp, Homo sapiens
agagaaatggctgacttgaaaactgcttcagtcatgacgacatgccctggcatgtgttactaatcatctagaacatttttgtaaataaataactattatattatattggcattgtgcaaatttctcctattcccagaaatccaaacaaaatatgaagagaaaacaggttkacactatcgaaaccataaaactcagtgagatgaaccatctgaaagtgatttcgtcaagggaaatttagatatatgtttcaacaaaaggcacggatagtacatgcttgcatgagtgtgggcatgggggcagggcttttccgaagagtttaattatgtaaaggtctattgtcaaacatattttccataattcacgcaccaattttttttaacttttattttaagttaaggggtacaagtgtaggtttgttacataggtaaacttgtgtcatgggggtttgttataaagattatttcaccacccaggtattaagcctagtacccattagttatttttcctgatctt

SEQ ID NO: 16397 - DNA, 532 bp, Homo sapiens
agtggtgtgaatatgtaagaaaagtataatgtccatttggcttatttgtgatttttattttctaaactttgtttttagcattttaacaatttttttaaaaattgcttttactagttgagtatcctttattcgaaatgcttaggaccggaagtgtttcaaatttcagatttttttgaattttagaataattgcattatacttacatttgtattatacttaacagttccacatmccaaacctgaaaagccaaaatctgaaatgcttcaatgagcatttcctttgagtgtcatgtcagcactcaaaaagtttagaattttggagcatttcggattttcagctttgggatgctcagcctgtacaaaattgtaggatacacatacactgtattcagatagaagacattttttattttccataatcagatttatcagtctttttgtgtatggcttctggagattatgttatacattgaaagtcctttgagacttaaatttcctagttaatgttaatattactgatttgttgcgaattt

SEQ ID NO: 16398 - DNA, 534 bp, Homo sapiens
tggcatctcttacatgttgtaattattttatttatgtattatgtttcttatgtatattccccactatgttgtaaactccatgagtattaactggccatgtctgctctttcacaatagtgctctcagtgactaatagagaatctggcaaatagttatgggaaggaaggaagggacagtaggtcttgaaagagaggtcaaaggttattctgataattctagctcaagaaattggctaattgttaataatttaaatgaaaatcgaatatagagcaggaagagatggcttgagagaaaagttaatatatttatttaaggcctactaattttagagaatatcaggagacatggtggtatctgccaaatttctccatgtaattatccctcttttcccattattaataagtatgttaggggtaataatttgagactatgcaaatatcttmtttttcctcaaactttttcccactgattttagaatccttccacatattttacctgcaacaattgtgtttgtctattggaaattttaaagtt

SEQ ID NO: 16399 - DNA, 572 bp, Homo sapiens
tttcctctktttttttttttgagacggagtctcgctctgttgcccgggttagagtgcagtggcaagatctcggctcactgctagctccacctcccgagttcatgcccttctcctgcctcagcctcctgagtagctgggattacaggcgcccgccaccatgcccagctaattttttgttattttttttttagtagagacggggtttcaccgtgttagccaggatgatctcgatatcctgacctcgtgatccgcctgcctcagcctcccaaagtgctgggattacaggtgtgagccactgcgcctggcctgtaaaaatagttttaaaatgaaattatatacattaaatggttacattttatgatatgtaatttgtaccttatgttttcacatatcatagtgcaatgagggttgggggaatctctgctaaagtcaatcattcagagacccatgtttacagagatctgttgctttcagtataatattctgatagatttcttatgttgaaatccaggcttgcaaatggtggatgggagagacagtggaagttatacagggtgttttaagcaactttc

SEQ ID NO: 16400 - DNA, 572 bp, Homo sapiens
tttcctctgtttttttttttgagacggagtctygctctgttgcccgggttagagtgcagtggcaagatctcggctcactgctagctccacctcccgagttcatgcccttctcctgcctcagcctcctgagtagctgggattacaggcgcccgccaccatgcccagctaattttttgttattttttttttagtagagacggggtttcaccgtgttagccaggatgatctcgatatcctgacctcgtgatccgcctgcctcagcctcccaaagtgctgggattacaggtgtgagccactgcgcctggcctgtaaaaatagttttaaaatgaaattatatacattaaatggttacattttatgatatgtaatttgtaccttatgttttcacatatcatagtgcaatgagggttgggggaatctctgctaaagtcaatcattcagagacccatgtttacagagatctgttgctttcagtataatattctgatagatttcttatgttgaaatccaggcttgcaaatggtggatgggagagacagtggaagttatacagggtgttttaagcaactttc

SEQ ID NO: 16401 - DNA, 572 bp, Homo sapiens
tttcctctgtttttttttttgagacggagtctcgctctgttgccygggttagagtgcagtggcaagatctcggctcactgctagctccacctcccgagttcatgcccttctcctgcctcagcctcctgagtagctgggattacaggcgcccgccaccatgcccagctaattttttgttattttttttttagtagagacggggtttcaccgtgttagccaggatgatctcgatatcctgacctcgtgatccgcctgcctcagcctcccaaagtgctgggattacaggtgtgagccactgcgcctggcctgtaaaaatagttttaaaatgaaattatatacattaaatggttacattttatgatatgtaatttgtaccttatgttttcacatatcatagtgcaatgagggttgggggaatctctgctaaagtcaatcattcagagacccatgtttacagagatctgttgctttcagtataatattctgatagatttcttatgttgaaatccaggcttgcaaatggtggatgggagagacagtggaagttatacagggtgttttaagcaactttc

SEQ ID NO: 16402 - DNA, 628 bp, Homo sapiens
tcctttgaatcccatgtttctagtgttcaaagatattttaaaaagaagcaaaatcatgactctcatatagatagaaaatgagcacatgttaaagatgttatgtaacccattaattaagtggagaaaccaggcaactggttcaaaggagaagtcatagaagtacaaatttttatggactaagaaatgttgatgtgaatgctcatttggatgcaaaactggcttctgcatgggcatggggtagtgagaggatgagggagtattgttcctccaccagaaaaaatttcacttcaaaaaaatttcaaaatacaaagaaagtaattattttgattggcatcagttattttcctacttacagagttagaaaatagctcccatagaatagaaattagataaccatgaagggtgtattgtgctagtctagatgtgacatagtttyatagttttccattggagcacacatcttccttcactagcaccccaatattgaactgaacgtaggcaccgccaagttacacagcaatcatattcttttctgatctggctttttctgtctttgctcatagaggctgtttctactacctcttactgccaggtcagtagtcctaagaactctgcattctaatctggg

SEQ ID NO: 16403 - DNA, 588 bp, Homo sapiens
gtttccttgtctttggacccctggctctaaccagcttccagaagtccatttttctttcattattttttatttttgttttgagatggagtctcagtctattgcccaggctggagtgcagtggtgcgatctcagctcactgcaacctctgcccsctgggttcaagcaattctcctgccttagcctccctactagctgggactataggcacgcactaccacgcctggctaattttttttatttttagtagagacggggtttcaccatgttggccaggctggtctcgaactcctgtcctcaagtgatctgcccgccgcagcctcccaaagtgcagggattacaggcatgagccaccacacccagcatccagaagtccattctaatggactgttcctctcatccatagcgcttcctcctggctgggcgaaagagaagaaggagcaaaacttctaattacctcatctccctggatcctacacacctatctcgggacggggacaatttcgtgggcaaagtcaggtgggtagagctctgacatgtggtgaggagcaggtagcagggagcttagggacagggggactccatttccca

SEQ ID NO: 16404 - DNA, 539 bp, Homo sapiens
aaaatgcttcttgacaatgaaggatcatgtcagataagatgggggagaagctgctttctataatctgcctcttggcaactcaccctgggtagtaataaataaaagtacctttaaagtacttttttatttagttgacttatcgattttactaaggaaacacttatgtggtatctactcagtgccaggcactgttctgagtgccttaaaatttttttwaatttctctgaggttgttactatgcttagctccatttgacagatgaaaaaactgaggtccagagacgtgaattcacctgcccaaggtcacacagcaagccagtgggagagctggagtttgagcccagacactggctctagcctccttgttcttaaccactcagctctgctgccattcacacaaccttatgaactatttattattggctccacttattaagaggttaactggcacatcccattggcacattcaaggctctgataaggcctgcaattcataatttcaataactaactttttggagcccctatcatgagccaggca

SEQ ID NO: 16405 - DNA, 648 bp, Homo sapiens
tgtttgtttgttttttgttttttkttttttttttttttcagagattgccagtggggctttggaagaataagctacacaagtatgtgttacatgagggtgaggccaggctggtagatttccttcaaaatctgagcgcacaccaacgtgttgcacatttctcagcttagcaaagaagcgtgccaaagttaatagaatggaccctttgttggctctcaaaggctacaatggttggcactttaaacataccacgaagccattgcatttgagacggcacccaggagaagcagtcttcgaccgggaacatgcctcttccataattactgccctagaaattcaagtcatcccctatagagaataattttaaaattccaacattattcctgacttcaaggaaacagggaggttgaaagtgctcgaggccaacagtcatcaatgtttagtacaacttaataaaatcatgacctgctttgatatagcacttggcatatcctttcattaaatctcacactcagggttcttcattcttcctaggggtagaaaatttttaggttagacgggaaagccagcaacaacagtcaaaatggaaatacgattagtgaggaagtatgggaatactaattgtattatatccatgtcgcgtagagttta

SEQ ID NO: 16406 - DNA, 738 bp, Homo sapiens
ttatttatatatttctagagtagccatttctamgccaaaaaaaaatctctcaggattatcattagccaaattcacattgtgaaatattgatttagatgagtgatcttctaaaaatgtcacttctgtcaatccagttactgatttttaaaaaaaaaaaattaagtctctagcaaggacttgcactaaggacatatactgttctttgagaatagacaatcactttactctgaaattggggaatcgtagtcagcatgacagcatcttatgcaatttatgaaacctaaacaagattccaatctcattgtctgtctacacacataggatatcattaacccaagctgtgacagcagcattttaagacatgaaaaccagatggtcagaaaaccaggtaggctgaggaatggagctcccttctggctcttttctgagctagaagccctaaacctagggacaattcaattactgaattaatttctcaatagacaactcagcttttataattcctagaaattaatataaataataaactcccccaaggaatgatcaactctttcattatgctgatttctgtaatcccctatggaaactaatcggctcctcctccggactccacagtacagcattgagattctgccataagtagcacttatcttgtcaactacacttggttatgcacatgtctgtttccccaacaagacaaagggaggaaagcaacattggaaggggtattggaaggat

SEQ ID NO: 16407 - DNA, 738 bp, Homo sapiens
ttatttatatatttctagagtagccatttctacgccaaaaaaaaatctctcaggattatcattagccaaattcacattgtgaaatattgatttagatgagtgatcttctaaaaatgtcacttctgtcaatccagttactgatttttwaaaaaaaaaaattaagtctctagcaaggacttgcactaaggacatatactgttctttgagaatagacaatcactttactctgaaattggggaatcgtagtcagcatgacagcatcttatgcaatttatgaaacctaaacaagattccaatctcattgtctgtctacacacataggatatcattaacccaagctgtgacagcagcattttaagacatgaaaaccagatggtcagaaaaccaggtaggctgaggaatggagctcccttctggctcttttctgagctagaagccctaaacctagggacaattcaattactgaattaatttctcaatagacaactcagcttttataattcctagaaattaatataaataataaactcccccaaggaatgatcaactctttcattatgctgatttctgtaatcccctatggaaactaatcggctcctcctccggactccacagtacagcattgagattctgccataagtagcacttatcttgtcaactacacttggttatgcacatgtctgtttccccaacaagacaaagggaggaaagcaacattggaaggggtattggaaggat

SEQ ID NO: 16408 - DNA, 738 bp, Homo sapiens
ttatttatatatttctagagtagccatttctacgccaaaaaaaaatctctcaggattatcattagccaaattcacattgtgaaatattgatttagatgagtgatcttctaaaaatgtcacttctgtcaatccagttactgatttttawaaaaaaaaaattaagtctctagcaaggacttgcactaaggacatatactgttctttgagaatagacaatcactttactctgaaattggggaatcgtagtcagcatgacagcatcttatgcaatttatgaaacctaaacaagattccaatctcattgtctgtctacacacataggatatcattaacccaagctgtgacagcagcattttaagacatgaaaaccagatggtcagaaaaccaggtaggctgaggaatggagctcccttctggctcttttctgagctagaagccctaaacctagggacaattcaattactgaattaatttctcaatagacaactcagcttttataattcctagaaattaatataaataataaactcccccaaggaatgatcaactctttcattatgctgatttctgtaatcccctatggaaactaatcggctcctcctccggactccacagtacagcattgagattctgccataagtagcacttatcttgtcaactacacttggttatgcacatgtctgtttccccaacaagacaaagggaggaaagcaacattggaaggggtattggaaggat

SEQ ID NO: 16409 - DNA, 549 bp, Homo sapiens
tcaaactcctggcctcaagtgatccrcccatctcagcctcccaaagtgctgggattacaggcttgagccgctgctgccggcctattatttggcattctcgaaaaaaatgattttaaattatgatggtcaccacttaaaaaaagtgtttgggggtttccagaatggcatttttttaatgcatagggtaacttggggtgactttagcatattcctttaaatctttaaaaaatgtctttaaactaaaatgaatagttctctaaaaccccagctgtcttgaatatattgaagccactaaaaacaaatgtgcatcttcttgattacaagatgtatttgcagaggttgtaactttgtaatccacgtgatatgcccaatgttctggatgacactgattgtatcttaaaaatcaatttgcatgtataaaattgtgtatcatttgattactttggaggttttaaaaatatattataaaaagacttacattgcatagttgtcttcaatatcacaaaattagcattccttaaatcagatactaacatcttcccagagaca

SEQ ID NO: 16410 - DNA, 549 bp, Homo sapiens
tcaaactcctggcctcaagtgatccgcccatctcagcctcccaaagtgctgggattacaggcttgagccrctgctgccggcctattatttggcattctcgaaaaaaatgattttaaattatgatggtcaccacttaaaaaaagtgtttgggggtttccagaatggcatttttttaatgcatagggtaacttggggtgactttagcatattcctttaaatctttaaaaaatgtctttaaactaaaatgaatagttctctaaaaccccagctgtcttgaatatattgaagccactaaaaacaaatgtgcatcttcttgattacaagatgtatttgcagaggttgtaactttgtaatccacgtgatatgcccaatgttctggatgacactgattgtatcttaaaaatcaatttgcatgtataaaattgtgtatcatttgattactttggaggttttaaaaatatattataaaaagacttacattgcatagttgtcttcaatatcacaaaattagcattccttaaatcagatactaacatcttcccagagaca

SEQ ID NO: 16411 - DNA, 539 bp, Homo sapiens
ccatgcaaaattcagaaaaataaatttgtgagcataatttaaaagtgtatgcataggtacatggatacagggggaaaaaaaccctgatacaattgarttggctgacatataggcataaagtctgctgaacagattcttgctctgattaaatttgcttggactccagatgacctgatgcttgattgatctaacagaacaattcaattttcattcttctgaaaggtactataaaatcatgccaaacgaaattaatctgttgcagttatgtgcatcatagatagcaacagacagtagcataggtagtaatgaaacagtattcttcttcttgctagaaattttgtacaatgaatatcagacactgaaagtaaggatggggattaaataaatgatcgtgaacataaataagtattatatctgaacagagctaagtaaacatgtctgactccgaatatttaaccctgaaatgagaaaatgccatgcatgagggtgtagagagtacttgatctatgctaacaagattagaattgagaaataatttt

SEQ ID NO: 16412 - DNA, 552 bp, Homo sapiens
catcatattctttttttttttgttgggggcggtgacagagtcttgctctgttactcagactagagtgtagtggggcgacctcagctcactacaacctccaccttctgggatcaaacaatcctcccacctcagcctcccgagtaactaggactacaggcacgcaccaccatgcctggctaatttttgtattttttgtggagacggggtctcactatgttgccctagctagtctcaaactcttgggctcaagcaatcctcctgccttggcctcccaaagtgctgggattacaggtgtgaaccactgtgcctagtcataacatgtattctttttgaaagaaaatgtatgtacttaattgaattatttgctagatgttggtctgtaagctcctggagggcaggagctatgtcaggttagctctattatgtggtatagtaygtggcatgtagtatttgcttaataaatatttacaaatgtaaggcaaaacaaaacaaaaaatacacatataggtaagcaatctaataaccatttactgttacagttttattatttca

SEQ ID NO: 16413 - DNA, 647 bp, Homo sapiens
agtgtcgctcaacataatagccaaaatgtccaggatgcaatagaaatttcccgtcataccaagaaaatcacaacttgaatgagaagagacagccaactcacatcaacttcagttgaatccaatgctggaatgatctgaaaaggattttaactcagtcatcagaaaacatatacgcaatccatcagattatcttcaaacaaataacaaattagaaaatcttagcaaagagaagggagttatttttgttaagccacatggcaattatgaatgtgaaaaaacagactaacataaaaatctatctatctataaagaaattcaagaaaatatggaactaatttttagaaacattattcattttatagctgcagctctgggggctctttaaggcttgtcrgatggacagaacccatacccttgcaacttcttgtaaatttagggtccagaaatgcgcaacatttcaacaagtggcacagaaagggaaatctggagggggaaaatagaataatgtctaaaaacaccaaaaaaatgcaaattattctacaggtttttcaatgattccaaacattcactcactgatggtcatgggatgactgtcgaaacagtagaggctcaagcccaccctggtgattctttttccatgtgtcttc

SEQ ID NO: 16414 - DNA, 426 bp, Homo sapiens
gatggaccagtggtttgttaggcacactgttattttatcatcatcgtcgttataactgtcaagtagtatgtgcctatgcattaagcartcaaagcacaactttatgtttgtcctgtatcatcactgttaaatttattcaagagtttaatctcctgcttttgggagaaaaaaatgaatgtggttttgcactcatacttaggtaacagataatcttacagtcatcatgagttataaaaacagagcgccttacagatttactgaaaatctgttctgaaattcccttgagttgcctggatgtcttttgcctatgcttgtaactctccaaggttcctacaaatccaacattcctatttgacttcttactgctaaggtccctctcctcctgtaatcacctgttaaataggacactatagaccctatgtcagc

SEQ ID NO: 16415 - DNA, 557 bp, Homo sapiens
cataagtgatcccaaaccaggagctagtccaagcctccaaaggtggctgggtagttcattggaatgagggctgcagtgactccagagggagcaggactccagaggagcaggactcaagagaaggggagccagggaagactgaggggatgtgtaggtgaggtggctcttttctggctgagagaagagaaggtccccagcccacaccaagggctccataatggaagggaggcctagggtgggtcctccccctccccatcttcatcccactcagcccctacctggcctttaacacactgggtgggagaagtgttgctgagcacagcagtgacctgaggccctgggcacycatcccagtttagctccacaggggactccagttgctgaggaagaatatagaacttatataggatgggggagctggaaggaaacttaggatcaattgttccagcctctaattgaatggtggggaaacccagagacagagaaaggaaattactaccccttccaagccagtgagagagccagatctagaatccagggctctttccatgatattg

SEQ ID NO: 16416 - DNA, 557 bp, Homo sapiens
cataagtgatcccaaaccaggagctagtccaagcctccaaaggtggctgggtagttcattggaatgagggctgcagtgactccagagggagcaggactccagaggagcaggactcaagagaaggggagccagggaagactgaggggatgtgtaggtgaggtggctcttttctggctgagagaagagaaggtccccagcccacaccaagggctccataatggaagggaggcctagggtgggtcctccccctccccatcttcatcccactcagcccctacctggcctttaacacactgggtgggagaagtgttgctgagcacagcagtgacctgaggccctgggcactcatcccagtttagctccacaggggactccagttgctgaggaagaatatagaacttatataggatgggggagctggaaggaaacttaggatcaattgttccagcctctaattgaatggtggggaaacccagagacagagawaggaaattactaccccttccaagccagtgagagagccagatctagaatccagggctctttccatgatattg

SEQ ID NO: 16417 - DNA, 1295 bp, Homo sapiens
taatctttttattcagaggtaggatgctagttctacaattgcctaggtcttctttaatttgtatatgttaagaaattttaatgggcaatttaataagtgttgaaatttctaagaattatttctgtatgttagagttgtgataacgcagacattttccctgaagtacttctctgagtctgrtttgttttcctccatgggtgccacataggtttattttaagaaggtaaaaaataaaagctgactaaggtacatattgattattccagacaacatgcagacatcacccaatgagtgcagttctcatcaactcaccatttgtttcaattagaaaaaattctcatcaaaactaatttttctgcatgaaataccttttcaaatcacactgaatgtgatttattaattgtgatttatcaaattcagttttctgctggatactaaaggcacacctcattaagactagtgattatggaaatagtacaatattttagaaacttttgattgtaaaaatttcttttaaaatgaatacatacagatatgttattgttcagatatttagcacttacgtagaaactcactgatctactaacaagtagaaaagagacctttagccaaatgcctctgtactcagcaataaaatgattaattactgtgttgctcttttctctggttaaggcttttaacaaattttgtttttccttttactattacaccataacttgtttaaattttgttgctgttgcagaattacagcagacattacagttcatgtctccctgtgtatacgagggagagtttctctgggctgtgtacatgggggagtgtgggcctgacctgtcacattcaatttttatttcacagtcttatatctaatgctcatcattgcataatgtaactagctggggttagtttcctcagtccctgactcttctcttcagagcctgttttctctccgtttacagatgggccaaggttgctcgggtgattggtttactggcttcgcacaaaactgatctccaggaaaatacacctgttgttgaggtaatgtcttttatgactgaaatgtgatgaatgacaagaaatactgttgttgattctgtaatttagaacatgtggctttccttgaccttcacttgacttttctttgtgggattgtggaaattgttcaaaaacttatcacctcaacagacctttaggcttaaacatagcggctcatttacaatgtagtccatcattaaaatggcacagcagagttaacaaggctcgtgaaccctactcatcattatttcatttgtttt

SEQ ID NO: 16418 - DNA, 1927 bp, Homo sapiens
agaacaaaggggaatctttggatagattggttggaacattcagatggcatctcattctctagctggatgctttctaagctacataaactatttggatcatccaaggctatttcaagaatgaagcatgatagtctttgagagaacctaataaatccatggagtttggagagcagagggtctaggtgtgtggctctcacgtggagcagtctgagggtggcatatgattgcagttgcctttggttgccaagtgaatagagaggaaagggaaggagtgggaatggccagcttgcatttccagagtttcacaggactagtctgcatgagttctgggggaccaaatgaatgtcattgaaataagcctgactccagttggagagagttgtctgcctaacacctgcctaggagagttgtctcatgggaaacgggggaccaggagagaaaggttgtgtagggtctacctccaagacagaggcctgaaaacctgaaggtttccctgcaaagtaagctagagagagtatcacctatgacagagaatgataacgtagaagtccccgaagcctttagatgcgtatctcagaggtagtccaaaaagagcctgcgtcaaagaaaaagcaatatttgggcatctgccctacagaaggccccagcagccagataacaacaggagcttccgtcaaacagcagtcgttttcctcctattgacctccaaaattattttctgatcagctctctttgaattcagcctgtttaaccaactgctttcctcttaatttgcagtagtttcttgactggtctccttatcccaatctagcagctctttttttttttttttttttttttttgagaccgagtctcgctctgtcacccaggctggagtgcagtgatgtgatctcggctcactgcaaggtccgcctcccgggttcacaccattctcctgcctcagcctccccagtagctgggactacaggcacccgccaccacgcccggctaattttttttgtatttttagtagagatggggtttcactatgttagccaggatggtctcgatctcctgaccttgtaatccgtccgcctcagcctcccaaaatgctgggattacaggcatgagccaccgcacccggcctctagcagctctttatgcaacatttttaatgctgtcaatatttttttagaaaatactgcctccaggtcagacactgtgactcacgtctgtaatcccagcattttgagaggccaaggtgggcaggagttgaacccaggagttcaagaccagcctgggtaacatggtaaaaatgcatctgtacaaaaagacaaagaaaattagtcaggtctgcagtctcagctactcgggaggctgaggtgggagaattcctgagcccaggaagtcgaggctgcagtgagccatgatcacaccactgtacttcagcctgggggatgaaagtgagaccccatctcagaaacaaaaacaaataaacaaacaaaaacccagaaaagaaaatattgcttactttctcagatacctggcccctcccaattaagacttaactcttcagtattcatatatgggattcaataatcttttccttttattcactttccaacaaaaaagcattttgaatagtattaggagccactttgaaggggaacattttaaaggatctttaggaatacattttgttcccccaaagttctgtgaccatgcaattttatttccccaaactgtccatgggtgtcacaactctctgtctatgtcagtctctcaatctgaagtgtttccatagccccaatcaaaatccaacccacccttcaaagctcagctcaaatatcacctcttcttaaaattgttatctgattcccacagttggaatcagttagtccttagcctgyattcccctgaccttttctgtattcttttggttttgatc

SEQ ID NO: 16419 - DNA, 838 bp, Homo sapiens
ggaggaaaggatggagaagcagttgttggcttaacacagagttttgcatttcagtggagcatctgttgttataggagataataagcacayggtgcagcatgtgatttgcactgtgcaaaactgtgagactggtttgatgaagaaatgtagaaataaaggtcagtcacatcaaagagaccaaggaagagttaagctggattcctggatgcattacccacattgacccagggtctagagagtatgacttcaagctgggtgccaatgtgtataagtaaggaggggagagcccaagaggctgaaaatgtcagtaacaaagagaagtttaccatgataaatcctcttacaggtgtcaggttttattcatgaaagaaacagtagatgcctgggcataaaattggtgagcaaaaagaatactggtgctatctgccagtttgatgatggttagacattaggatttggtgctctcaaagtttaattttaataaaaggaaatatgtgctttgtagacactgagaatgtagagtgttttgttcacatggaaagatagttccacagacacattgaagcaactgtgagaaaatgaagcaaaatgatgaattgaggaaagaattgtcatgcagttattattaattcattaatagcagagatatttatcaaataacttttatgtgccaggcattgttctagggaaccaatgaaacaacaggcagcaacactaatgagaaggtctttggcatcaaggaactttatattcttaaggattattggcaatgaatttcaaaggagataggcagtttacagatctttccttttcacttgtctcaaattgttataaccat

SEQ ID NO: 16420 - DNA, 535 bp, Homo sapiens
aataaagtttcccttgaaggcaaaaagtgttatcccaagtcacattttgcataatttgctttatgatgaatataaacacatatcatattaattatttgcatcataatatgacatagttagcagtttttctgatcaattacataagttcccattaacttgccaaaaaaagttaatatatatatccagtgtctgtgttattggtatattttcgaccattttgaaatcagtcattaacgtattagcattgactttaagttcctatatatatttgattaaatgaaagccttaaaaaattggaagtgacatgtttgaattttrtaatttgaatactattgaattttactttttgaccttgatatctcattttattcccataaaatgtaaaacaactacactggctgaaagaaagtcaatgtgcgcttcaataatcatagatttttgtgaattaaatctttctaggctaattatgaggaacttctgcaataataaagtaacaccataattgttactttttataatattcctatactgtgac

SEQ ID NO: 16421 - DNA, 535 bp, Homo sapiens
aataaagtttcccttgaaggcaaaaagtgttatcccaagtcacattttgcataatttgctttatgatgaatataaacacatatcatattaattatttgcatcataatatgacatagttagcagtttttctgatcaattacataagttcccattaacttgccaaaaaaagttaatatatatatccagtgtctgtgttattggtatattttcgaccattttgaaatcagtcattaacgtattagcattgactttaagttcctatatatatttgattaaatgaaagccttaaaaaattggaagtgacatgtttgaattttgtaatttgaatactattgaattttactttttgaccttgatatctcattttattcccataaaatgtaaaacaactacactggctgaaagaaagtcaatgtgygcttcaataatcatagatttttgtgaattaaatctttctaggctaattatgaggaacttctgcaataataaagtaacaccataattgttactttttataatattcctatactgtgac

SEQ ID NO: 16422 - DNA, 516 bp, Homo sapiens
tcaccatattggccaggctggtctcgaactcctgacctcatgatccacccacmtcggcctcccaaagtcctaggattacaagcttgagccaccacgcctggccacattctttcaatacttggaaacaaatgtaatttttactcttctgcctgaaaattctaatttagtgagtattgaagatactatgcctcttaagagtagcagaaggtattaaaaaggaaatgtaaacataagaaaaggagtagtcataaattcaaaggtggaacacatatctacaaacatcacatactcattacaatataattattttaatcagtgggattacagaaaatagtaaaagcaactaaactatataagattattctacatgctttacatacattatgtagtttaagtctgacacaaactctgtgccaattgtctatttacagaattaaaataaaaaataaaaaacccgataaagaagttaagcaatttcccaagcttcagagcagaaaattggtaactgaggacaga

SEQ ID NO: 16423 - DNA, 516 bp, Homo sapiens
tcaccatattggccaggctggtctcgaactcctgacctcatgatccacccacctcggcctcccaaagtcctaggattacaagcttgagccaccacgccyggccacattctttcaatacttggaaacaaatgtaatttttactcttctgcctgaaaattctaatttagtgagtattgaagatactatgcctcttaagagtagcagaaggtattaaaaaggaaatgtaaacataagaaaaggagtagtcataaattcaaaggtggaacacatatctacaaacatcacatactcattacaatataattattttaatcagtgggattacagaaaatagtaaaagcaactaaactatataagattattctacatgctttacatacattatgtagtttaagtctgacacaaactctgtgccaattgtctatttacagaattaaaataaaaaataaaaaacccgataaagaagttaagcaatttcccaagcttcagagcagaaaattggtaactgaggacaga

SEQ ID NO: 16424 - DNA, 1208 bp, Homo sapiens
tgttaacattttagatttgtctgctttattacagcatatctttaatctgacccttgtataataatataggtagacacacttgaaaaacatcataattcaggctggtatctagagtctaggaaggacaataatggaactagaaaagcagtcaacaaagcatcagcgaaggacaatcaaaataatgttttggagcagtttatagataagaactgacttagaaaaaaaactatcctctttactatataaagaaacaaacttgaaaaagccataaggattacagaaaaggtgtatgcatatatatacatatatattttttaaaccaaggccagaaatactattactagtatgatattgaaggaggtagttgcaagtgaaataaaatgaagtggtatttagtacacatctggaacttgttcgcctgagaggttgtactgtctgaaagtataaataggatcaacaaaagctcaggtaaatccatggatgacagatatgcagctgggtataaagggcaagttcaggacatgctcttggctttagtgtaaggaaagggtcactatcaaagtttccacccagcacttttgttgtcaccggaggaggcaaagcattaagtggattaagcacaaacttgcccttatgtggcatttcataagcttctatgttccccctcaatatggactagaaacaatgtgggcttaaaattgaaaatattcagttttccttgctattataaagtactttttaatatctatgaaaacttgtcactttcataaaatagacaagtataaaaactcataggggcttttcataacaatgaatatcattttagaaattggagacatttcgatatagctaattacttatctctttaagaattaaaaatattttgtaaagtgatacttgtaaattattttcatgatgtctttttattacaaagttgttttcaggatactaacatttgctttggtttgagaaagttggttttgtcgtggtaayggctttacgtggagtatctgtttaacatccttaatccaatgatacttaaattctgtaaacaattaacttcaggtgcctttcacttataaattacatccagcaagggttgacagaaagatttttgtcattaatgtctttcttctcttttcagtaagtccatttgtcacaattatacagtagaatttgttgatatcgcaccaaagaagaattttgtt

SEQ ID NO: 16425 - DNA, 1208 bp, Homo sapiens
tgttaacattttagatttgtctgctttattacagcatatctttaatctgacccttgtataataatataggtagacacacttgaaaaacatcataattcaggctggtatctagagtctaggaaggacaataatggaactagaaaagcagtcaacaaagcatcagcgaaggacaatcaaaataatgttttggagcagtttatagataagaactgacttagaaaaaaaactatcctctttactatataaagaaacaaacttgaaaaagccataaggattacagaaaaggtgtatgcatatatatacatatatattttttaaaccaaggccagaaatactattactagtatgatattgaaggaggtagttgcaagtgaaataaaatgaagtggtatttagtacacatctggaacttgttcgcctgagaggttgtactgtctgaaagtataaataggatcaacaaaagctcaggtaaatccatggatgacagatatgcagctgggtataaagggcaagttcaggacatgctcttggctttagtgtaaggaaagggtcactatcaaagtttccacccagcacttttgttgtcaccggaggaggcaaagcattaagtggattaagcacaaacttgcccttatgtggcatttcataagcttctatgttccccctcaatatggactagaaacaatgtgggcttaaaattgaaaatattcagttttccttgctattataaagtactttttaatatctatgaaaacttgtcactttcataaaatagacaagtataaaaactcataggggcttttcataacaatgaatatcattttagaaattggagacatttcgatatagctaattacttatctctttaagaattaaaaatattttgtaaagtgatacttgtaaattattttcatgatgtctttttattacaaagttgttttcaggatactaacatttgctttggtttgagaaagttggttttgtcgtggtaacggctttacgtggagtatctgtttaacatccttaatccaatgatacttaaattctgtaaacaattaacttcaggtgmctttcacttataaattacatccagcaagggttgacagaaagatttttgtcattaatgtctttcttctcttttcagtaagtccatttgtcacaattatacagtagaatttgttgatatcgcaccaaagaagaattttgtt

SEQ ID NO: 16426 - DNA, 486 bp, Homo sapiens
taacagagtcaagtcaaaaattgattttttattggataggattaactttagctacagaaaacagaaagtttaaatgactggctttaaaaagcraaagtttacttgctttcatttatatgcaatctggggggttgcgggggaagatttgtttgtgggtttcccattctcaaggtgccaggctcctgtgtttctgccccatatccttagagggagggtttcctcctcaggattgccttatgtgcaaggtgactactgaagctccattttttatgcccaaattgtagcaagaaagagaaaaggaagaaggaacagaaaggcacatgacatcacttcaaataaaattagggggaaaataataacagatatctgataggaaactaacagtaccttctgcaataatgattacatttctggaaaataaatgttaagatccttgaaaacaaggagtaatagttgaggaaaagcttcttagcagcctgggactaa

SEQ ID NO: 16427 - DNA, 550 bp, Homo sapiens
tagatttaagtaagtggaatttttttctttttctcactcttgcctctggaatcagaaagtgcaaacccttctttaatggtgttaattttaaatgtaatgatactttaaccttgaagaagaaaggggccttaaaaagggagaaaacaatctcatggtcttttgcttattaacatacagtgcagcgagatacatatgtttkatatatatatatatatatatatatttctcacatttagtttctatatgagatatataacatagtaatgtctttaagaaaatatactgatgtattatatgctttaatatattaaaataaagacactaatatattaataaagagctaacatttattgagggcttaatatgtgctagatgctgttctaagaaacatttgtttccttctttcactgcctaacagttctaaatattgggcacttttcttaagccattttactgaggcaaggagaagttaagtaatttttccaaacctacatattttttaaggtgtggaactcacctttgaatcaacgcaatctcacccaagaatccc

SEQ ID NO: 16428 - DNA, 550 bp, Homo sapiens
tagatttaagtaagtggaatttttttctttttctcactcttgcctctggaatcagaaagtgcaaacccttctttaatggtgttaattttaaatgtaatgatactttaaccttgaagaagaaaggggccttaaaaagggagaaaacaatctcatggtcttttgcttattaacatacagtgcagcgagatacatatgttttwtatatatatatatatatatatatttctcacatttagtttctatatgagatatataacatagtaatgtctttaagaaaatatactgatgtattatatgctttaatatattaaaataaagacactaatatattaataaagagctaacatttattgagggcttaatatgtgctagatgctgttctaagaaacatttgtttccttctttcactgcctaacagttctaaatattgggcacttttcttaagccattttactgaggcaaggagaagttaagtaatttttccaaacctacatattttttaaggtgtggaactcacctttgaatcaacgcaatctcacccaagaatccc

SEQ ID NO: 16429 - DNA, 519 bp, Homo sapiens
  misc_feature (1)...(519): n = A,T,C or G
caaactcacagcgcaagatatttttattagatgaagatttcatggggaggtgaagagcctttcggtagaagagattaaaaaaactgaactccaggctgggcgcagtggctcacgccagtaattccagaactttggraggccaagaagggcggatcacaaggtcaggagatggagactatcctggctaacacggtgaaaccccatctctactaaaaaataagtacaaaaaattagccgggcgtgctggtgggagcctgtagtcccagctactccggaggctgaggcaggagaatggcgtggacctgggaggcggagcttgcagtgagccgagatcatcgcgccactgcactccagcctgggcgacactgcgagactcttcctcaaaaaaaaaaangctccccccccacaaataaataaataaataaataaataaataaataaataaaaataactgaattccagtctcagctctgctacaaactcaatagatgacttgtagcaattttgggcttcagtttt

SEQ ID NO: 16430 - DNA, 622 bp, Homo sapiens
aaaccaggtattttaagattatgaaagtaataataatatctgtattaccaagtattgaccactaatgatgtgccaagggttttatacacattattttataaactaatattgacaatatcaaagatgcccttccaggtaagtatcactagcactgttttgcagatgatgaaactgagccttagcaaggttgagagatacattcacagacacagaagtaacaagtgagggatctggaattgagttctaaaatccttgccctttgtctgaatagttactactattttatttcacatataattcaattttcctttctcagccgtcttctacctccagttcyttttcttctgtctgtacctacattcacttctctcctcttccttttcttcccatctttgcctcaagctggccacagggctatcacatctgttaccataatcacatcttaagaagcaggccaggccatagaagggacttacttaaagcccttccagctctacacactacttcttttgtgttttccctttgccttgtgaaaagggcctaggcctgctgaaagaaattgatctagaagcctctcttcagtgtgaacataggtgaaaaattctttgatacactgttttaa

SEQ ID NO: 16431 - DNA, 573 bp, Homo sapiens
tgaagsaaatttggaaatgaaatataagttgtacaaatggacaagtggcataatattatgttgtacaaagggactttcattattcctgatgaaaactcatgccagagcttacatttgttccctccagaaatctcagtaaaattttaaaaaaaagaaacatttataaatgcttatggacaaaaggaatggaagagaagatgatatcagacaaaagacatcaatgaaattttggaagatgtaaaatggaggggcccgtgccacctggaaagtaagctggtttgtgctgcgggacccaggagtggtcaggaatcggaggctgagcagcagtgttgatgatagtctttaaaaagaatagataagaaccccagatctcctttcccagcccacgcagccatgcaactacaccacctccaccactaagggaagtttattaactccaaaggaagactttggagcctcaatatcaaaacatagctagacaccagatattgttccaaaaaagggaattttgtgaacatttgggtactgagatgctattcccagatccttcccctgcagggcttttaccttccc

SEQ ID NO: 16432 - DNA, 367 bp, Homo sapiens
gggggtaggaggaaatcctggttaacaaagtgttacaacatctctgaatctcctaaataagctttctaggatgcaatgatgaaatgatagcttattctgcagagaggaagatccaattatcttcatagtaacaattytaccttcttctgtttttctgatctgctagcaagctaagagaatagcttttgagagaaaaagttgaaatttcattaatggctgatggaatggctgagataataatctatctacaacatctgtcaccctccttatctcttgggtggattcagacctgccctagaatgagaggagaaggtggaccctatatagcttagagcatgggtttcctttgagtatccttggcttaaaa

SEQ ID NO: 16433 - DNA, 562 bp, Homo sapiens
tgtcttttgctcactgtgtggcttagaaagcaaaagaggatcccagacactgtgcacagttatggtgtgagctcagccaagggggattggagcagatgatgaccaaatctgaaggccagccagtggggagggggttccagccatggggcttctgtcccaggaagggcgctcgtcctggatccagtaggaacaagcaagagagccaggctacaaaaagaaaccatgtaggttttcaaaaagaaaaaccatgtaggctttgaaccaggaaaaaaaaaaacttactataaaaccaggagaacatggcagcatttgggacttatggggagaggccaaggtccagtcacatgaactgggacactgagttagattaatgagagcaactagctgcagagtccaagwactgttgatctcaagcagcatcaggctctcctgccacaggatgaaattggtgttctgaactgctcaatggtgttacggttgagaggagaaggaatagaaaggctctggataagactgggcctgatacatttcaccttttctatcaaatacactaatttcggga

SEQ ID NO: 16434 - DNA, 485 bp, Homo sapiens
gatgtaacattatttgttggatttgttgggcatttaggttatttccattttaatttttcaaacattgccataatgaaacacacgcatatgcacacacacacacacacacacacacacacgtacagcactgtgggatgttctgattattcccttaggatacattttaacagataaaattgtgggaacagtagatatgtatacttcttttttaaaacattttttaaaaaaactaattttggacttgaagaaaaatggtgaaaataagacagagatttacccaacacaccccacccagattccctgaaggtaacatctagcataaccatgttacartgatgaaaaccaaataattacattggtatgatactattatctaaattgcagactttaattgaatttcaccaattttattctgtaacatctttttctgtaccaggattctatatagattttcacagtttatttggttgctattttttctgaaa

SEQ ID NO: 16435 - DNA, 1433 bp, Homo sapiens
ctgcacagttcaaacctgtgctgttcaaaggtcaactctacttttaaaaatctgttaagaaggtagattttaatttagctgttcttaccacaataaaataataaagtaataagaattgagaaaacacacacacggaaaaacacacaccataaaacttcagagcacaattaaatgatgccattactctgatctataaggaaactcattgacataagaaaatattgacataagaaaatattgtcttgatttaaaactatctagaaataaattattttccataatgaatctgtctctaaaattgatttatgtgatcatattgttttataatcatattgttttataatcaacaacacakactgaattcaggaaatgattggttaaatcagtaactccatatacatgctaagtatttatttatcacctgccagaaatgtaattttgaggacttttttggttctttcactggtctttgtataggaactaaagaatataacctagctagatattgtctgacagtgtttccgttgggtaacataccgtgttaaaaggtggaaaattctaccaaaaaaaaaaaatgttagtttctggatgttctagaaaaccaagcaggaggtcttttcaatgctgggtccaaaattctgcttgaaaagtacaggccagagctgggcggcgcctgagcttttgggtgtgtggcgatagcagtttaccaacaacaacccttcccattctaaccatcaaaccctaatttccggtctttgacattctttacttatttgtgttatctctttggcttgtgtaggagttgaagtttgccaaagtatactttataataagtgcacttcatgcttctcactgagtagagaagatgtgataatatttgaatggccaggagtagaaattgaataaccatgaattctaaaatgctgtaattatttctgaatagagtagagagactgcaaaactattaccctaaagatctaaagcccttcaccacttattttgtactcagtgataaaagcaattatgaaactggaatcaaatgactaaatataatatataatgtgtagctacagtaagtcacatttctaaaacggaagatcataaatcatcatcacgtgttcgctttcgtctcacattcgacggccctctccacatttgtccgcctactgtgatgtctatccctctcagaatgaatcctttggtctcattggagtgatctatttaagtcctggtgagatagaaaatcatattcgtttattcacaaacactaatcagttattatttgttaagacagacaacattctgtcatgttctcaaagagatggtgggtaagtacacacatatttacagattgttgtgagaagggctacaataaagacatgctcttggtcattaataggggcaccgaatttgagaccagtggaaaatgatta

SEQ ID NO: 16436 - DNA, 638 bp, Homo sapiens
ttaatctaaataagtatttttggtaaatggttttgcttcaacttggtgtaactccattttcatcataactgtgtctcttaaaatttttactctagaggagcttttccttgaccttctgtgtattatgtttgatttaacttttttgagttattgcccaaatgtatgtcttctatctctttctctctcatcaagacctgatataagagctggggtatttagaagatgaagactagtatgaactcttgagatttttaatatcttttattgtactcatttctctgagagagacagagcagttaattgagaggaacttggtttctatgtctgggaatattatcatgcctggactttataataacactctttaaaatgagaagcataaataagattgtttctaaggtctctcttaccatggaatttctattccattatgagtacggaggcctcgattctagatcaacctcaagagcagtaagccacttgtataataatgaattgtccaaaaaggggaaaatgaagtgctacaggaccaaaattttagcactcstagtccacaactcttctatacaccatgtcaaactttccattctgtataatgacttggggcctaactttaacattaataagcaacactcctt

SEQ ID NO: 16437 - DNA, 541 bp, Homo sapiens
tctgaacttagaaaacaagtttttttgcagaaaggaaaaggtgttcaagatgatactgctcagagctggcagatgactttgaatctactccccaaatttaatatctcagatgttgatgtgggaggagcacagtgaaatttttagcactcagcaactttgaagaatgaagttctcrgaatgattaagcattctaattaatatatatggcatagatatcatgtgtggaataccagttttttagagaactgaaatagtatagaatctatttttaagtaatatcaaataatttagtatttatttgattactcagaagacacatgaggttctcaaagaatctgcataaataaattttagttattattctgaagatttagaaaaacatagtttaaaaaatattttcagtaattaaaaggtgtcattttttatggtataatgcagtccacagctcacattctaacagtgtctcttacttgctaaatattataagcaatttactctctctaagcatctttcattatcattacaatcattaactctttca

SEQ ID NO: 16438 - DNA, 527 bp, Homo sapiens
gccagttgacttatttttctactaggtcaactggcctagaatgtaagcgatttaaaatataaatgctagcttgtttccttgttggtttcataagttttattgtaaatgcaattttgattgattgaagtcatggggatccctgtagcctaagtgatgctctcattcctttacttcttctaggaggtatggggggtgctactgaagaggggacattttagggccctttcagtgtcccaggtttagtgagggaggaggagttctaaatacagttctcccattttgccactgacttgcagcttagtctttagatagtagcatgtattgtataattatcttcaggataatgccacatttgcattcattactgttcctgctcatatatttgccttccaactctttttgaaaggagggttgataatttcctttatttcctgctagtcataatatgtaataagattctgtttcwcacagggtctaattccacatttaaaatggaagaagctctaccgtcttatgatgaaaataaa

SEQ ID NO: 16439 - DNA, 1397 bp, Homo sapiens
gcctcttgttttcctttgaaatactgtcaccgaaggagataaattattctcatctccttagacgttggtaaaagatgagagagctacacacattaaaaagaattttcagtctttaagaccaaattcactgaggtctccctgtttcccagcacatggtcctatattatcacatgatatatgtgttagtctgttttcacactgctataaggaacagcctgagactgggtaatttataaaggaatgaattttaattaattcatagttcagcatggttgrggaggcctcaggaaacttacaaccatggtagaaggcaaagggaattaaggcatcttctttacaaggttgcaggaaggagaagtggcaagtgaagggggaaatgccctttattaaaccattagctctcctgagaactcactcactattactagaacaacatgggggaaactgcctccatgatttagttacctccaccagcctctcccttgacacatgggaattgtggggattgtgggaagtacaattcaagatgagatttgggtggggacacaaagcctaaccgtatcaataggtgaccagtaagagttgtttaatgaaaagaggcactctaaagtaatttttggtcctaggtaaactggacttcagaaatcctgatatatgaccacgcaaaatgaacaaacacgaatcatcttttagatgttgactctatcgcacttaggtgttttgtttaagtaacaacaagcctctcccacctccagagagaggctatagccaggagacctaaagcatgaatgttaagctataaattatcaaaggaagcatatttacatatctaataaaacaacaggaaccaccttatagaatcataatgcaacatgagtttttcagaattcattttttaaggggagagaaatctctttcctcactttttcttccaattaaaagtctcttaatcctttctctgccttcaaagtaatgcttgagttttagaatcccagagcgagctggaagggagccaaaaggaagcagaatccaacccactcattttacaaatgaggaaaacctgattaactgatttgtccaaggtcacatatctattaatggcatgctcaggactgaaacccagatattctgattcccaggaaatccgaactttgcttccaggcttgtaaaggtgtaattgcctccatcatctgaaattgagatatgcctaatactgctgggttcagtctcttctcaagatggatgtgtaattgtctaagcatcatctgttattctgccaaagattcaacacagtactcagtgggaaaccagttctaatttaagtcagagcaaacgatgtgtttttttttctcttgcagggcatgacaagtttcagaaataatgagctctactcactg

SEQ ID NO: 16440 - DNA, 523 bp, Homo sapiens
ccaactttaactgacctcactatcaaaatgtaacccatccccttccacaggagccattctataaagtgtgaacccacgccccagcctcaatcacattagaccaagtttgagtgacatcctacaagctggaccaatcagaattccttccttctaaatttggaattgagatcaacaggtaatcagggagattatctccatttgtctggacatgtaatggctatacttaggaaccctggtgaagcctagaacaaagtgaggcaacctacagggagagcagaraatgatgtggattcataaagaaagagagacaagggagagggagagagtgctgagttcttggcaacatccagtgcccagttgcaacctttcctgaggcctggctgcattcttggtcttcgtttccatgtggaatgacagcatgaactggtttgtccagtttaatgataatggtgctccccctttcaccaatttaaagtccacagacaccctatttctatgggacttcaattttagtcatgtaaga

SEQ ID NO: 16441 - DNA, 575 bp, Homo sapiens
tgtcctatatctaattggaagcatgggaacccttctttttcatgtctctgatatactgaagacttctataacagagttttactctctcaacttgggagtgacaaggcattcccagagaagtcctttcttctgctaaaagcgcccctcccccacaccccactgacacacaaaaatcaggaatagcagagggaacatttaggtttccaaaagaggacatcaattgtcttgccaatatcccttcctcttktaatgtaagaatgaatgtaagaatgaagaatgctaccttctctgtcaatgggtcccctcttacctggagtcgttttcctggagggaaagacgttcctccctgaaatgcaagacctcttgctgcttctccctcaagtcttccaaaagctgctgcctttccaccttctggtgctccagctccttttccagctcttgaaggtgggatcgagaggacagcagagcctccctcaggctttctgtttcctgggagtgctctggtgagaggaacacaggattgatttattatcatggggccagagctcagctggaagatgaccccaagcacatcc

SEQ ID NO: 16442 - DNA, 504 bp, Homo sapiens
caactctggctctaaagccccaagtatctttctatacaagactttgatcccctcattaatgggtagataaactttgcatgctaaaaagcatcaagtacttttttctgtgtaacaatgactccaatgctgagtggcttacaacaatgattcattatttctcccaattctgtgggttggcttcrggttcttctgttggtcttgccttgactccctcacgtggctgaattcagttggagggttgtcttggggttggattcagggaggatagctggggcagtcgatcatccgtttgcatgcggtccttcatcctatatgaatggtggtctcagagcatggtggtttcagggtatcaagagagtggggctggatgctgcaaatttttttgaggtctagcttcagatgttgtacaacatgacttccactacattctattggccaaatcaaatcacaaggtcagctcagattcaagggaggagaagaataggctctacctcttgaaaggtg

SEQ ID NO: 16443 - DNA, 654 bp, Homo sapiens
tattaacatatctaggaaacaatagccaaataaataacattataagacaaagcataaacgagaatgtactaaagttactaaaatggttaattggtccttcatattgcttcatagaaatgggggggtagaagtcttaggcatatggcagagcagatgcagactcaataaggttggttggctggtgtctggtaggcaaaggtctttatccactgaaagaagtttgaggctttcagagttatttcactttaacctataataatatttcatgcccaaaatatctttctactggcttgatttttttacatggagaaatgatttccatcataagaaagggaagaaacagtctctgagctatttgcaatactgattatatsaaaaagggatcacgtcactgaaatctctgttgagctttatgcttttcctggtaaagttagtagaatgggtgaaatacttaaacattttcttttggctgggcacagtggctgaaacctgtaatctcagcactttgggaggctgagtaggtggaccgcttgagtcaaggagttcaagaccagtctgggcaacatggcaaaactccacctctatgaaaaaatattaaaagaaaaaaattagctgtgtgcctgtagtcccagctacttgggaggctaagatgag

SEQ ID NO: 16444 - DNA, 654 bp, Homo sapiens
tattaacatatctaggaaacaatagccaaataaataacattataagacaaagcataaacgagaatgtactaaagttactaaaatggttaattggtccttcatattgcttcatagaaatgggggggtagaagtcttaggcatatggcagagcagatgcagactcaataaggttggttggctggtgtctggtaggcaaaggtctttatccactgaaagaagtttgaggctttcagagttatttcactttaacctataataatatttcatgcccaaaatatctttctactggcttgatttttttacatggagaaatgatttccatcataagaaagggaagaaacagtctctgagctatttgcaatactgattatatcaaaaagggatcacgtcactgaaatctctgttgagctttatgcttttcctggtaaagttagtagaatgggtgaaatacttaaacattttcttttggctgggcacagtggctgaaacctgtaatctcagcactttgggaggctgagtaggtggacygcttgagtcaaggagttcaagaccagtctgggcaacatggcaaaactccacctctatgaaaaaatattaaaagaaaaaaattagctgtgtgcctgtagtcccagctacttgggaggctaagatgag

SEQ ID NO: 16445 - DNA, 1438 bp, Homo sapiens
gcatgttagaagcacatctgtggatgggagtaaactttatttgttgtttatcagaaattcaaatttaactgaacatgatgtattttatctggtaaatgtaggtgcaacattatcactgatgaaagttatcattgtcaatggagagtatgacttgtggcagaatggccccctaataacttcagaactagacagatgaacccaagcacagcatgactccaggcaagcctccccactacaaatttaaaacctgttcctagagaagcagaagtgcaaactcaagtaaatgctgccaccccaaaataaacgttagatgtaaggataagaaaaactgaaagtaataggatggaggtagagtttagatatactaatttcagaccaataagctctaaggcaataagcatttttaggtatatacctaatagcaatggatgtgtatttttattaaaagtaatgtacaatattagtcataaagctttcttcataatattcaaagctgaaaataacccaatgttcatgaaaggagaaaaacaaattgtaatatattaatacaaggaaatactaaacagaattgagaaaaaattttgctatgcacaagtacttggataaatctcacaaacaaaatattggacggaagaagtcagaaattaatacaaattgtataattccatttatataaaatttgaaaataagacaaaaatacttatggtgatgaaaatcaagatagtgattactttgaggaggcgtgtgtgattatggtgggacaaaagcaggatactagggtgctgaacatgctgtatttttgatctgtgaaattgtcacctagatatgttcctctgcgaaaaatcctcaagcaatgtgcttataatttttgtacttctaaatatattttacttcaattaaaaagttacataaagtaaaggaggaagagattcttatgcacagacacctaagcagggctttggaggctgagtaggagtgagaatgtgaaagagttggcatatggaatgcatgaagtatgaaatggaatggggtatttgtagaaccgcatgcactttaatgcaatttgccttctgtgtggtaaggagaagtggaaggagaggaggctggaaatacaggtaatggcagcttaatgtgggcttgaaggtcatgtgtttcaggtgactctaatgactcaactcactctcytagcctcatgtcccatttcagccatggctggcttccatactgacttcaacttatttttgtagatagtgtcttacctcaagcaggtactgcagttttttaacttttcaccctggaaaggctctcatcccatagaaactcgaatgctctttcctcatgcctacataggcagcctggaaagtgcaggcaaccctaaccaacaggagatgggaacttaaagataaatacttgcagttggtcctcatggagacaattc

SEQ ID NO: 16446 - DNA, 1438 bp, Homo sapiens
gcatgttagaagcacatctgtggatgggagtaaactttatttgttgtttatcagaaattcaaatttaactgaacatgatgtattttatctggtaaatgtaggtgcaacattatcactgatgaaagttatcattgtcaatggagagtatgacttgtggcagaatggccccctaataacttcagaactagacagatgaacccaagcacagcatgactccaggcaagcctccccactacaaatttaaaacctgttcctagagaagcagaagtgcaaactcaagtaaatgctgccaccccaaaataaacgttagatgtaaggataagaaaaactgaaagtaataggatggaggtagagtttagatatactaatttcagaccaataagctctaaggcaataagcatttttaggtatatacctaatagcaatggatgtgtatttttattaaaagtaatgtacaatattagtcataaagctttcttcataatattcaaagctgaaaataacccaatgttcatgaaaggagaaaaacaaattgtaatatattaatacaaggaaatactaaacagaattgagaaaaaattttgctatgcacaagtacttggataaatctcacaaacaaaatattggacggaagaagtcagaaattaatacaaattgtataattccatttatataaaatttgaaaataagacaaaaatacttatggtgatgaaaatcaagatagtgattactttgaggaggcgtgtgtgattatggtgggacaaaagcaggatactagggtgctgaacatgctgtatttttgatctgtgaaattgtcacctagatatgttcctctgcgaaaaatcctcaagcaatgtgcttataatttttgtacttctaaatatattttacttcaattaaaaagttacataaagtaaaggaggaagagattcttatgcacagacacctaagcagggctttggaggctgagtaggagtgagaatgtgaaagagttggcatatggaatgcatgaagtatgaaatggaatggggtatttgtagaaccgcatgcactttaatgcaatttgccttctgtgtggtaaggagaagtggaaggagaggaggctggaaatacaggtaatggcagcttaatgtgggcttgaaggtcatgtgtttcaggtgactctaatgactcaactcactctcctagcctcatgtcccatttcagccatggctggcttccatactgacttcaacttatttttgtagatagtgtcttacctcaagcaggtactgcagttttttaacttttcaccctggaaaggctctcatcccatagaaactcgaatgctctttcctcatgccyacataggcagcctggaaagtgcaggcaaccctaaccaacaggagatgggaacttaaagataaatacttgcagttggtcctcatggagacaattc

SEQ ID NO: 16447 - DNA, 519 bp, Homo sapiens
ttagtcatcccttttcttccatgatcttgacacttccaaagagtactagtgagttgtttgatagaatatctctcaacttgcatttatccaatattttttttcatgactaaattgaacttacacattttggccgagaatagcataaaaataatgtacccttctcagggyatcatatcatggtcagtgtaaactaaattctcagtgtggtgttatgaggctatacggtggcatgacttagaggcctaaacccatgtaaaggccagtttgtggttacagagtctcaggaaaaacttgcttctttacgcagagccaagccttagacaactgtgttttattgtttttattattactattaatttgccattttctttcaccttttaactacaggtatagagtttcatatttccattttgtggatgtggatctgattttatacctcacagtgagcctcagctttatctctttcctccatgcacacgctttactaaactgagagctctagaccttaaaggatgaaca

SEQ ID NO: 16448 - DNA, 536 bp, Homo sapiens
catggttaccctatttgcaaacaatttgggttctttccagagcaatttggcacagcaataaagaaggcttttattttctgttcattttctgccagttcactaaaaacctcaaagtaggaatggaaacttgtgttaattatagttctactgattgtggatttgtatgtgtgtgtatatttgtattaagatacaaaacatacatcagtaagcctttttgagaactacacagtttgggaatccgctttcaagaatcccgtaacattagcaaaaccagatcttttgctgcttactgcagaaggtaagagtagcaaataaatattctctattctccagtaaacagaggaataatttatttgttgctataaaggtttgtrtttttactttggctatggaattagggatgctaaaagaggctgttattgtcttttgcatagcagacctgataagtttttatagaaagcttactatttgtgggattatgttgtgtaatatatggaaatagttcttgcactgaattattacagtatgtcatgtat

SEQ ID NO: 16449 - DNA, 544 bp, Homo sapiens
ggcacatggtagagcagctaaaaataaaaccagatactagaatttcacacacaaaatacaaagttatagataacacaaaatagacagatgccgtacagtatttgaaaagaaaaaatgggggagatatacctaatgctagatgacacgttagtgggtgcagcgcaccagcatggcacatgtatacatatgtaactaacctgcacaatgtgcacatgtaccctaaaacttagagtataataaaaaattttaaaaaaataaataaataaataaataaataaaaagaraaaatggtagaaaaatcaaaggtttttttgaaggttattgctttttcatatgctcaaaaatgttcattgtaacacagatttttacacaggcactctgtcagcaacctaaatgtctaacaataaggtaatggctacatgaattacagtattcctttaaatactatgatatttattatcatagtatttagttatttagtattgactatgataaagcctatttaaattataattctaaggtttagataataacatgaggtcat

SEQ ID NO: 16450 - DNA, 544 bp, Homo sapiens
ggcacatggtagagcagctaaaaataaaaccagatactagaatttcacacacaaaatacaaagttatagataacacaaaatagacagatgccgtacagtatttgaaaagaaaaaatgggggagatatacctaatgctagatgacacgttagtgggtgcagcgcaccagcatggcacatgtatacatatgtaactaacctgcacaatgtgcacatgtaccctaaaacttagagtataataaaaaattttaaaaaaataaataaataaataaataaataaaaagagaaaatggtagaaaaatcaaaggtttttttgaaggttattgctttttcatatgctcaaaaatgttcattgtaacacagatttttacacaggcactctgtcagcaacctaaatgtctaacaataaggtaatggctacrtgaattacagtattcctttaaatactatgatatttattatcatagtatttagttatttagtattgactatgataaagcctatttaaattataattctaaggtttagataataacatgaggtcat

SEQ ID NO: 16451 - DNA, 571 bp, Homo sapiens
ttgaaaattaacatacgacttttgactttccccaaaattaagtcgcaatagcctactgctgactggaagccttccaatagcataaagagtcaattaacacatattgtgtatgttatatatattatacactgtaagtttactgtaaagtaagctagagaaaagaaaatgttattaagaaaatcgtaaggaagagaaaatatatttactagtcagtaagtagaagtggatcattgtgaaggtcttcatcctcatcatcttcacactgagtagactgaggaggaggaggaagaggaggggttggtcttgctgtctcagatgtggcagatgaagaagtggaggaggaggarggggagacagcagaggcaggcacattctgtgtaacttttattggaaaaaattcatttgtaagtgacctgtgcagttgaaacccatgttgctcaagggtgaactgcacatatatgtacatgcatgcgtgtgtgtatgtatatgaatattatcagaaagctaatgtaaaagtgatagcaaaagatttcatatatgttttctatgcttcctgccacaaaaacgggca

SEQ ID NO: 16452 - DNA, 571 bp, Homo sapiens
ttcatcttccacttccaggtgtgcaggtgtgcctgtttcatggattggccacctgtcaaatgggaatctgatctgcctcactgacagaccctctcattcacaataagctttcattagtttactaaatggtgtatccctcttaatcttaaactgcaccacagaaccaatctgccccaccaccttcaaattagtatgatcgttgctcttaagtgttgacacctctcttggcatttcatgggccacagggaacaccagagatatcagttgctrcttcactaaagaggcaccatgtccacaccaaatgagctcatcagcagcaccagcagcagcctctccttatttttagatttcagaagtctaactatgatgtacctaggttttttcccccaatatttatctttcttggggttggctctataagggggctctgttttggttctgtaagtcaatggttttcatcaaacttaggaagttttcagccattatttatttttttttccttcagatgagtaagtatgggaaattaattttcaaaaaataaaatgttattttttttcctgcccaattgtct

SEQ ID NO: 16453 - DNA, 1856 bp, Homo sapiens
gttctgtcacccaggatgaagtgcagtggcatgatcttggctcactgcaacctctgcctccygggttcaagcaattctcctgcctcaacctcctgagtagctggggattataggcgcatgctaccatgcctggctaattttttttgtatttttagtggagatggggtttcactgtgttggccaggctggtctcaaactggctggtctcaaactcctgacctcatgatccgcctgccttggcctctcaaagtgcgggattacaggcgtgagctactgcacccgaccaattcttgtatttttttttttttttttgtagagatggggctttgccatgttgcccaggctggtctcaagctcctgagctcaagtgatccgcccaccttggcctcccaaagtgctaggattacaggcatgagccaccatgccaggcccccaggtggttttttaattcgattctgtgcccgttaaagtttgagaagcaccaagtttgtgattaggtggttagtgcaaggggctttggagttggacagacctgggattgaaacctggtttggccacttactacctgtgtgactttagataaattatttgaactctctgtgacagtttctcatatgtgtaataggggaactctctatttcatagggttgtgggggagagtaaatgacatggtgcattttgcaactgacactatcttagatttaatgaaatttagtaatgtctgtatcatattaagcactgagtctagcacagcctagcatactcaataagtgttattactaataattaaattaggcaaatttacaggaataaagaggctttctcctcttcctctttttctctttatctctcaatgagtacgtttgtctgcagttttataaagctgtattgtgtgtgtacactctttggtgttttgcctagcattatttaatggtagttatagcagcagcattaacacatcttgtacttattaatgtgccaggcataatttttatgtactttatgcatatattatttcattcagtccttagagcaaccatgtgaaataaatattatctccattttcggatgaagaaacagaacaaacaggttaagtgacttgcctgagatcacatagccagtcagtggcagaatcaggatttgagctgagacactcttattccagcatctgtgctctattttcatgtattgctattgctctcaaacttatgtggtgtgatggaaatcaggaaactttgattggatacttgattctgccactaatttatttgtgaccttggtcaagtcacttgtcgtctttgggcctatttccttattataaaaatggagggattatcaaactcaaaagcaattaaacaaaaaaagacaaaaaatgaaaaaagagtaaaacacaaaaacggagggattagatgagatttgtaaagtctgttcagtgattcattcaacatatagtgatttcaagcaaagattggaagaaaattttatctagggaattggttcaaaagtacttgttcaagcagggttggtgtcattaagaacaagggggtttgaatcttgactcagccacttcctggctatatgaccttgggcaacttacttaacctttctaaacattgatttcctcgttagtagtggggagaatagttcttaccttgcagggatattgtgaggtttgaataagataatacgtattagcacctagcatatgtgaaacatgcagtggatactcaatatccgtgagttgtcttttcttccttccattcattcgggagatgcttagggaagcagatataccagattcaaaaggatttagaccctcgcttggtccttatgtccttttctgtaatggtattctc

SEQ ID NO: 16454 - DNA, 1856 bp, Homo sapiens
gttctgtcacccaggatgaagtgcagtggcatgatcttggctcactgcaacctctgcctcctgggttcaagcaattctcctgcctcaacctcctgagtagctggggattataggcgcatgctaccatgcctggctaattttttttgtatttttagtggagatggggtttcactgtgttggccaggctggtctcaaactggctggtctcaaactcctgacctcatgatccgcctgccttggcctctcaaagtgcgggattacaggcgtgagctactgcacccgaccaattcttgtatttttttttttttttttgtagagatggggctttgccatgttgcccaggctggtctcaagctcctgagctcaagtgatccgcccaccttggcctcccaaagtgctaggattacaggcatgagccaccatgccaggcccccaggtggttttttaattcgattctgtgcccgttaaagtttgagaagcaccaagtttgtgattaggtggttagtgcaaggggctttggagttggacagacctgggattgaaacctggtttggccacttactacctgtgtgactttagataaattatttgaactctctgtgacagtttctcatatgtgtaataggggaactctctatttcatagggttgtgggggagagtaaatgacatggtgcattttgcaactgacactatcttagatttaatgaaatttagtaatgtctgtatcatattaagcactgagtctagcacagcctagcatactcaataagtgttattactaataattaaattaggcaaatttacaggaataaagaggctttctcctcttcctctttttctctttatctctcaatgagtacgtttgtctgcagttttataaagctgtattgtgtgtgtacactctttggtgttttgcctagcattatttaatggtagttatagcagcagcattaacacatcttgtacttattaatgtgccagkcataatttttatgtactttatgcatatattatttcattcagtccttagagcaaccatgtgaaataaatattatctccattttcggatgaagaaacagaacaaacaggttaagtgacttgcctgagatcacatagccagtcagtggcagaatcaggatttgagctgagacactcttattccagcatctgtgctctattttcatgtattgctattgctctcaaacttatgtggtgtgatggaaatcaggaaactttgattggatacttgattctgccactaatttatttgtgaccttggtcaagtcacttgtcgtctttgggcctatttccttattataaaaatggagggattatcaaactcaaaagcaattaaacaaaaaaagacaaaaaatgaaaaaagagtaaaacacaaaaacggagggattagatgagatttgtaaagtctgttcagtgattcattcaacatatagtgatttcaagcaaagattggaagaaaattttatctagggaattggttcaaaagtacttgttcaagcagggttggtgtcattaagaacaagggggtttgaatcttgactcagccacttcctggctatatgaccttgggcaacttacttaacctttctaaacattgatttcctcgttagtagtggggagaatagttcttaccttgcagggatattgtgaggtttgaataagataatacgtattagcacctagcatatgtgaaacatgcagtggatactcaatatccgtgagttgtcttttcttccttccattcattcgggagatgcttagggaagcagatataccagattcaaaaggatttagaccctcgcttggtccttatgtccttttctgtaatggtattctc

SEQ ID NO: 16455 - DNA, 537 bp, Homo sapiens
tacaacttgacattctggtatacatatatactatggaataatcatcacaatcaagctaactaacatgtaaatcacctcaatcaatcccctcacatagttatctttttcttttgggtgaataaaaacacataagaactaccctstcagcaaatttcaagtatacaatacagcattgctaactatagttacattgttcgaaatcttacttatcttgcatcactgaaaatgtgtgccctttgacaaacatcaacccatttgctcctctttccagcccctgccaaacaccattctaccctctgcctctgagacagcaagatagagcttaagtagcaaccagctcactcacagtgggtgagtcacatcagcagcatcaagacaagacaaggtaagtcactgcagccataaacagcagcatgaacaccaaagtatcagtcaaactcctaagtgaaggaaatcccctctcaaagatcaccttacaaaattcagtttgatatatcaagctcgaatatttgaaattacacatataaatgtgattat

SEQ ID NO: 16456 - DNA, 665 bp, Homo sapiens
atggttttcgttcataaaaaatgagagagactggctttatctacaataaagactttggatggggcattctggctcttcctggatccttcttttctcctccctttaagtcgcaatgaaaaatcatctaccaaatacagagaaataacaagttgtcatctagaggctgctttggcccagcttgtaatgctaagtgacgatgaagacacattcccctctcaggtgcttgccaagaatggatttctaaatatttacatgtgacatgatgtgttagtscattttctgttgctataacagaatatttgacaatgggtaatttataaagaaaacagatttatttagtatggatttggaggctaagaagtcaaaaattgggcagctgcatctggtcagcatctggcgaaagcctcgtgttgtgtcacaacctgatggagggtatctcagggtgagaggggcacacaagatagagccaactctgtaacaacccactcttgtgacaactaacccagtcctgtaacaacctactgatccacaagcccattaacctattaattcattaattcatgaatgaattcatctattcatgagagcagagcccttgtgacccaatcacatcttaagggccccacaacttaatactgttacgttggggattaagtttcaaaatg

SEQ ID NO: 16457 - DNA, 665 bp, Homo sapiens
atggttttcgttcataaaaaatgagagagactggctttatctacaataaagactttggatggggcattctggctcttcctggatccttcttttctcctccctttaagtcgcaatgaaaaatcatctaccaaatacagagaaataacaagttgtcatctagaggctgctttggcccagcttgtaatgctaagtgacgatgaagacacattcccctctcaggtgcttgccaagaatggatttctaaatatttacatgtgacatgatgtgttagtgcattttctgttgctataacagaatatttgacaatgggtaatttataaagaaaacagatttatttagtatggattyggaggctaagaagtcaaaaattgggcagctgcatctggtcagcatctggcgaaagcctcgtgttgtgtcacaacctgatggagggtatctcagggtgagaggggcacacaagatagagccaactctgtaacaacccactcttgtgacaactaacccagtcctgtaacaacctactgatccacaagcccattaacctattaattcattaattcatgaatgaattcatctattcatgagagcagagcccttgtgacccaatcacatcttaagggccccacaacttaatactgttacgttggggattaagtttcaaaatg

SEQ ID NO: 16458 - DNA, 2284 bp, Homo sapiens
aaaaatgtacttgctatttttcaaaaaagagttggaaagatttggtgtcaacctggatgtgaggatgaagacaagccagctagaataaatattgattccaagattgagggcagaggtttctgggagtgtcactgatgggaacagacaaaatggaaaaagacttaatgaagaagataatatcctcaagttttgacatctctaatttaaaatgtcaacaagctatttaagaggaagtttctttgtgttgggagccaccttagttgtccagccatattaaggggctgcaatacagtcatgaaggctataaccagcactatggtatcatgcccagtctaaaatgaggctgagctctgaccaatgtgggggctgcatgtgccaggaagaaggggtgccttttctgactggcacaaagatgttgtgtgagctggtagggggcctggccattgcctcaaaatcagtgagagagacaatgtgatgtctggtgaaatgcacaaatttggtttagattagagatggaaagttagtgaaggagaaaaggctttagtaagttagatttctttagggtgggagaataggcaagtcacttaaaccttctgaatctccttttccttatttgtgtggcaggatgcttttcttttctccactccctcacagcttcctcgtaccaagatatgatagctgaatgagatatttggcaaggcagagaaaagagatggagacgcttagcctaattaatgtgctacacttatgccaagaagggattctatgcttacctagcagataatttaccctgaaactggactaggcaggtcacctttttcttcattttattcttgcatatgcaagatctaattatccagacgtatccacagagagaggaaccagatgaaatgaggaaagcacggttcaccttcaagagaaagaagtaggactctggggttttaagccgaggcatgaaatgtaccgattaatagcgtcattttggaaacacaggtctcaggagttttgggaaggttagtatgagcttgtcagcattgcttatgaataacagtgagattgctgctttgcacctgatctcagtcagacctcagaggctcagccactggggctggttatgcagcaggaatatatccatgcgaccagcagggtgtaagaagtccaggccaggacgggcgcagtggctcatgcctgtaatcccagcactttgggagaccaaggtgggtggatcacaaagtcaagagatcgagaccatcctggccaacatggtgaaatcccgtctctactaaaaatacaaaacttagctgggcctgggggcgcgcgcctgtagtcccagctactcaggaggctgaggcaggagaatcacttgaatccaggaggcagaggttgcaagtgagccaagattgtgccactgcactccagcccaggtgagagagcaagaatccgtctcaaaaaaaaaaaaaaaaaagaaaaaagaaaaaagtccaggccagactccatctcaggctcactggttccaatgtgttccatccatacctcagtggctcttgatttagggaaaaaagcacatcctgctatttaatttgcaaaaattaaataactacttgatgtgtcttttgtgcagataatacccacaaaatattagtttttgccctttttcccttataattttaacatacttattttctttacttgtctcatgttttctttcagagattctaactctctttgctaaatggatataggaataaatactcttaaaatacattttttattgtattgatgtggaaaatgtagaaaagcacaaagggatttttttaaaactctgcaatatcatccaccagtcataatcattattaagatgttttcacagatattcccagcttttattctataaataagactctcatgattcacttatccctcacttgtctaactattttatactttttgacgcactaagattctaaaatgaaccataaaagctggcacatatttatagtaatcagttttcttatttaagaggatgagatagatgagtgtaaataatcttgctatacacaaaattgtttctgctactctgaagacaaggtgttcttacatctcggtctttgagcatatatgtaataaagttttgtgtaaggttgcagactttgtctttaatacaaaggaaaacaacaggtatagccttcatataaattatctcatttaatccataccgtgattttatgagattggtaytgttaccttcatgttactgatgagggacctgagccaggagaggcaa

SEQ ID NO: 16459 - DNA, 715 bp, Homo sapiens
cgaatagtattttttaagttggccagttgattgttcagtaccttcttttttactctgttagcaacatacaacttgagagaaaagattgaattatgggcatatacatttatttactagatgagcttctgaaaaacaaatagaaatagtatttctttaaacttagaatcacagtagaattgcaaaaaaagacttcctgtactcayggactagttaattcagacagatatttccagtgagaataactggaaaaagcattctaaaaattatatgtctaagcttatagaaaatagaaagctaaaatggccatcatatagaattattgggctaaagtttgagagacaatggaaattcagggatgtaattcaagtatttgagagcatgttccttttggggcttaattattccagaggcaggagggaggctgaatggctgagcaggttcatgagactagggagaaaaatgtgagtacaaagcagccaagaggtttgtttctaaactctcatgctcaggataggagctgaagggttacacattagtgatctatcagaccacatagggattgattgcatcctaacttggaattacttcacttattaaaattggattacagagatccccaggtggtgtagttactataagtatcatgcataagcaaacaaaagccctctgcggaggaggctaatgtcatcttaggcctcaagttaattctgtaaat

SEQ ID NO: 16460 - DNA, 715 bp, Homo sapiens
cgaatagtattttttaagttggccagttgattgttcagtaccttcttttttactctgttagcaacatacaacttgagagaaaagattgaattatgggcatatacatttatttactagatgagcttctgaaaaacaaatagaaatagtatttctttaaacttagaatcacagtagaattgcaaaaaaagacttcctgtactcatggactagttaattcagacagatatttccagtgagaataactggaaaaagcattctaaaaattatatgtctaagcttatagaaaatagaaagctaaaatggccatcatatagaattattgggctaaagtttgagagacaatrgaaattcagggatgtaattcaagtatttgagagcatgttccttttggggcttaattattccagaggcaggagggaggctgaatggctgagcaggttcatgagactagggagaaaaatgtgagtacaaagcagccaagaggtttgtttctaaactctcatgctcaggataggagctgaagggttacacattagtgatctatcagaccacatagggattgattgcatcctaacttggaattacttcacttattaaaattggattacagagatccccaggtggtgtagttactataagtatcatgcataagcaaacaaaagccctctgcggaggaggctaatgtcatcttaggcctcaagttaattctgtaaat

SEQ ID NO: 16461 - DNA, 772 bp, Homo sapiens
taagcccatgactgtaatgacagctatacacttgctgtcataggaggaaccctggaagaattctatatgccattgatgagtatatcatttcagtgcacacaggagaagacttcagtaggtcctacacttactgctattcccaaatatgtaaattttagaagagacttttcttccatctttccatactgggagaaaactatgrgaaggtacaactgagtgagtgtcaactaaggaaatgttttgcttccaatcatgcatctatgcacataatatatttcaaaggcaccagatgttttgacctgacaccttttgaagacaccccgttccattgtaaagggatggtattgtgtgatggaacaatggtgacttttggatcaaagtgagtctatgtgggaatccttactctgccactgggcactctgggctttagtaaagtggaactaaaccactgtccctgtggaattgttgcctgtaggagagttaactcacccttaaagcagtaagcacgatcaatgtaattgtgggcactcagcaagtaacatttattttccttagtgagatagataggggatttaggcccatgggaagaatctttttaactccattcaaataaatttgaaaaccaagttaagatggataaatctctaggaaaatatgacctaacaaaattaaaccatatagagatagaaagactgggcagagcaatttccacaggaaaaaattagaggaaggtgtaaaagagctccctgaaaaagaaggaccaggaagattg

SEQ ID NO: 16462 - DNA, 772 bp, Homo sapiens
taagcccatgactgtaatgacagctatacacttgctgtcataggaggaaccctggaagaattctatatgccattgatgagtatatcatttcagtgcacacaggagaagacttcagtaggtcctacacttactgctattcccaaatatgtaaattttagaagagacttttcttccatctttccatactgggagaaaactatgggaaggtacaactgagtgagtgtcaactaaggaaatgttttgcttccaatcatgcatctatgcacataatatatttcaaaggcaccagatgttttgacctgacaccttttgaagacaccccrttccattgtaaagggatggtattgtgtgatggaacaatggtgacttttggatcaaagtgagtctatgtgggaatccttactctgccactgggcactctgggctttagtaaagtggaactaaaccactgtccctgtggaattgttgcctgtaggagagttaactcacccttaaagcagtaagcacgatcaatgtaattgtgggcactcagcaagtaacatttattttccttagtgagatagataggggatttaggcccatgggaagaatctttttaactccattcaaataaatttgaaaaccaagttaagatggataaatctctaggaaaatatgacctaacaaaattaaaccatatagagatagaaagactgggcagagcaatttccacaggaaaaaattagaggaaggtgtaaaagagctccctgaaaaagaaggaccaggaagattg

SEQ ID NO: 16463 - DNA, 518 bp, Homo sapiens
ccaggcctggccccagtctcccactgcatccccacttctcccttatctcttatttgccagctcagctcattagagaggattcagcagagagtcagtgactccaggggatagtagagctgctggatgggagaaatgtgggtccctacatgatggtgtggtctctatcaggctggcacatggcaagaaataaagctgccttgtgttaaagtgctgagatttgtgggkatgttcattttagcatttagccagccctaactaataaataaagcctttttaagagctaaaaagtgaaggtccatccaatatggtttgggctgtgtccccacccaaaatgtcatcctgaattgtaatccccataatccccatgtgtcaagggtgggatcaggtggaggtaattggatcatgggggtggtttcccccatgctgttctcatgataatgagtgagttctcatgagatctgatggtttttataagtgcctggcatttcccctgcttgtatttctccttcccgctgtcc

SEQ ID NO: 16464 - DNA, 1400 bp, Homo sapiens
gagataggtggattctgaagaacccacccagctttctataataccctgtcaactttatgacctaataatctagtaattgttttcttctttagtttcttgggttttcatttttagtcactagaaacacttatataaatacaaatccatgcaggtattccaaaaattcctggggacaatttatgtgtagtccctggttctcactgmctcagttttgaaatgaggatagcagtttctattttaatatggttgtggtggtgattacatagcatagtgcctggcacatagcaagtaccaaaaaaaggataggtacctcataaatatatacatctactatacacccacagaaataaaaaaattaaaaagataggtatgattatgattattgtggccattatttatgtatttatttgcaacatattcttagattaataaccttggaaacctaacaaaaccgtctggagttctattccttcagaagatttgcttttggtactttttatatcaaaataacatataatttttaaaaggttggttctgaattgaaactgatgactatgaagtccaagtttataggatcagctgtttgagtcagaaagaaactgcattcttaagcagaaaatttatttgtccacactcccctgaggaaagaatggtaaagccaatttcattcaaacactaagcattggctcaagaccaaataagaagcattgcagccctggatgatgtagccacagtaagttggaagcaattgatttcaacaaagaaaacgattttgctactggccaaggatggggaatctttctgacttgcacattgtctccacaaataaggtgcctctagttaagcctccctaatcaatggccaaggatgcaattacagttgcagagaagtggaactcaaatggagtgggaataaagaaaggaagattaataaataataggaaagcgggagtagagaagcaggagaaaggagatgggagaagctggcaaagatgaaacacagctctgctgagaagcatatatccaagaacaatcaacactataaatttcatggatgctgcatcagttacctattgctgtgaaacgacaactcccagatttagggacttaaaataacacatattcataatctcaccatttctgtggggcagaagtcagagtgcaccttagctcagggtctctcacaaggctgcaaccaaaatgtgagttgaggctgcagtctcgtctgaaggctcaaatgaggaagcattctcttccaagcttactcatgtgatcattcacagaattgtttctgagggttgttgaactaagaagctcagttctttgccacgtgggcctttccataggtgagatcacaacatcagagttgtttcatcagagcaaccacgtgagaagagtcag

SEQ ID NO: 16465 - DNA, 1400 bp, Homo sapiens
gagataggtggattctgaagaacccacccagctttctataataccctgtcaactttatgacctaataatctagtaattgttttcttctttagtttcttgggttttcatttttagtcactagaaacacttatataaatacaaatccatgcaggtattccaaaaattcctggggacaatttatgtgtagtccctggttctcactgactcagttttgaaatgaggatagcagtttctattttaatatggttgtggtggtgattacatagcatagtgcctggcacatagcaagtaccaaaaaaaggataggtacctcataaatatatacatctactatacacccacagaaataaaaaaattaaaaagataggtatgattatgattattgtggccattatttatgtatttatttgcaacatattcttagattaataaccttggaaacctaacaaaaccgtctggagttctattccttcagaagatttgcttttggtactttttatatcaaaataacatataatttttaaaaggttggttctgaattgaaactgatgactatgaagtccaagtttataggatcagctgtttgagtcagaaagaaactgcattcttaagcagaaaatttatttgtccacactcccctgaggaaagaatggtaaagccaatttcattcaaacactaagcattggctcaagaccaaataagaagcattgcagccctggatgatgtagccacagtaagttggaagcaattgatttcaacaaagaaaacgattttgctactggccaaggatggggaatctttctgacttgcacattgtctccacaaataaggtgcctctagttaagcctccctaatcaatggccaaggatgcaattacagttgcagagaagtggaactcaaatggagtgggaataaagaaaggaagattaataaataataggaaagsgggagtagagaagcaggagaaaggagatgggagaagctggcaaagatgaaacacagctctgctgagaagcatatatccaagaacaatcaacactataaatttcatggatgctgcatcagttacctattgctgtgaaacgacaactcccagatttagggacttaaaataacacatattcataatctcaccatttctgtggggcagaagtcagagtgcaccttagctcagggtctctcacaaggctgcaaccaaaatgtgagttgaggctgcagtctcgtctgaaggctcaaatgaggaagcattctcttccaagcttactcatgtgatcattcacagaattgtttctgagggttgttgaactaagaagctcagttctttgccacgtgggcctttccataggtgagatcacaacatcagagttgtttcatcagagcaaccacgtgagaagagtcag

SEQ ID NO: 16466 - DNA, 573 bp, Homo sapiens
tacgtttatatatataaagggttcttggcacagagaaaggacttgctagaggttagatctcactataccactcctagtaccactgctactgctaccacttaaacacaatggtcaagaggacaactgcaatattatttccaataaccccagaaatacataaatacataaatcaatgtaacaaggagatttgggagccagcccctggacattaccagccagccgcaacgtattcccatgtattgtattcccatgaattgtaccatgggcaaccctggccctaaggagacaaaatctctcttccaagacacaaacccacagtcactaatgaaatgtcaattacatttcaaagtgtaattgtgggtcactttcatstggacaaagcagtttatatggtaaattagaatttgataaggaagccctttaaaataattctatagaattctttgagcattgtcagtgccttgagtaaacaaatattccacaaaaattaataggaggatgtgaagaggctttcacaaatgaggttgacccactgatgatcgttagaacagatgtggcaagatctgtgtcacc

SEQ ID NO: 16467 - DNA, 573 bp, Homo sapiens
tacgtttatatatataaagggttcttggcacagagaaaggacttgctagaggttagatctcactataccactcctagtaccactgctactgctaccacttaaacacaatggtcaagaggacaactgcaatattatttccaataaccccagaaatacataaatacataaatcaatgtaacaaggagatttgggagccagcccctggacattaccagccagccgcaacgtattcccatgtattgtattcccatgaattgtaccatgggcaaccctggccctaaggagacaaaatctctcttccaagacacaaacccacagtcactaatgaaatgtcaattacatttcaaagtgtaattgtgggtcactttcatctggacaaagcagtttatatggtaaattagaatttrataaggaagccctttaaaataattctatagaattctttgagcattgtcagtgccttgagtaaacaaatattccacaaaaattaataggaggatgtgaagaggctttcacaaatgaggttgacccactgatgatcgttagaacagatgtggcaagatctgtgtcacc

SEQ ID NO: 16468 - DNA, 1143 bp, Homo sapiens
taatttgcattcatctccccaaatcttaactaatgattaagacaaattcaaattgtatattcattatgtgtttatttgtgacttagaatggatttcctatagaaattatattttggaacattaattagtttgcatgtctataaaaactatatatatattatagttgaattatccatacctgcatactgatacttaagtgtacataatactacaaaagatggctcttcaacatgaacccgttgtaattacaaagagaaatagatcaagtttcaactagaacagcagagctgcccaacagcagagctgcctcatagacagattctggtcaaaaacacttcttgacagcctctactcttttctaagcacaaaggcagtccaggagcattgttacaatatccttagttctcttcttgcccaccctaggggactagaacacmgtatcaggcaataaaaatgagtggtagaaaatatatagctatataattaaagtgtttaaattaaaaatattcaatttgtactaatattatttaagatacctgctagactataaacatgttttttagaaaagaaaaaaaattaacattcttaacttataaatagttcccacaaatagacaagggaaaagaaaaccaaccaaagtaaaaactgaataaagtaaatgaagaggcaatttactaaatccacagttgtctattaaacatgtaaaattatgttggtactcactagtcactagaagcatggaaaaactaaaaattatcttgttttacccaacagattgataatatacaatgttgacaaaatattgagaacaaatattgcaaaagctttttgggagagcaatttgattgtatttattaaaatttgcttaacaattacacatctgcatgagagatcctacagaaatattaacttcggtgcacacacagacacacaaaaggatattatgcagcatttgctaatggtgcaacaaaaacagcaagcatattcatcagtagaaggatagctcaaatgtgggtaagacactttgctgaaattaaatagaatagagttgattaataaaataacaccaaatgacaatctccaaaatgcatcaaatgaagaattacagtgagttttagaaacatatctatgatattatcatat

SEQ ID NO: 16469 - DNA, 564 bp, Homo sapiens
ctgtatggacttttgctccagcttccatttatgagctgtcagtaactctatgattaaaatggggacagtaatggtactcagctcactgggttgtgtatgcccaaatacatgcaaacacacacacacatatttcacatataaatattttatataagcctattgtaccatggtagtttatttgacctaaagatattcacgttcaagtttctctcaacactcaattataacaaaagctattataacacatgttgagcatttcccatgtgcaggcacttttccacatgcttttcaagtattaattcatttagtactccccaaacctgtgaattaggtggtgctatgttcctgtttyagagatgaggtgtttgagacaaagaaagataattagattcacttgctaagatcacaaaatgttgggatttctttaccatgtttattgtccttcaactattgaacaactctacacatgcacacacataagcatgcaaacacacacgcgcatgcacacacacagactctcaagggatccaaagccatagccaacatgtgtttgctttcttgtca

SEQ ID NO: 16470 - DNA, 516 bp, Homo sapiens
acctttttttaaaaaaaaagaaaaaggtacagggataacwcccattaacactgatttaaataggaatgataaaatttatgagtgggtgtaaaagcagaagatttacaggctaactattgaacatgatactgttttgctagacaacaccataagatggatgagctgtaacagtgacttggtttaactaaaaagcagctgctctctcaagtatgcggtctctccaaacaatgttaaatgctctgattcactgattaaatatgaaatgtttccactccgaaattcacacatgatgtttatgtggaggatgtactcagaattatgacactgtgatgacaggcagagacagtgtgagccccggagtggccgctcagtgcagaggagactgcccactgtgggtctgcacatcacctccccaccaccaagagggtagccctgaccacacgtcttactgctgggggttatacacagggcagtcataaatcatcactgcaatatttataacttcttgccttgaac

SEQ ID NO: 16471 - DNA, 551 bp, Homo sapiens
atggggttttaccatgttggccaggctggtctcgaactcctgacctcaagtgatctgcctgcctccgcctcccaaagtgttgggattacaggtgtgagccaccgtgcctggckgggtctctacatttaataagagtgtgtgtgtgtgtgtgtgtgtgtgtgtgtgtgtgtgtatacatattttcccaaaagtggtaagatttggaaagtgtaccatttgtgtaagttgaactttgccaggccacactgtcatggggaaacagaaggaatcccatccctttgcctcctacccatctgctattgcatgacctttagttcttggaaagggggccatgatttttgctcagttctctcacagtatcttagaggtgagtccctcaaggtataaaaatggagctgtgttctctagagcacacggtgtgttgagaccaagctgtgctctgggcaggcatggaagaggtggcctctactctctcttgggctgccctttgtattagaggaaggaaacttcactgtctcatctcccaggggctcagagatttcataagacag

SEQ ID NO: 16472 - DNA, 976 bp, Homo sapiens
agtcagtatcctctgggctcagctctctgtgggttacccatgtgggctattctcattcctaccaggcagctaatcaggcccattcctgtgccagtgcatggagggtgtaggccagaagaggactgtgccaaagcaggctgcaggtttacaaaccacgtgtccctgctcagggtgttggctgaggctggctcctagtcacagcctgcgcaggcatggacggatggtggatgccatgacccagcctggtccacagatggggcgggatgaatgtgccagactttccagagaagaacagtccaggagaccctcagcataaagtctcctgaaaacaacacagtctgacagtcctgaaggccagccctgtctttgcagggacttgtagagaacaccattyccagctccccattttacagaagggaaaactgaggcccagagatcggatgaagcttagcaacacaagcaaaatctgtattgtccatggctgttcagaagcattgcggttacctcaccaggcagtgttgaagaggctatcacagaagcctcagggtagtggttttcaataggtgcccccaaaccactggtgttcctttaaatggtccttgcaagattgtccccagctcactgaatcagcgtgcgaactcggattcacttacagctggcattcaaaaggagacacagggctgtgacttgttcacaagatcaggcaaggcacaaaccagcttgtagtggcagcttgaggatggcatcaggtggtgattgtaattatttttagagttacaagatcctgggtaaagtgttaaaatgccaatagccacaacacagagtatcttcttagagaaccaagtgagagtctgttgagtcaagtcctaggctgtggatggggactaggagatcacatgtgatagtccccttcagagcacagtctgaacagtctgaacaggaaggaggacttcggaggcatggtagccacggaaac

SEQ ID NO: 16473 - DNA, 773 bp, Homo sapiens
tgacctatccaatgactcatcccttcagaaggatatttagctcactcacataatttgtcattactttctgtatttttttctaataacaaaatacacttactggattaagatggaagatggaacatctgttttgctatccttctcctttccagattggggtaagacaatcctttaacattttatttgggaataattttagacttcagaaaagtttcaaagtcaacagagagagctcctacataccctgcacccaacctctcctgataatacttatataacctgagacagtcacgcatatggtttggatgtgtgtctcctccaaatctcatgtggaaatgtgatccccagtatyggaggtaggatctgatggaaggtgtctgggtcatgggggcagatccctcatgaatggcttggtgcccttctcatagtaatgagtgaattctcactctgagttcacatgacagctaattgtttaagagtctagcacctccttcccttctcctgctccctctcttgccatgtgatgcctgctccccttcgcctccaccatgaatggaagcttcctgaggcctccccagaagcagatgccaccactatgattcttgtacagcctgtagaatttggagggctcagaagaagacaggaagataagggaaagtttggaacttcgtacagacttgttaaatggttttggccaaaatgctgatagagatatggacagagaaggccaggctgatgaggtctcaggtggaaatgacaaagttattgggaac

SEQ ID NO: 16474 - DNA, 564 bp, Homo sapiens
tgtgcttcatgtagttacattatacaatattttctcttttgctcctgatttcttttactcataatactgtttttgagagtcattcatgttctcacatataacaaaaattcattccttttgttaaatggtgagtagaattccactgtatagatcaacttgtttaactctcttcttttgctacaaatgcagaatcttcacaaatgtagtcaaaatagcttgtatctgaaatatgagctagtttgactacatttataaaatttttccagcactatttgttgaaaaaatattccccattaaatggactttctgtcttttagataagcaaccattatttgaacaatttgtcacctgtccagtttcacrctgtcttgattattgtagattatgaccagagcggctagaaagattttggtactaatatttttgtgcacatattttaaatttccctttggtaaatgggtggaattctgtatcataaggtaagcatttataagtttagggataagaaaataccaacaatatttcaaaatgattgtaccatttttcatcttttatgagtactga

SEQ ID NO: 16475 - DNA, 574 bp, Homo sapiens
aggcattagagaaagtgaaaagtcaaaaatataaacctgctatgaaaaagtcagaggcgaaaagctagatttagacatctagtggaccttggtttatttagacctttccctgtaatatgtttaaaactttaacagaatgacatccctaaaagtcaaaattccatttgtgcaatttacaaaaagtgagaaatagatttgttacaatcttgattttggctgataaatgtatgtttcatggtaggaaaatataactgggactctatgagcaacagaaatctgtgagaagaccctctatagcagatgaccctaaattgttcttttctcccatcctacctccatacccacacctgctgctgttcataccaagaatgaatctacaaagtgcagayagtatcctttttatgacttccccacagctttcagagcttccacaaagttttcattagtctctttgaagttcaaaatgtgaccccgaacacattgtcgtattgagttgtagattcccgtttattactaaagaggcagtagcaataaagagacacaatgtattataagattttcctcaatgtgtcat

SEQ ID NO: 16476 - DNA, 1739 bp, Homo sapiens
tccactgcactttgctaatttgatatgctccattggcttcaaatctgacatatcttaaattcaagctcatcatcgaagcctcaccattgacaagtcctggcttcacctctctctagttatatgaccccaggaaagctactgatcccccaatcctcagtttcctcacttgttaaatggcagggtttgccgagatcaggaagccagacacatagcactcatagttcttcttatgtctgactgtgtctacagtacctgtcttgcttgatctctggtacattgtgggtattatattgtacttatttattcagcatctattcattccctggcactgattttgactaatttcacaataagatgcatggatttagtcctaactcaccacttgtaggaaaaccatcatttcttactaaaccaagtaaattggctgctccagtatgcgttggtttcatttacatcatatgttagtatattgccatctagaggaccaagtgcaagctacaagcaagagagaactggggcttggggagaaaggcaacatcctagaagaaatgtttaaaaaacattaagactcattcgtagctgtgttggatttcaacaattatgtgaaaaaaataaataacaggatgtgttttaactataaattagaaatgaatgctatagtaagttaccggctcataaacttatgatctctgttaaataaaatttataggaggtcattggtttgaagtaagttcctgcactaggccccagtagaccaaaccaaaatggagttactcacggtaaagttccaggccaccaagccaaaactacattgttatctgaccttccaagaaatcaggagcgagagggagataatagccacatctccraacagccagttttagcctgcctgataaggaagtccccctactttaaccttcacaaggaaagtaactttgaaaaaaccaatccactttgtgttctttgtttctgcattcttcagcctttttctgcctgtaaatactcactgcccatgtttcagagcaaagcccaattcccatgaatcattctttgctctgttacatttattttgtttaaagttttacttctatcatctttaacttgttctaaacaaaataaaaaataaaatgaaatcagcattctttcctataattgactgttttgctgcatttggattatccatgccatatactagatgagaatctaaattaaaagaggagccacttaactaggggttagctctcctgactgctgcaactttagcttagcaattcggttttccatctgagcaagttaccattatcgagtgcttactgtgggcttgggactatactgaacattttacatgagttatctcatttaatcctcacaagctccttccacctcaagagggtaagtatttacttgtgcttatgactctcagcctgctgcttcatctgtaaaaatgggataagtgactttctcaaaatctaaaaaaggatattgaactggatccacaactcagatctgcctgaatcaaatacaagttcttaatgattacagtttactaaatacaacagcttctgcattctaagaatgtcacgaggatgaaacaattcgtggaaagcactttttggagaaaaaacaatgctcgaatgcttacataacagaatgttcacacaaaaaataggtgtaaagtgatgtatattctattgggataaccaatcgctttacaaaagcattcagtaaggattgctttt

SEQ ID NO: 16477 - DNA, 529 bp, Homo sapiens
tgatcttgattttcttcttttcaaataccagatacttctcaccactgcatgaatggacatttgaaagtgccatagccaaacacttgcaagcatggagacctcatcaatgctttcctcattgaatgatgagtgtaaatctgacaactacattgagcctcactacaaggartggtatcgagtagccattgatattctgattgaacacgggttaaaagcataccaagaatttcttgtccaggaacgagtttcagactttcttgctgaggaagaaattaattatattttgaaaaatgtccagaaagttgcacaaagcacagcacatggtactgatgattcctgtgatgataccttatcttcagggacctactggcctgttgagtctgatgtggaagctccaaatcttgacttaggctggccatatgtgatgcccggactcttagggggcacccatatagatctcctttttcatccaccaagagcacatctacttacgataaaagaaactattcggaagatgataaaagaagca

SEQ ID NO: 16478 - DNA, 551 bp, Homo sapiens
taggtaattctgagaattctaaggcccttgctggaataattaatgagaatatgagatttcagcaaattagggccaggagtcagtgctctcagcatggaagaatctcacctccaaaaattttatgtgggttttacacattaagcaagcataggtgaggtgcagtgaaggggaagtgatggctgtcagtcgtttggccaggttcctttgcatacaggggagctagtgggtgtataccagctgagacagctgaaggaggagaacatgaagaatagttggaaactattgaacctccaagatttttctgtctttgttaacaactagcagttacatgctagcattatttatttatttakttagttagttagttagttcttgagatggagtctcactctgtcacccacgctggagtgcagtggcatgatctcagctcactacaacctctgcctcctgggttcaggtgattttcctgcttcagcctcctgagtagctgggattacaggggcccgctaccacgcccagctaatttttgtattttgagcatgttggccagg

SEQ ID NO: 16479 - DNA, 551 bp, Homo sapiens
taggtaattctgagaattctaaggcccttgctggaataattaatgagaatatgagatttcagcaaattagggccaggagtcagtgctctcagcatggaagaatctcacctccaaaaattttatgtgggttttacacattaagcaagcataggtgaggtgcagtgaaggggaagtgatggctgtcagtcgtttggccaggttcctttgcatacaggggagctagtgggtgtataccagctgagacagctgaaggaggagaacatgaagaatagttggaaactattgaacctccaagatttttctgtctttgttaacaactagcagttacatgctagcattatttatttatttagttagttagttagttagttcttgagatggagtctcactctgtcacccacgctggagtgcagtggcatgatctcagctcactrcaacctctgcctcctgggttcaggtgattttcctgcttcagcctcctgagtagctgggattacaggggcccgctaccacgcccagctaatttttgtattttgagcatgttggccagg

SEQ ID NO: 16480 - DNA, 551 bp, Homo sapiens
taggtaattctgagaattctaaggcccttgctggaataattaatgagaatatgagatttcagcaaattagggccaggagtcagtgctctcagcatggaagaatctcacctccaaaaattttatgtgggttttacacattaagcaagcataggtgaggtgcagtgaaggggaagtgatggctgtcagtcgtttggccaggttcctttgcatacaggggagctagtgggtgtataccagctgagacagctgaaggaggagaacatgaagaatagttggaaactattgaacctccaagatttttctgtctttgttaacaactagcagttacatgctagcattatttatttatttagttagttagttagttagttcttgagatggagtctcactctgtcacccacgctggagtgcagtggcatgatctcagctcactacaacctctgcctcctgggttcaggtgattttcctgcytcagcctcctgagtagctgggattacaggggcccgctaccacgcccagctaatttttgtattttgagcatgttggccagg

SEQ ID NO: 16481 - DNA, 761 bp, Homo sapiens
ctgtttacctggggagtgatcttgagtgggtcaatttatgttctcagtgccttacaaaatggggcagaggatacctaacccccaggagctggtgtggctggggtaccttacacagggcctgactgtagtagcttctctccaagcattggtgtcttacctcttctgtttctctaatggtgttttgcacattcattgttgtattagagtttgtttttttgtcttaccttgttttaataaattataatcttatgggagatgacactgtcttttctttgtttcatatataaaaagtgttttgctgatatacgtagaatcaagttggtctggagttactctggataagggatgaaatcagggagctcttgtgttcaaaggggccttcttcccttttttggttctttctcctcattttttagcttccatttttacttcctttagtattgagaaagtaccaggctcacttcaaagagttgacttcaaagctcccaccagctcagamatacttgccactgaagcctgtaggaattggcatcaatggaagaccctgtggcggttgcatttaagattttttttgggacttctatttttataattcttttaaatggtaaagggggagggttacaaaatatctgcgcctttaagatatcaaacataagccagtgaagttccaaaaaaaaaaaaaaagatgtcttagagaaatgaaaaggattttacaattggtagaaaagaacaactcttttttctttttctttttctttttt

SEQ ID NO: 16482 - DNA, 525 bp, Homo sapiens
taactgaaattaacctcgcaaaagtcaggatacaaattcagtatctccagttaaataaaagtaaagccatgacaaatatacccaaacaagaaagcattccaggcaccattaagtgatgttgtttgtcacattctccaattctttcccctttacagaaaaacaaaattgtgtaattactttcccaaaaacatttcatttaacaaatatcagacactcttccacctgataagtattgtgtaagtatgcacagataaagaaagccatgttcgcagctcacacacatgtatttaagatgtgagaggagtattttaaataatacaaacatttatgaatagcattgactcattatgtttctgaagcaaaaagcagcaactatcaattattttactggtcaataaaacaacctattagcaaatactaatattttgaggtatttttatagatgttttccttatgaatacatccaaagataagaaaaaatattgactcatattttagaaacttcgattttttaarttttatttt

SEQ ID NO: 16483 - DNA, 730 bp, Homo sapiens
ccaaatcaaaatcatcttctatggggcggcatccccacctcagctgtgtgaacggtggccccagaaaaaataaggtcaaaaaaatwaaaaaaaaataatcttctggccgggagcaatggctcaatgcctgtaatcccaacactttgggaggctgaggcgggcggattacctgaggtcaggagtttgagaccagtctggccaacatggtgaaacctcctctctactaaaaataaaaaaattagccgggtgtagtggcgtgtgcctgtactgccagctactggggaggttgaggcaggagaatcgcttgaacccaagaggcggaggttgcaatgagctcaaatcacgccattgcactccatcctgggcaacaagagcgaaactctgtctcaaaaaaaaaaaacaaaaaaatcttctccatatatgtatgtatatgtgcatcacatatatttcatatgtatgtatgtatgagtattcttactgcaacaagctgtactgtgtaccactacacactgcttcatgttttaaaaattgcttccttaagacagaatttaaattattactcacacatcataataaactctaggtttcaaattgtggcaaatgttgattaacaaattaagatgttatacaaatctttccttctctattaagccaaccacaaagtagctatggtccctaaacagtctaatagggtacctgggttataaactgagcttcttatcatacccta

SEQ ID NO: 16484 - DNA, 730 bp, Homo sapiens
ccaaatcaaaatcatcttctatggggcggcatccccacctcagctgtgtgaacggtggccccagaaaaaataaggtcaaaaaaattaaaaaaaaataatcttctggccgggagcaatggctcaatgcctgtaatcccaacactttgggaggctgaggcgggcggattacctgaggtcaggagtttgagaccagtctggccaacatggtgaaacctcctctctactaaaaataaaaaaattagccgggtgtagtggcgtgtgcctgtactgccarctactggggaggttgaggcaggagaatcgcttgaacccaagaggcggaggttgcaatgagctcaaatcacgccattgcactccatcctgggcaacaagagcgaaactctgtctcaaaaaaaaaaaacaaaaaaatcttctccatatatgtatgtatatgtgcatcacatatatttcatatgtatgtatgtatgagtattcttactgcaacaagctgtactgtgtaccactacacactgcttcatgttttaaaaattgcttccttaagacagaatttaaattattactcacacatcataataaactctaggtttcaaattgtggcaaatgttgattaacaaattaagatgttatacaaatctttccttctctattaagccaaccacaaagtagctatggtccctaaacagtctaatagggtacctgggttataaactgagcttcttatcatacccta

SEQ ID NO: 16485 - DNA, 670 bp, Homo sapiens
tttttttttttttttttgacatggagccttgctgtgttgcccagactggagtgtaatggcatgatctcggctcactgcaactttcacttctcagttcaagcaattcttgtgcctcagcctcttgagtagctggaattacaggcatgcaccacctcacgtggctaatttttgtatttttagtagggacagggtttcaccatgttgcccaggctggtcttgaacttttgagctcaagtgatctacctgcctcagcctcccaaagttctgggcttacaggcatgagccactatgcccggctttaagtttttttgattccaataatatgagtttatttcaatgttataaaatatgttaatttgaaaagtaataggtcaaaatttagcaaaaayctgtctcaaaatttccacaaatactgaatgaattagaattcaacgtataatgataaacaattgaataaataggagtagaaggaattttttaaaaatacaataaatagaaaaaacctagtatttcttgagtgcctacactacactaggtgctgtgccaagcttctctaatcttctcagcaccctactgacattagtactagaattatcttcatattacaaagaaattgaagttgagaaaggattgagtaacttatctaacgtcacacatgtggcatctgaca

SEQ ID NO: 16486 - DNA, 641 bp, Homo sapiens
acaatgttgatcacttcaggtaaaaaaaaaattttttaagttatttttgaaagaaaatgaaatgatttagaaaagtccatttgctaattttatattctgctttcatacaggtattaaagcaacttaagtaacaaaatcagcataaaagcacagagatttctgaattaactgtttctgttttgccttgaagaaatcccccacagttgggcactgagagtttgttggaagctctaaccaggaggctcggctgccgtttgccaccctcgcgggaagagcattcctcctccttccctggggaaagcctctcccagaaggttttgctgaggagcagggggaggacagggctacacagccaccccttctgccaaatctctctgaggaaacaagtggtgacagctcaggtcccccaaaacagcttctttcaatccaggactttctgtagaagaggtaaatgtgttcacttaggggrcaagcaaccatacagaaaacaggaagatggatgcaactgctggaacattccacagatgagaacctcaggcagggagtcaggactcaaagctccatcttcaggcttttgtcttgaagtgtgattcaagtttttaaaatattttcatcccttatggaaatactcattaattttt

SEQ ID NO: 16487 - DNA, 315 bp, Homo sapiens
ggctatcaccattggagacttactcctcagtcccctagtattcaacagccaggaattggacttagaaagctccttagccagcaagaagagcacacttctcaatatcctgtttagatgtggccaagggaagcaacagaaaatgaagagcctcccagggtgcaaaacatctgctacataaatggagatatgcgttttacccayaggagaaatatggggccataccatgttccatgtacacttgagaacgataaggctttagctttaatgttttatatagttgttggatgctatcttagtctgtttgtgctgctataa

SEQ ID NO: 16488 - DNA, 502 bp, Homo sapiens
tccctccttcccccctccctccctccttccctcccttccctcccttccttcacttccttccctttcttcttttctttttctttctatgtgtgtgtgtgtgtgcgcgcgcgcgcgtgtgtgtgtgtgttttaagagagatggggtttcaccatgttacccaggctggtctcaaactcctggcctcaagcgatccccctgcctcggcctctcaaagtactgggattgcggcctagggatgcgaatttcaaggaatgtgaagacaggattgctttgaaaaacagataaaagatcattgctgcatgtggagccttctgggtgagaataaccgaggaacagtgagcagaggagtagccagagaaggagggagggaaaatgctgctgcttaggcctgaccctggcccattgcctcatgctgctcagtgttacgggtaaagtcaagcaactgagcatgcctctgagaggyaggcatttagaaaacttcgaacacgttcattaagaaggt

SEQ ID NO: 16489 - DNA, 827 bp, Homo sapiens
gggatcctttgtttcccaaacacagaagcaatcagtgccaggaaatcagtgcccttacgatgctggaatgtggctttaggggagaagacaatgaacactgygaggtgatgaatgggtgctctgaggtctgtagaacccagaaatggattcaagtgtatctctttaaaagagaggtttcagcctgccgcgaagcgttctgttcacaatccggccagcatgtatgttgctgttgtctgatgctgtgatgctgtttctgtccccttcctcttaaaaaaaaaaaaaaattaaatgggacctctgtttggtgattttatttgccaactcgaagaaagtgatggtttaaatgtggacgtgaataccacagttaatccttgcttgttgtcgtccagtgtttagccggccaagtaaatgagcccagcaggttataaaagctttgccatagagcctggacgatggcttctgtgggatggagatcccaaatagcaagactgtccgggtgccggggagcccgcatctgaaacagtcgtgcacacattaagcatgttgccagctgataagctttggactgggataacctattttttacggtctttgttgtttttgcttttgcccggctttgtggggagatgcactgtcagatggattaaatgacatgggttgttcttcctcaaccgaacaaggtttgttttcatacatcttgtccttccgcagctatggagagagaagcgaggggtttttatattttaaaaggaggcacattgagctgatgtgtgagtttgggtgcctgattagccgacgaaggaatacttggatactgttgctaggtt

SEQ ID NO: 16490 - DNA, 1104 bp, Homo sapiens
tacagtcaatgtattatattttaattaaaatttaatgtgaagaacataaattgataatttattaacataatttccctgtgtagactgaatattacatattctctcttagctcagacacttttgtagcctcagatatctcttgtgcatgaaattattaccgttccctgtatagctgagtctattacatatcggaatggacaattaacttaaatcacagtcagtaacgccactttggggatgcacatttagatatttcttttccaaaccgcaatcccttccctttaccacattctgccttttcctaacgctgtactacatttacgactttttgaactcagggattaggccacgttaatacctgcaccatatacagcaccctttagagtatcagtaaaaatatactcgctgaacttcgaatgtattcactaaaattacaatgaagtgtatggaaaatagatgaattccaaaacatgcctcagctggagcagaaatactagagtttcttctctttcttcaggcaagagccagtcttgagatgtgaaatgtgctttatcaactgataatgtttcttggagacaccccacaaagggctctctttttattatgagactcattgaacatctgcaagartatgcctgttcctgtgatgtggaggaaattttctgcaaggtagggctctagtggatgctatttcactctacttccctgaatgcttggctattgcaattggaagcataggaagcagatccagacatgtttatcttcccataaagcccttctttccaaaagagttttgaagttctttggagagtgaacaagcctgggggccaaatcaaatctattaagacccacagcctcaataaaacaatcatttattttcaccctccccttgacctgcagagacaaatgagtggactctaatttgcctgtgtccctcatggctattagatccaaccacagatttaaaaagcccctaggaggtcattcaatgcttagataagcacatggctatacttgttgcagacacaagtactttttgtttttgtcacttattttgctatatttgttgtagtctttttggcatgagtcaacaaacttttcaga

SEQ ID NO: 16491 - DNA, 461 bp, Homo sapiens
tgccatcagaatctggaaacggtctctgttctctctctctctctctgttttttagaaatggagactcactatgttgcctaggcaggtatcaaactcctgggctcaagcagtgctcccatcttagcctcccaatgtgctgggattataggcatgagccactgcgcccaccctcacagaaagaataggtgatgcaagcaagtaaacaggtaattacaatgatggaagatgtatgctgtggaacaggagtacattaagaactcaacccaggctttggaggtccagaaaggggttcggaaatactttacgtgtgtgagacttgggytaagcttgggttggttgcaggaaagagaaaatggaagagatggtgttctaaaaatggaaacaatatgctggatagcccagcagaaagaaagagtatttgcatctcaaaaactgaaataatttcgttatctcaatagtgg

SEQ ID NO: 16492 - DNA, 560 bp, Homo sapiens
aacaaagagtgtttgtttagaattaatgtttgtggagtgcytcctataaaccatgcattgttcaagggttttacatgtttttaatgagctaacaaccctacttggggagtcagtgtactcaagggcacacagaattaaagagagacagacagtcactccaacatattagaagttttaaaaaactcttctctaagctaatgatggaacaattagaccagaaaataaaacaaaacaaaacaaaaacaaaaacaaaaaacaaccacccaaacagtaaggatataaaggatctaaacaacacaattttccaccttggtctaatttatatttagaatacccaacaactgcagaatacacataagatatttaacaaaatataagtatttgaaaattgaacagcatacatctaaataatccatgactccaataaaaaattacaaggggaatttaaaataattttaactgaatgttaattaaaatactgtatgtcaaaattttgggagacaactaaactattcttagaggggatttagagcttatttttatattataaatcagtgacc

SEQ ID NO: 16493 - DNA, 589 bp, Homo sapiens
tgccattctcctgcctcagcctcccgagtagctaggactacaggtgcccaccaccatgtccggctaatttttttgtatttttagtagagacggggtttcactgtgttagccaggatagtctcgatctcctgacctcgtgatccacctgcctcggcctcccaaagtgctgggattayaggcgtgagccaccacgcccagcctccaacagtacttttaagcttcagtgaaccacccaattttaaggaactgggagaatatacaacaaaatggtaagaaaatacaaacttaaacataaacaatgtacaaatgatataaaaaaggtgctgtactctcttttaacagagtttcagtaaagacaaactaaatgacagttcatacagcacatgaaacgctgaaaacatattcattacagaatttctgtaacaactatcacaaattgcatagtttaaacctgtgaaatattttttaaatatttcattgcctttttttctgaaactggaaaccactatgtcgtgacaaatcagaagcagtctttggacctcactctgagaaggacaaatctagtacagtcagaccaggtactcagagc

SEQ ID NO: 16494 - DNA, 589 bp, Homo sapiens
tgccattctcctgcctcagcctcccgagtagctaggactacaggtgcccaccaccatgtccggctaatttttttgtatttttagtagagacggggtttcactgtgttagccaggatagtctcgatctcctgacctcgtgatccacctgcctcggcctcccaaagtgctgggattacaggcgtgagccaccacgcccagcctccaacagtacttttaagcttcagtgaaccacccaattttaaggaactgggagaatatacaacaaaatggtaagaaaatacaaacttaaacataaacratgtacaaatgatataaaaaaggtgctgtactctcttttaacagagtttcagtaaagacaaactaaatgacagttcatacagcacatgaaacgctgaaaacatattcattacagaatttctgtaacaactatcacaaattgcatagtttaaacctgtgaaatattttttaaatatttcattgcctttttttctgaaactggaaaccactatgtcgtgacaaatcagaagcagtctttggacctcactctgagaaggacaaatctagtacagtcagaccaggtactcagagc

SEQ ID NO: 16495 - DNA, 589 bp, Homo sapiens
tgccattctcctgcctcagcctcccgagtagctaggactacaggtgcccaccaccatgtccggctaatttttttgtatttttagtagagacggggtttcactgtgttagccaggatagtctcgatctcctgacctcgtgatccacctgcctcggcctcccaaagtgctgggattacaggcgtgagccaccacgcccagcctccaacagtacttttaagcttcagtgaaccacccaattttaaggaactgggagaatatacaacaaaatggtaagaaaatacaaacttaaacataaacaatgtacaaatgatataaaaaaggtgctgtactctcttttaacagagtttcagtaaagacaaactaaatgacagttcatacagcacatgaaacgctgaaaacatattcattacagaatttctgtaacaactatcacaaattgcatagtttaaacctgtgaaatattttttaaatatttcattgcctttttttctgaaactggaaaccactatgtcgtgacaaatcagaagcagtctttggacctcactctgagaaggacaaatctagtacagtcagaccaggtastcagagc

SEQ ID NO: 16496 - DNA, 519 bp, Homo sapiens
tttagttatcattattttctgtttgaaagattaaaatactcctcaccaaaaaaatgaaaagctttaagaaatctgctctggaataaaatacccaaataatgtcatcggagattttctttcgtttatctagtaatcaacataagtaactgcatccattttttaatatatagactttttctttggtaacagataaaaatgagcatctcatctctagatattttgctgccacattcaattataacaaatgataacattgcctaagtagtttatacaaaggccgttactttgataaaattgctgcaatactgtaatgaatccactggggcttccagaaggggaaaaaacaatatgaattcagtgcgaaaacatttaaaagcacagccaaatgtccccatttgactagaatgtttatraatacccataaaatggaagctggcctaagatatgctaaattcctctttcaaaaggggtactcaatatactctgtagaaaaggatttgtttaataaagccaaagcca

SEQ ID NO: 16497 - DNA, 922 bp, Homo sapiens
tgtccaaaagtatacacctatcaaagactcaattattcattagtttacttgacgacatattatgctctgtcatatgatggcttcaaagatacataagactttgcctctgctctaaacatttttgcattatccttctgttttttatattaagccaataaataaaaagaaatyccttgctagatggtgaaatgcaaagaaatattgtttggcattttttagagttttgttcctacaggtaaaattttttttggaaatctagttctccaaagtggtttacaattagtttatacactgtggaggtggatataagtgagaagagtttcatatacaaagtatttttaatatgtgattcctccaaagccttctgaagaaacgtctatcaaatcgaataattgacgcactttgaacacttagctccaaaaagaagatgacattttttcattagtttaagatttatatgctaaagtatctgtcacaataataataaaatctgacagtgcagatcatatggatttttcaccgcggcagaggtaacgtgttttttggaagatacaaatgacaatttgttcaaatcagagattttaaaaatttagacaagctcggaagctccagaactttatatttcaccatttcaaaatcactcattaaatgatgtttgtgtcatgtcagccatactgattaatattgtgtatgtaagaataaatataagttattttttcatatgctttttgggttatcaacattttcaggaaaggtcaggtgccagccatcttaaatccatatacaaagacagttttaagtataggtatatttaggtataaattctaacgtaattactctgtgtcatagctgaattctctgtgcttttggttgttgttgttgttttgcttgggtagctgcagccctgtgaaattccaatcca

SEQ ID NO: 16498 - DNA, 922 bp, Homo sapiens
tgtccaaaagtatacacctatcaaagactcaattattcattagtttacttgacgacatattatgctctgtcatatgatggcttcaaagatacataagactttgcctctgctctaaacatttttgcattatccttctgttttttatattaagccaataaataaaaagaaatcccttgctagatggtgaaatgcaaagaaatattgtttggcattttttagagttttgttcctacaggtaaaattttttttggaaatctagttctccaaagtggtttacaattagtttatacactgtggaggtggatataagtgagaagagtttcatatacaaagtatttttaatatgtgattcctccaaagccttctgaagaaacgtctatcaaatcgaataattgacgcactttgaacacttagctccaaaaagaagatgacattttttcattagtttaagatttatatgctaaagtrtctgtcacaataataataaaatctgacagtgcagatcatatggatttttcaccgcggcagaggtaacgtgttttttggaagatacaaatgacaatttgttcaaatcagagattttaaaaatttagacaagctcggaagctccagaactttatatttcaccatttcaaaatcactcattaaatgatgtttgtgtcatgtcagccatactgattaatattgtgtatgtaagaataaatataagttattttttcatatgctttttgggttatcaacattttcaggaaaggtcaggtgccagccatcttaaatccatatacaaagacagttttaagtataggtatatttaggtataaattctaacgtaattactctgtgtcatagctgaattctctgtgcttttggttgttgttgttgttttgcttgggtagctgcagccctgtgaaattccaatcca

SEQ ID NO: 16499 - DNA, 538 bp, Homo sapiens
caagggatgtcagagtttcttgtacttggttcttccccctccctcaccctcctttccaacttcagcaagacatggtctgtggttctgrggacatcacagtccacatttgggacagaggaaagagaggcaggattggaatcccacagatatcaatgccgtgctctcaggaagcagctctcatcttaagccctttcatttgcaactgcctcctttgacttcctgctggccaaacgacttgggtagcccagcacctccaaagaactagtattttgaaaaccattgccagaaaacatacaaagcaagaactttagcacactggagctaatatgcaataaattggagtacggaagatccctcgtgtgactaagtcagtcctgagtgactgcagggaagacaggtctgctgttggaaacagatgccagcagccagaacctctttgaggaaacagggagtaccaaagaaaactggaataaaagcttgttttacactggctagccatacacaaaaaacagaaactggaccccttccttacacctta

SEQ ID NO: 16500 - DNA, 556 bp, Homo sapiens
atgaacaaacacactacatggataaagaagcttaactgctacatggctgcctacaatgttaaggtaacagaacagactaagcaaattctcatgatgccagccaactcccaagagttttcatcaattattcattcagggaaatataaagaacacctatacaaatcacagaagtaggtaatcagggatraaagatgaataagacacagttccttccataatacattcattctagacatttactgaatgcctactacgtgctgggcactattgtagacacagcaacatggcaatgaacaacagacaaggtccttggttttcaaggaacttatattctagttagggatatactcccttccccattttcagagcagagtaaaatacagactactcctcagaccttgacctaaagaatgggtggactccaagtggcagcaaacaatcaaacaagatcgtatcatgactggaccacctgactagcaatgaaaatgcactgcatcaggagccctgacacctgggctctgctaacttgccatgaacctttggaaagtaagttatt

SEQ ID NO: 16501 - DNA, 571 bp, Homo sapiens
gttatatattactgcagcttaaaataacaaatatttactctttcatttagtaaatttagcagtttaaacttagaagcttaaaacaaacaattatggtctcagtttctgtaggtgaagcgttcaggaacactttagttgtgtgtttttttctagggtctctcatgagggcatagttgggaagatccacttccaagatgccatactcacaggactgtcagcagcaggcttcagttccttgctggcatttggcaggaggtctcagttcctcactgcactctccttagggctgttggtgtgtcctatcaacatgacagctggctcctcccagagtggacgatctgaagagagtgcaagggagacacaatgccttgtatgatctaggcctggaagccacatactgtcrcttccaccactgtttatttattaaaagcaaatcaccaagcacatttttcattcaagggaagagaaatgagacctcacctttcagagaagaagcaaagattttgtagacatagttttaaattgctgtaagcatatttggctttcggccaggatatatagatcattctca

SEQ ID NO: 16502 - DNA, 522 bp, Homo sapiens
tgaagcttgtaattcattaaaataagtttatcatattttttcaaacataaattcagagataaatataatgaacacttgtgtacatactaagcaactttaatgataatattttgttatacttgctttagatatttaaaagaatgaatcattaaaaatagatataatgccatttggtatcctwtttttttttttttttgagacggagtctcactgtgtcaccaaggctggcatgcagtggtgcaatctcggctcactgcaagctctgcctcccgggttcacgtcattctcctgcctcagcctcctgagtagctgggactacaggcgcccaccacaacgcccggctaattttttcgtatttttagtagagacggggtttcaacttgttagccagggtggtctcgatctcctgacctcatgatctgcccaccttagcctcccaaagtgctgggattacaggtgtgagccactgcaccctgccttgggacccctaatttaaaagattttatgtttattccacatttt

SEQ ID NO: 16503 - DNA, 430 bp, Homo sapiens
ccctgaattactttcaaccctctcaactcaaaacatttttcagaagccctctctgttatttgtagtatagaatgcctgaagtactaaaaattaatataaactggattaaagtataattataaaagcaaattagctataaaaatattgcattccaaagccaaagtgatttttttatttttrtgggtcattagttctttccattaagtaggcttatgagagcaatctgttcttcaaagtaattatgatgtcaaatagtttttattttcttctattcatttctgatttcctaccatgcataattctttttacttctcttctgccctggttctatcacatgcattgacatatattcacacattttcttctgacatacacccttccttctcatacactttgctatgtataattctcaaactgttgacacacacag

SEQ ID NO: 16504 - DNA, 430 bp, Homo sapiens
ccctgaattactttcaaccctctcaactcaaaacatttttcagaagccctctctgttatttgtagtatagaatgcctgaagtactaaaaattaatataaactggattaaagtataattataaaagcaaattagctataaaaatattgcattccaaagccaaagtgatttttttatttttatgggtcattagttctttccattaagtaggcttatgagagcaatctgttcttcaaagtaattatgrtgtcaaatagtttttattttcttctattcatttctgatttcctaccatgcataattctttttacttctcttctgccctggttctatcacatgcattgacatatattcacacattttcttctgacatacacccttccttctcatacactttgctatgtataattctcaaactgttgacacacacag

SEQ ID NO: 16505 - DNA, 555 bp, Homo sapiens
agaaaaagaaaaaagctttgagttgtgtatttttgaagtgtaccctcatataaccaaagcaacaggtttgcattgatataatcatctgatatgtgtgcctatatttctgaaattgtcagattcttctctacatactgttaccaatgttgagccacatcagtgaatgcacatcatgaatgcactgtcgacttactacagttttttatttgacaaaaactgttagaaagttacacaaattatcccagacgaattacctctctaaatggtctaacctatagattatctgtttttaaaggcttttgaagaaatacatttcatgattattctttagttcatgtcgaagtttaaaaataatacacacacrtgaaaaaagtgttttctgatctactccacatgcctcttgtttccaatttggctcatccggatttactcctgtggaattaaggacttgtgttaagtgtaagtagagatgatcttctctgaaaagtggaatccgagtcttttctctacccactgctacacaggtgtttggaacttcagtttcctttctacgaa

SEQ ID NO: 16506 - DNA, 506 bp, Homo sapiens
tagaattagctctcatgatacatgatatatatatatatgyatatattaatcacccacatgtattcacatacacacacacaacacaaacatatctcggagacattgtggcttctatttcatatcaccataataaagcaaatattgcagtaaagccaaacacacaaattgtttagtctcctagagtatataaaagttatatttatactatattatagattctgaagtgtgcaatagcattatgtttaaaagaaaaatatatatacttcaattatttaaaaactttattgctaaaaaatgctagcgatcatttgagccttcagcaagtgtaaactgtttgctggtggcgtaacctgccttgatgttgatagttgctgaatgatcaggatagtggttgcaaaagattggggtggctgtgaattttttttaaaatgtaagacaacagtgaagtttgctgcatcagttaactcttcctttcataaatggttcttctgcagcattctgtgctg

SEQ ID NO: 16507 - DNA, 532 bp, Homo sapiens
cttcatggtcgataggagcttagtctttggagtcaaatagccttaataagactccaactctgacacttactagctgtttggttttgagcaaaccctctgtgccttagatttctgatctgaaaataaattaataatgcttatctcacagctttattttaggtattgagatgcttaatgtaaaactcttgagtatcttttcagaagtttcagtggcttcatacattaatatgctttccatctcaccctcatccatcatctccacacatcatatcactctttttaaaattctgaaaagtacacgcaaartgcaacttaaatagtaattttcaataatattttgcacaaatcactcttgtccttaatcacattaagtgaccttattttgttttatcatttgtcacactgttcctgcaaatgtacatgatatgaaagcaattaatctggggagagagtgcagaccatacagacatgctgtagaggcaagcccaagtgagcaggttattttaagttctggtgttctttctaatgttta

SEQ ID NO: 16508 - DNA, 528 bp, Homo sapiens
tgactgtactcgttgtatgaagtgcaaattaaacccagaaaaaaggtactacaaagaacatttccacacatgccctccatcccaggtccctagaagattcataagggcattcagtaccaagaggagagaggcacattaacaatttaatttaaaatcctttggtaatttgcaatggaaacttatgagaactggatttaatctaaactgtgtctaagctctatgatgtataaatactgttttcatcttrtatttcaggcaaaaatactgaatagtgaataccaaagagtttgaagattggggttaaacatgaatagaaaatgccttttgtgtaatcatcactgaaatgtatctttatgttactaaattcattctccttagctttactaggattccttaaagcatatgcctcaaattccacaaggaactatttatttcttctataattatggagttgcccatcagatgaaagtttcagagggctgtccagtaagattaatggaggcactttgacggaagtatttgctccac

SEQ ID NO: 16509 - DNA, 528 bp, Homo sapiens
tgactgtactcgttgtatgaagtgcaaattaaacccagaaaaaaggtactacaaagaacatttccacacatgccctccatcccaggtccctagaagattcataagggcattcagtaccaagaggagagaggcacattaacaatttaatttaaaatcctttggtaatttgcaatggaaacttatgagaactggatttaatctaaactgtgtctaagctctatgatgtataaatactgttttcatcttgtatttcaggcaaaaatactgaatagtgaataccaaagartttgaagattggggttaaacatgaatagaaaatgccttttgtgtaatcatcactgaaatgtatctttatgttactaaattcattctccttagctttactaggattccttaaagcatatgcctcaaattccacaaggaactatttatttcttctataattatggagttgcccatcagatgaaagtttcagagggctgtccagtaagattaatggaggcactttgacggaagtatttgctccac

SEQ ID NO: 16510 - DNA, 158 bp, Homo sapiens
tgctttgagaattgaaggaaaggctgaaatgaggtggatacttgggcagaggttctcagcatttgttagargcaacgtggaagctaaaattccagcttggctgtgtgggtggggatggtgggggtgggaggtgcaggggagagctgggggtggggttg

SEQ ID NO: 16511 - DNA, 494 bp, Homo sapiens
cttaccattgacagcttcaaataattttattattaaatttaatttttattgtaactaaatttttattgtaactatattatacatagttagtatacagtcagcccttccatatctatgggttccacgtccatgatttaaccaatcacagattgaagatatttgggaaaaaaattacatctatacctaacatgtacagacttttgtttcttgttattattccctaaacaatacagtgtaacaactatttacatagcatttacaatatatcaggtattataagtaatctagagatgatttaaagtatatggacagtgtgtataggctttatgcaaagcctctgtcattttatataagggacttgagcacctgggcmttttggtttctgctgtaggtcctggaaccaaccccccagggatactgatggacaactataatttattgtgacaattatggactaatttgttttgtaactattacagaagttaaaatgtgta

SEQ ID NO: 16512 - DNA, 494 bp, Homo sapiens
cttaccattgacagcttcaaataattttattattaaatttaatttttattgtaactaaatttttattgtaactatattatacatagttagtatacagtcagcccttccatatctatgggttccacgtccatgatttaaccaatcacagattgaagatatttgggaaaaaaattacatctatacctaacatgtacagacttttgtttcttgttattattccctaaacaatacagtgtaacaactatttacatagcatttacaatatatcaggtattataagtaatctagagatgatttaaagtatatggacagtgtgtataggctttatgcaaagcctctgtcattttatataagggacttgagcacctgggcatkttggtttctgctgtaggtcctggaaccaaccccccagggatactgatggacaactataatttattgtgacaattatggactaatttgttttgtaactattacagaagttaaaatgtgta

SEQ ID NO: 16513 - DNA, 494 bp, Homo sapiens
cttaccattgacagcttcaaataattttattattaaatttaatttttattgtaactaaatttttattgtaactatattatacatagttagtatacagtcagcccttccatatctatgggttccacgtccatgatttaaccaatcacagattgaagatatttgggaaaaaaattacatctatacctaacatgtacagacttttgtttcttgttattattccctaaacaatacagtgtaacaactatttacatagcatttacaatatatcaggtattataagtaatctagagatgatttaaagtatatggacagtgtgtataggctttatgcaaagcctctgtcattttatataagggacttgagcacctgggcattytggtttctgctgtaggtcctggaaccaaccccccagggatactgatggacaactataatttattgtgacaattatggactaatttgttttgtaactattacagaagttaaaatgtgta

SEQ ID NO: 16514 - DNA, 832 bp, Homo sapiens
ttgttgaattttgtcaaaggccttttctgcatctattgagataatcatgtggtttttgtctttggctctgtttatatgctggattacatttattgatttgcatatgtcccctatattgattgagtggtaagcgatctagactaacattttcaaccactttgattctttccttgatttaaccatgacttgataagtcccaatccttatctttgtaaaatgaatcctaaatatgaaatataatattggttctttagggatgtagtctcgggtcttgaaatatcctcaaatccatttcctccatacatcatttgacttgatttctttttatcgttttaatgtgtttttccctttcttttatgtgatttctttcttttagcataacttgtggttctttctgcatcatgaacraagtattgcttttcaagtccatgatttaaaatattttttactagaaaaatattttaagtggctatggtttatagttatagatctgcacctgcttgcccataaactgccttgaaagaaagaaataaatctttagaaagctcttttctcagtcctcactttaaatgagggcaagaacttggtaagtattgtgtggctcactgaacctccatcaatgacaagatgggcctctggctcaagtctacatttcctattaaaaaggtgaagtgtaaagtagattctgaaaagctaatccctataatttaagcccttatttgttccacatgaactaacttccagattgttactgaaacaaattttcttttatttgtgtattcaaataagcatgattcacttaaaaagcagtcccaccgaaccacatttgcat

SEQ ID NO: 16515 - DNA, 489 bp, Homo sapiens
aaaagcctgatttatggcacgtcctgactcccagggtataaatattctcaccctggctgatttcaggctaccagacatttaatctggattgcaaaattccttataattaacaatcaactctttttttttaactctgaaatgactttatttttttattatgctttaagttctagggtacawgtgcacaacatgcaggtttgttacatatgtatacatgtgccattaatgggtgcagcacaacaatcaactcttgaatacgggtacaaatcagccctgaggaggaacagaccttgacttattcaaggtcctgaagggaaacattgtggctgcagtgtaatagcagataaaatgatagtgatgtgaaatcagctgagagagagataggcataagttagataatgtatggccctgtaggtaatggcaaagaattgatttatttaagagtggtagaaagtcattgaatgatttaaagacgaatgttatgatcag

SEQ ID NO: 16516 - DNA, 560 bp, Homo sapiens
gtctgtatagggaggagcagaaggcagtagatagagaggaagagtatgatgtctttattatcttcttccttcctcctttcattctcaaatcaagtttgaaagcctagagtgttgaacatgggactataagaaattatgaagtttgaccttctgattttgtaattcactaatcctattgcgggatctggccagcagcccgcaatgcaacggggctctctctttgttcctaggyggatcggcaggttgagaaataatagacacacacaagatagtgagagctgggtccaggggggtcaccacctctggtcccgtggtgccaacaatgcactggatataccagcatctatgattaagtttagtgagggcgggggtaggttagtgagggatttagggtcatttgattatgaggtgagatggtcacatggggatgaagtaattctttaacataacattttatgtagaagtacagtatacagagataagaatttacaatatagtgtgtgtgtcagtaatttctaacagagccttagaacagaaacacagtctttccataacctatg

SEQ ID NO: 16517 - DNA, 560 bp, Homo sapiens
gtctgtatagggaggagcagaaggcagtagatagagaggaagagtatgatgtctttattatcttcttccttcctcctttcattctcaaatcaagtttgaaagcctagagtgttgaacatgggactataagaaattatgaagtttgaccttctgattttgtaattcactaatcctattgcgggatctggccagcagcccgcaatgcaacggggctctctctttgttcctaggtggatcggcaggttgagaaataatagacacacacaagatagtgagagctgggtccaggggggtcaccacctctggtcccgtggtgccaacaatgcactggatataccagcatytatgattaagtttagtgagggcgggggtaggttagtgagggatttagggtcatttgattatgaggtgagatggtcacatggggatgaagtaattctttaacataacattttatgtagaagtacagtatacagagataagaatttacaatatagtgtgtgtgtcagtaatttctaacagagccttagaacagaaacacagtctttccataacctatg

SEQ ID NO: 16518 - DNA, 535 bp, Homo sapiens
catagaacaactcagtcaaaagcccaarcataaagacacacaggagttgtccgggtgcggtggctcatgcctgtaatcccagccctttgggagcccgaggtgggcggatcacctgaggttgggagttcgagatcagcctaaccaacatggagaaaccccgtctctactaaaaatacaaaaaattagccgggcatggtggtgcatgcctgtaatcccagctactcaggaggctgaggcaggagaatcacttgaacctgggaggcgaaggttgtggtgagccgagatagcgccattgcactcgagcctgggcaacaagagtgaaactccattgcaaaacaaaaacaaaaaaacaaaaaaagcaaaaaacacacaagagtcacatctcaacattttgaaataaaataaaataggcttattgtagtcctgagactttttaatcatgtgtctcaaataatctaatctgttggccatctctaacaagtagcctttctcttaaaaacacaatcccattacacattttaacaaaaagctatgg

SEQ ID NO: 16519 - DNA, 535 bp, Homo sapiens
catagaacaactcagtcaaaagcccaaacataaagacacacaggagttgtccgggtgcggtggctcatgcctgtaatcccagccctttgggagcccgargtgggcggatcacctgaggttgggagttcgagatcagcctaaccaacatggagaaaccccgtctctactaaaaatacaaaaaattagccgggcatggtggtgcatgcctgtaatcccagctactcaggaggctgaggcaggagaatcacttgaacctgggaggcgaaggttgtggtgagccgagatagcgccattgcactcgagcctgggcaacaagagtgaaactccattgcaaaacaaaaacaaaaaaacaaaaaaagcaaaaaacacacaagagtcacatctcaacattttgaaataaaataaaataggcttattgtagtcctgagactttttaatcatgtgtctcaaataatctaatctgttggccatctctaacaagtagcctttctcttaaaaacacaatcccattacacattttaacaaaaagctatgg

SEQ ID NO: 16520 - DNA, 561 bp, Homo sapiens
taagactaaactccaggcaaaccataattacacagctggggtccagagagaattatgcatatggacacattgccccaggtcttccagacttcccaagtcatcaatgcaggggattccagtggttccgtcattcagggtatgaccttcagtcgggttgtttctctgcactaattttctcccaaagacgatgtgtccaatatgttgccttttgagtaatcttcctaaataattcttttgattaatggmcttcttcttgtctagaaatggaattcctaacatcatttcaggcatctctgactctaaaaatgtacgtcacagaccagtggtgtcagcaacacttggggaattgttagaaatgcaaattcttatacctcattccaggcctaccaaataaaaatgtcagagagtggagcccattgatctgtgttttaacacatcttcaggtgattcatacctgctaaagtttcagaagcactgatctaaaccctaacaacccacctatctgaacttaccatattccatttcctctccgcttataaatttgaccatagttacctaaat

SEQ ID NO: 16521 - DNA, 563 bp, Homo sapiens
agaatgtaaggttccatcagtcctggaaggtcttccaaggcagccagacctcagctggacatttaggtgtctctgttcaggatcttgctgcatccagagcccgaactttgtaattttacccattttacatttactgattttcttgatttactctggaacctcagtaaaactctcccctttctggctccagcccagtggttctgagtcactcaggtataaatggatcactggggagactgtttatagagcagatccccaaatcccaccagcagaaagagacrggttcagggggttaagaatgaagcttgacgatctgaacttttaacaagcacctcaggtaaacagaggagcatgctttcagaaatactacttcaggtcatttacggctttgttcgaagaaaaagaggatgtgtccgcccatgtgctaaaaaggagaagataaaaaagtgtccttatggccaagtgtgctggtgcatcaacaagtgtgctaaagcagcaacattctgggaagttcaacaaccattagattagacaacctctctgggctctccctttccctgtgc

SEQ ID NO: 16522 - DNA, 549 bp, Homo sapiens
cactgtggagaaatgagtaatttttttttcctggctgcctcagtgggaaaaaaactccatcattttttcatttcatgcattacaccatcaagtcacaaaaacagatccacaatttctattgttaatgatacctgctggtaaaaataatttagaagacttttcccccgttggactattgaaaatatctgattctgtgcttagtattaagagttcttgaaaccaaataatacttctggtaaaaccagacatactattttatatatgttgagagtatttagttagaaatctaaaagtaacattggtttgaggttgccagataaaggccaggtaagatcagagccagctacataatctgtgggacccagsgcaaatacaaatttggggccatttgttcaaaaagcaaggaaaagctttttcttgacccatcatggtgttttttattcactacttaatgtctggctccttcatgtgtaagatgagtgcagacctcacaggtacatggcctcatccatgactcagtgcaaaggacatgggttttaccccaccctt

SEQ ID NO: 16523 - DNA, 552 bp, Homo sapiens
taagtttcctatattctggtcaaaaatcccaaaaggagggaggatattccaggcaacagtagttatcttggcactaaaatgttttctccattcgctgagttctcagttcacagtcaggtactcagaagacattttcacaagctccatgtttttggtctgcacacygaatttagggatttcaatggaaaagcaaagaaaatatatatatatatatttaaatgtatatttatatatgtatatatattttatgtatatttatatatacaagtatatatattacatgtaatagaaagatcatcaaaagtctttttggaaccattccactctctacttgtatgagtttaacttttttagatttgacatttaagtgagattatgtggtatttgtttttctgtgcctggtttctgtcacttaacataatgccctccaggttcatctatgtcgttcatgttggcacaggaatacatcaaactacgaagcttctgcacagccaagaaaaataacaacagagtgaagtgaaaacataaggaatgggaaaatatatttgcata

SEQ ID NO: 16524 - DNA, 552 bp, Homo sapiens
taagtttcctatattctggtcaaaaatcccaaaaggagggaggatattccaggcaacagtagttatcttggcactaaaatgttttctccattcgctgagttctcagttcacagtcaggtactcagaagacattttcacaagctccatgtttttggtctgcacaccgaatttagggatttcaatggaaaagcaaagaaaatatatatatatatatttaaatgtatatttatatatgtatatatattttatgtatatttatatatacaagtatatatattacatgtaatagaaagatcatcaaaagtctttttggaaccattccactctctacttgtatgagtttaacttttttagatttgacatttaagtgagattatgtggtatttgtttttctgtgcctggtttctgtcacttaacataatgccctccaggttcatctatgtcgttcatgttggcacaggaatacatcaaactacgaagcttctgcacagccaagaaaaatarcaacagagtgaagtgaaaacataaggaatgggaaaatatatttgcata

SEQ ID NO: 16525 - DNA, 534 bp, Homo sapiens
acagtatttagtctgcttatccaattcaacccttttgcattaatattttatttcttgcttccccagttagattgtggtctagactatgcctcatatgctttttttgccctttaaggctcagcttagctattaccttctctagaacccttgccttactatccttttctccgaccctgaacatgtatatatatatgtacatatatacatacacatgtatatatatacaygtgtatatgtacatgtatatatgtatctatacacatatatatgtatctatacatatatgtatctgtatagatacatatatgtatatatgtatctgtatagatacatgtgtacttatatatgtacacatatatatatatatatatatatatatatatatatatatatatatacacacctccatttttgtgcccctacagcactgagtccaggatatcctaactgattacttagactattttatagtaatctggtttcttcttttcgtctctcactattgcattatttccatttccatatgatttgact

SEQ ID NO: 16526 - DNA, 534 bp, Homo sapiens
acagtatttagtctgcttatccaattcaacccttttgcattaatattttatttcttgcttccccagttagattgtggtctagactatgcctcatatgctttttttgccctttaaggctcagcttagctattaccttctctagaacccttgccttactatccttttctccgaccctgaacatgtatatatatatgtacatatatacatacacatgtatatatatacacgtgtatatgtacatgtatatatgtatctatacacatatatatgtatctatacatatatgtatctgtatagatacatatatgtatatatgtatctgtatagatacatgtgtacttatatawgtacacatatatatatatatatatatatatatatatatatatatatatatacacacctccatttttgtgcccctacagcactgagtccaggatatcctaactgattacttagactattttatagtaatctggtttcttcttttcgtctctcactattgcattatttccatttccatatgatttgact

SEQ ID NO: 16527 - DNA, 534 bp, Homo sapiens
acagtatttagtctgcttatccaattcaacccttttgcattaatattttatttcttgcttccccagttagattgtggtctagactatgcctcatatgctttttttgccctttaaggctcagcttagctattaccttctctagaacccttgccttactatccttttctccgaccctgaacatgtatatatatatgtacatatatacatacacatgtatatatatacacgtgtatatgtacatgtatatatgtatctatacacatatatatgtatctatacatatatgtatctgtatagatacatatatgtatatatgtatctgtatagatacatgtgtacttatatatgtacayatatatatatatatatatatatatatatatatatatatatatatacacacctccatttttgtgcccctacagcactgagtccaggatatcctaactgattacttagactattttatagtaatctggtttcttcttttcgtctctcactattgcattatttccatttccatatgatttgact

SEQ ID NO: 16528 - DNA, 534 bp, Homo sapiens
acagtatttagtctgcttatccaattcaacccttttgcattaatattttatttcttgcttccccagttagattgtggtctagactatgcctcatatgctttttttgccctttaaggctcagcttagctattaccttctctagaacccttgccttactatccttttctccgaccctgaacatgtatatatatatgtacatatatacatacacatgtatatatatacacgtgtatatgtacatgtatatatgtatctatacacatatatatgtatctatacatatatgtatctgtatagatacatatatgtatatatgtatctgtatagatacatgtgtacttatatatgtacacatatatatatatatatatatatatatatatatatatatatatayacacacctccatttttgtgcccctacagcactgagtccaggatatcctaactgattacttagactattttatagtaatctggtttcttcttttcgtctctcactattgcattatttccatttccatatgatttgact

SEQ ID NO: 16529 - DNA, 565 bp, Homo sapiens
atgtrataatagttcatacatgttgaatgtcaaacacatgccaaatatctcacttgtattatttgtaacttttttcccacaatattttagggttatatagatggctttgagactcagagaggccaagaaaatattttgtgggtgaataactagtaaattggaaagctggagttcagacttttgtttacatgacttcaaaacccattctcttagtctgtacctcattggctctcagggatctttcttagacacctcattgtctatgctctgtgatagtttgaccagttgtgtttgataaaagagatagagatgtacaaatccaaatctgcaaatccttgaccatgtaccatcattcatgtaggttctattctgattcaggacctgcttggagccttctctccaactcatatggcattctcccatcctgacaatcttccctgagtcttctgcaagttgtagaattgctcctccccctctgctataaggcctgcatataaaattggctgaggaatgtgcttggctcttttcctaaagattataaaatgatcatgaccctgtgaggcct

SEQ ID NO: 16530 - DNA, 552 bp, Homo sapiens
tgcaagcttctgaactaagggtagtttagtgttgctcaagtaaaaactgagtgagacacgtgccccactttcaggcataacccttagaacttcccatgtgattctcattttcttctctctctatcagctgaaaagagcctccccaggacctgaaaggaaatggagtgataacatagaagctgattgagcccctgtacagcttcatgtaccagccatcctgcagtgtgagtgagaaaaacagaaacttttcctttgctaagccactgacaggttagggtcatttaccaccttagcctacatgcttgctccctaaacttaagcacggttcctgaagccttctgggraaagagcctgctaacaagtattcctatttatgaataatgcaaatgagctcatacaatgtgagagctttccccaaagccacccccattagtaagggctctatctgtaaatctgatgtttgttcttgactctacgctccatgctttcgcctctaaatgcggaaaacaaaaaactcataaaacagttatattgtggtcataagtgttcaaa

SEQ ID NO: 16531 - DNA, 289 bp, Homo sapiens
tacagaacccatgggaattatgttgggtggtgggactggaggtgggagtgcctacctgtgcctacctgctccctcccctgcaggaaactcctggtcgggttgggtggtaatcttcctacagcagaatgtgccaagtcctacgagccagcagagagacaaagggtggggcatccggggtctgggagctgctcagtgggggaagttcagagataggygggggactgcctcagatcaccccagggaagagctcttcagggcagaggaagatccactccttcacccagcccta

SEQ ID NO: 16532 - DNA, 702 bp, Homo sapiens
aatccccattcatctgagctaatctccaaatggacaaagtaatcaatttaagtaataaatatggcttattccaagggctgaataaatggctggaacaattccccraactgtggtttccattgaataattgaaattatgcaagggtatggaaatttttcaacaaatacaacatgtctgaaaatctattaaagatatgtctgcaaaaatcatttgaaaaggcccaactcagcaataaaaaataaattacatttccattcttgctgttgctccctttgggaaagagcccattacaatccagttcgtggacaaatgaaacaggcacatttcggaataaacgactccccatgttctaaccaggaggtttagaccacgagataatgattctacactgaaaatagcaaaacatcccttcccttcttgttgctccgataatatatctgctgttgtgtctcatcagtggggcttttggaatctgagttttctacctgtgaatttgagtgacagacagctttgctcagagatgttagagctcgtgtgggccaagtagaccagccctatagggaccaaagagttcattggaatctcttatttgtgttttcgtcttatcctgagcaacagggctcagaggagaaaggctctccaaaggctacactggaaagttgaccaaaggaatgtaatttttgaactgtgagtttaaaggcc

SEQ ID NO: 16533 - DNA, 523 bp, Homo sapiens
gacaggtgggtaagcccatcaagtgtcatggacacatctatttgggcacttcttcaatactttgactttgaaaaactttcaattcaccaactggtatcagtggtctaaagagggtcacttcttgattatttgacagctcctggaaatctctgtgtttttttttttgcttctctctaagaataattatagatataaaggcttggaattcattttaaacctgtgatagtgtgactacagttcaacataaagattgataatgtagtgtctgttatgactcatatcttagccagtttttgttccccaatgtcagttttcatgttatacacatttccttttagttgagtatgaaragtagagctagcaacatatatttggagtttttgagtttgtaggcatcattacaattgtaataattttatactcactgagagggccacagttatgttttaggtatattgtaattgcctatgattcctagctttggttggcactgctatttggacattagttgttgatcatcaac

SEQ ID NO: 16534 - DNA, 528 bp, Homo sapiens
gaggttcaggggcagcctccaaaagaccaatcctaccatctatggtgctccgtgactttctgagatagcatcactaacctcaacccacagacctgggaatcaggagagtcacccaggttgacttctggactatcagccagtcagcaaatgaaaatcgatgagggggagcttggggatacttagaggcataaattccacattctactcttaagtaactaatacactaattagggagatgagacaccacttagaacagcagcatccagtaggagctcaataaatgctcactgactgaacagctcacacctggcagtgtataatacagtaagaactttaggaaatragaatcagaaatacacagcgaagaaacagatgattagcaaacagcagtggaaatgagattatacaaggagtatgtgaggctgggtacagcatattagcttcttaaggagcctaagccacatgaacactccccttttaattaccagcccttctatccactgaggaacctgaccgcaaccctctgga

SEQ ID NO: 16535 - DNA, 568 bp, Homo sapiens
cccatgatgtctgaggcagagaagggcaccccccaagcctccaccctgggagaggggtccagccaaagccagaattatacagtgaacttggtcccttgggcagagggcattgattcctgggctgaagcccaggttccagcaggatatgggacaaagagcaacaggctgtggagatgccaaccacggctcccagacaggccagacctggggagcagagaagggtctggcatcctggtggctaawtcaaagcaaacctgcagaggctggcgaggagccaggctgaactaaccgttgccccaacactgcccccagcactggagatgagcatgcacctggcaaccagggcttcctagatgtggtagctgctttgcgctgggtgcaagaaaacatcgcccccttcgggggtgacctcaactgtgtcactgtctttggtggatctgccggtgggagcatcatctctggcctggtaagtcactatagggggctagtgatggtggccaggagggctccggtggtctcagaactcccagctcctctgccctcctctgacagccacctcctctctcca

SEQ ID NO: 16536 - DNA, 541 bp, Homo sapiens
cttctgaggattttcctaattttcttgccgtatcaactactcgtttgatgactgtgactttaatgaatatatatatatatatttatatatatgaatatgttttaatattttaaaatatattgtaccaggattaatttttgccatttagtttagcatattgaagaaaacagaaatgccttgctttctttcactcttgatttctttcttttactccctctcttcttctctcctcttctctgttttctttggtttttctttctcattatttcatttttcttttttgtcattctatttttcttttcacatgcccttgatattttcttttttccctctttcttgtcctcttattattcttgtttgttttatctttcttgctctttatttcattttcttttctttcctttttctatcattcatgccatttttcaaakaaaagcccccaaaattgttttcagtttaatacagagtaatgttttagtaatctctttttgtaaaattagtttgactatcactaattaggacaatgagttctgtatcattg

SEQ ID NO: 16537 - DNA, 589 bp, Homo sapiens
aggtgattttcccttacaagtcgagtgttcctagaggaagatcatatatcagttaaactctgccattttgtctcttagtgcacatgcttgagcccgctcacccagctcttgagatctgatcaagaagctgctgatcaccagcttcaggtgttttctatcttttgggagactgtctttccttggcatcagctgcaaccaatcattattttagagggacagtttaacaaactccagaccatcacctgatggtcacctgacattctttggttggggtctctcccaccctgctcatgtctgcctagctacctactctaacaggtcaccataacaggaagrgtaagtgtttctcatcactagggaaagcagggctgctgttacacaacaggggaagggaggaatgttatgggtgctcaggtgatctactagggcatactttgggttcacatgcccaatttcaactgtgaattcacacagaaatgcagtcatcatggcatgaggaaatgaaggtagccagagtctgaatcctcaaggttatgtgcctgaatcctgtcacaaagcattccacctagaccatataagtgctagctaa

SEQ ID NO: 16538 - DNA, 603 bp, Homo sapiens
tgatcatagactttaaaatattgacaaatgtttagtttaaaaagtaactataatttcatatatatgaatcattagataatatatattatttgttccaagatatctaattaatctgaataaaatatataaagctgtgcataacgattctttcattaggtatttctattgatgctgttgtaatttatgccagtattttgatagaaagtcaccaaaacatcatttaatttgagtagataacgaaaatgttgaatgagtctcctaataagaacccaactttagcaaaaacacattatcagtcacaaaatataaataaaaatattttaaaggggatgctaaaagaaatatgagaaagtaaaagtcacactattaaaaaaagattaaatataatttatatatgcagtaccatgaagtttcatggtatttatcacataaccaagaattctgattaaaatagatttttyaatattttgtatcaagaaataactatattccatattagcttataacagattctgtgtagatacagaatcaaagtgtctgggttttgtttttatgtataaatgttttggcagcccttcaatgtgggcttttcattttctacac

SEQ ID NO: 16539 - DNA, 489 bp, Homo sapiens
tgtgtgattaatgcattctctttcttgaaggctctgttcaggcatcacctcctccaggaaccctgcttcacacccctctgagaactggattatatgctgcaaaagcccccttagagcacttacctctttgggttaaaacgatttgcttgttgtggcttcgtcatgagcaaagacagccgtctctgcctcctccctgcgcrcacctgcctcactctgctgcagccacgctgacgtccttgctgctcccatggatgaaccaggcatactccctcctggactctactcttgctacactgcagctggaaggctcttcccccctgacatcttgtagctggctcattgctctcctcctctagcacattactcaattgtcaccttcttagttagcttccctcctgtcttagtcccttcaggctgctatatcaaaataccatagactatgtggcttataaacaacagaaatctatttctcacagctttggagaccgt

SEQ ID NO: 16540 - DNA, 519 bp, Homo sapiens
tcatgtcttgggtatagaagcagagaaggcacctgtacgttatttcttgtcgatccacatacctgaggcatctttcatgtcaccagtgaaaaattatttcycatatcccttatgctaattagcataccctggagtgcccatcagagaagacggtagatgaaccctctaaaaagaggtggtcacctcattacggatttttaagtgcttactaaagacccctggatagtatattcctgaataaggcacttcaaatgtcatccagccacccttagggcacaaattaaaactaagtaacatgcacgtgtcacatagtatatgctgaactattttaggatacttcatgaacaagataacaacacatgagggcaaggcttgtacatttaggcatccataatggtttttatttacccataagtgtttatcacagccagatttactctgatgttcctgcttatagaaaactgaaatattttgggacttcctaataatccagattaataataaggattttcaaattac

SEQ ID NO: 16541 - DNA, 519 bp, Homo sapiens
tcatgtcttgggtatagaagcagagaaggcacctgtacgttatttcttgtcgatccacatacctgaggcatctttcatgtcaccagtgaaaaattatttctcatatcccttatgctaattagcataccctggagtgcccatcagagaagacggtagatgaaccctctaaaaagaggtggwcacctcattacggatttttaagtgcttactaaagacccctggatagtatattcctgaataaggcacttcaaatgtcatccagccacccttagggcacaaattaaaactaagtaacatgcacgtgtcacatagtatatgctgaactattttaggatacttcatgaacaagataacaacacatgagggcaaggcttgtacatttaggcatccataatggtttttatttacccataagtgtttatcacagccagatttactctgatgttcctgcttatagaaaactgaaatattttgggacttcctaataatccagattaataataaggattttcaaattac

SEQ ID NO: 16542 - DNA, 519 bp, Homo sapiens
tcatgtcttgggtatagaagcagagaaggcacctgtacgttatttcttgtcgatccacatacctgaggcatctttcatgtcaccagtgaaaaattatttctcatatcccttatgctaattagcataccctggagtgcccatcagagaagacggtagatgaaccctctaaaaagaggtggtcacctcattacggatttttaagtgcttactaaagacccctggatagtatattcctgaataaggcacttcaaatgtcatccagccacccttagggcacaaattaaaactaagtaacatgcacgtgtcacatagtatatgctgaactattttaggatacttcatgaacaagataacaacacatgagggcaaggcttgtacattyaggcatccataatggtttttatttacccataagtgtttatcacagccagatttactctgatgttcctgcttatagaaaactgaaatattttgggacttcctaataatccagattaataataaggattttcaaattac

SEQ ID NO: 16543 - DNA, 517 bp, Homo sapiens
gagttcaagaccagcctggccaacatggcraaaccccgtctctactaaaaatacaaaaattagccaggagtggtggtgggtgcctgtaatcccaactacttgagaggctgaggcaggagaattgcttgaaccccagaggcggaggtgacagtgagctgaggtcgcgccactgtactccagcctgggcgacagagcaagactccatctcaaaaaaaaaaaaaaagatgtgatgattgttgctgctatggccccaccatttaatataatctttccttgaaaccatgagaagggaagcatgaacacaaacaccaacaatctgaagatggcaaagaggaaagagaagaaagaacttgagtgcttgatgatgagtcttgaattaagcaactctggaagcaccctatttagaatttcccattagataacataataaatctcctcatcatttaaatcactttcacttggaccttctactatttgcagaagaattatctttttttagttgacatgtaataattgc

SEQ ID NO: 16544 - DNA, 545 bp, Homo sapiens
agctgggcagttcttctgtttcatgtgatattgcttagagtcaaagacatccagaaaagctaatccagagctggaacctgcaggatggctcattctgtcactggcagctgggctggctgttggctgtgagttcagcygatgtgcctggtcttcatcatatgggcctctctgtgaaattgcttcggctttctcacatagtggtggtgggattaaaaaaaaggagccttccaaatacataaacaaaaatgttgtaagtcttttagtgcttagacttgcatgttactgtattagtctggctctccagagaagcagaaccaatagagtgtgtgtgtgtgtgtgtgtgtgtgtgtgtgtgtgtgcatgtgtatgtgtgtgtgtatacatataaagaaatttattagaaagaatttgctcatgtgattacagaggctgataagtcccaagacctgtaggctggagaaccaagagaaccactggtatctttccagtccaaaggccaacaggctggacaccagggaagggctaatgtttcagttaaagttcca

SEQ ID NO: 16545 - DNA, 569 bp, Homo sapiens
tatagggaaagaacacagatcaaaatcagccaaaggaagagatacgtagagtctgggagagttcctagcaagcagcttttgttgtcctctgtggggctagaacaggtgaccctcccgggattgagtgtgacagtacacaagaaatattgccaaccacagaagctcamccaagctcagtgtccagagtttttattggagcttcattatgtagacatgattgattgattgattgcccttctggttgaactcagcctccaggtcaactgatactacctgtcccaaagaccctaccttaaatcacatggtggttctttctgatgtgaccagcccctgcccaaacaaagagactcataagaggtcatgacataaattatctcccagaagcctaaggaaaaggccagacctatctttgggcaaagccaaattattcactacatagagaaaggccaaaagtgactactcatagaggcactcaataaatataattgagatggtcctctgtgctatgaaggaaaacatggtgacacagagatttgaaacctatatcactttaatttttcttggctgag

SEQ ID NO: 16546 - DNA, 499 bp, Homo sapiens
tgtcatgccaaaatacatgccctatcatgaaatggtaacgatgctttttacattgttccatgctactatttcattttagtggtgtctacattaaaactaattcaagattgaaaattttgtgtaatatattatacaaaagtcaaaactaagtctccatgcagctcagtttctaaataactcatatatttaccgagtactcagtaactattattgatttacctataattatttaatattttwaggaatctgcaggtttccaaagactgaatattttactcataacgtttctatttaatctctatcctttattaaataccatgaaaattaactgcaaactactagtgggttcattgaatgccattagctattttttatagtgtgttccataattgatggagtaggtacatagacacacactgctgtgctttcccaaatataaccacctttaagttatgttatatgctagcttcctgaatgctttagatattataattttaaa

SEQ ID NO: 16547 - DNA, 571 bp, Homo sapiens
atgtcttagataatatgatttatgttctaaattagtactatracttgtatttaaattattttgtggaaaatagaaaaaaatagctaccttagaattcctcttgaagaacaattgcctttgttaagtgattggctaaaaatgacaccctttggcatagaacagattggctagtagtgagattcttccattgttccaggaataacattatctgcaaataatacaaaagaaaagaggaaaaccaagagtgatgttgaatgaaaattatgtattgaaagaggagagtggaggaagttgaaaagaaaagtagtacatcagggaattccttcagtgaagattgctttagtccatggttcactgccatggtactccagcctgggctacatagcaagaccctatctccaaaagaaaaaaaagaaagaacacgaaaaaaagagaaattctctgacagagtcatgactcagaaagtttgaagaaaaatatgtgtttaatgttcaatattcaggtgtattctttgctggtgtagaatgtaatccttaatcccagtttgctggaggaattgtttgtatacatc

SEQ ID NO: 16548 - DNA, 571 bp, Homo sapiens
atgtcttagataatatgatttatgttctaaattagtactatgacttgtatttaaattattttgtggaaaatagaaaaaaatagctaccttagaattcctcttgaagaacaattgcctttgttaagtgattggctaaaaatgacaccctttggcatagaacagattggctagtagtgagattcttccattgttccaggaataacattatctgcaaataatacaaaagaaaagaggaaaaccaagagtgatgttgaatgaaaattatgtattgaaagaggagagtggaggaagttgaaaagaaaagtagtacatcagggaattccttcagtgaagattgctttagtccatggttcactgccatggtactccagcctgggctacatagcaagaccctatctccaaaagaaaaaaaagaaagaacacgaaaaaaagagaaattctctgacagagtcatgactcagaaagtttgaagaaaaatatgtgtttaatgttcaatattcaggtgtattctttgctggkgtagaatgtaatccttaatcccagtttgctggaggaattgtttgtatacatc

SEQ ID NO: 16549 - DNA, 572 bp, Homo sapiens
tcatgagccttctggagtcccctttccctttttctggactaccccaatttctggacagcccatttccagaatcttctctccttaagccctgctcaggcaccactccagtggaaaagaccagaaatttatttccccatccaatagtcccacttgcaggataggtggaaagaaagtatgaaaaaacctctctctcccagaataaactacagtgtttactcctgtttaatttttaatttttcttgccacatctgaacatgatgaggaaaaatgtctgtgtgttgagattgaagtgactcagtagaagcatgargggctgtagcaggagagaaaaatcctcctactccagggaaaagggtcttctggtgagggctggcagggtcgcgtggctttgtgacccatgcatgagctcccaactgtgctaataacccatggctgactttgcctgtgtctagagggagcggcttccacaacagcaagctcacctaccaacagcaatatggcagtgttcatcggctcccacaagaggtgagtcatgtggttctttctcctgcccctacctggggtccctccta

SEQ ID NO: 16550 - DNA, 572 bp, Homo sapiens
tcatgagccttctggagtcccctttccctttttctggactaccccaatttctggacagcccatttccagaatcttctctccttaagccctgctcaggcaccactccagtggaaaagaccagaaatttatttccccatccaatagtcccacttgcaggataggtggaaagaaagtatgaaaaaacctctctctcccagaataaactacagtgtttactcctgtttaatttttaatttttcttgccacatctgaacatgatgaggaaaaatgtctgtgtgttgagattgaagtgactcagtagaagcatgaggggctgtagcaggagagaaaaatcctcctactccagggaaaagggtcttctggtgagggctggcagggtcgcgtggctttgtgacccatgcatgagctcccaactgtgctaataacccatggctgactttgcctrtgtctagagggagcggcttccacaacagcaagctcacctaccaacagcaatatggcagtgttcatcggctcccacaagaggtgagtcatgtggttctttctcctgcccctacctggggtccctccta

SEQ ID NO: 16551 - DNA, 500 bp, Homo sapiens
cattctcaccagcatttgttgtttctgttgttttatacatgtttttatacacacatatatacacacacacaatgrctattctaacaggtgtgaagtgatatcccattgtggttttgatttgcattttcctgataatgagtggtgttgagcatcttttcatgtatttattggctatttgtagatttcttctggagaaatgtcaagtcctttgcccatttaatcgggccttttttttttattgttttaggagttctgtctatatttgggatataattccttatcagatatgtaatttgcaaatattttatcccattgtgtgagttgcctttttactctgttgatattgtcatttggtgcacaaattttgaaattttagccagacatggtggtttgcacctgtaatcctggctactcaggaggcagaggtgagaggatcacttggactcaggagtttgaggctgtggtgcgccatgatcatgccagtaaatagccactgcatt

SEQ ID NO: 16552 - DNA, 530 bp, Homo sapiens
cttgatctagggtaaaaaatgaaatcagacacattaagaaaaaaaaatctgcaactatcacgtcaagttgatctgtttggtatttatttgacaattaaaagtactatatgattatctctgcccacatctcctatcaggctaaatacagttgaaagttaatactagccccggaaaaacttgatgtttttaaagtttcttttggacatattgccctggctaaatatctgcgtgccaggttattattttaaaatttgtaaatgattcaaaggctagagtttataagcttaacctgagaaattttctggygagaattgctatttcttatcttcattgagaatcaaaaaaaaaaaaaaaagaccagaaatctctacttcttcagctattggggtagacagtaggccttggagggtgattcactctagagtaatgaatgacggaaatctttagcattctgttataataagactttttctctctgagcaacttactgctttcaaaggctgcttttaggtgacagtggctcccactgc

SEQ ID NO: 16553 - DNA, 570 bp, Homo sapiens
gaaaggaggaaaatggctctgtctcacaaaattaagtcrcctctctttggtgttctgatggtgtctgttcattagggctgcaagaatcacccttcttgtttttctgcatcatttacttgttcatgcaagtggtaaaaaacaaagaaacaaagtgaaaccaaaatgtacactaaagttttgtgtttcttaattggagccacaagtatggattatttttattgagatgatgaactctttcttctatatccagttatctgaacatgtgtgtatcttgcctaaagctgagcttttgtgattttgaagaagttcactggaatccagtctttgcaaattatttccatattaattcttactaacaaaacatacaaacaccattttccttaacatcctacatttttgatccgagtaacattgggactggcaggtacaagctcagaggccaagcagatgaaatgttaactttgttccttaactcaccctgtgttttctttctgcatttggttgtgtagattatgtaagtgattctcgtaggaaaattccagtgatgactgaaaagcagcttccattcta

SEQ ID NO: 16554 - DNA, 506 bp, Homo sapiens
acaatagagtcaataatttatttaactattctccatattctataatgttgctgggcattataatggtgtgatgaatatcttttcactgtaatgcctccctatatttyaaacactttttacaggagttttttcctcaataataccctactggccttaaagagaactcacttatacctgtgataaatacaccaagaacacagttatcatatgatttttttatcaaagaaaaatatcacataaattgatagcattttatcaaacttattttccacatagtcctgccttccttattcttcaacatttaagtttctttctctttcagtagcctgtgtgatcatttctttgttctctagtttcaactatagtcaacattattgaaaagtttcttttaaaattgggaaaattatttttggccccatacctaccctattaatcccaaaaagcatatggaaagaagcaatggagagggaaaccgaaatcctcagagaaatctgatgtgcgttgac

SEQ ID NO: 16555 - DNA, 1301 bp, Homo sapiens
aaaagctgcctattagctcgaactgttgccatcgagagactgatgtggcagaaatgtcttgctctgtttccgaggctgccgatccgttcacttggcaaactccagagaaacaaggcccagcacgccccagtttaacaaagttgaataaaaggccatttcatctcagggctacttagtccaaatcaaataatgcytaagctatttggtccaagccagctcaagtgctcagacatcatacaaggctttcttggctgagaagaagcaccaccaccaccagtcgctgcacacatttagcttgttcctgctgttttcaccagcctaacttcccagctggagtaggtaccaaattcaaaatcaagcttcactgaggactatcacctagactccccttgaccaatcactctacaggtgcaaattaatccattatgcgctgtaatttccaaacagtggcatatccattttacataagcaggaagacttataatgtcacagcacaaaattattcatatttgtctataactttccttcaaatcctcattttctcctatttttatttaatgcaaaaagccatgtgattttcagggaaagaaaaaagtgattcatttctgaaaacctataagccataaaatcaagggctccacatctgtttgagaaagtctgacaattgtttctgagatcttcagaatttcctttcataaggtagcgaggtatgggaatcaccgcaattttgtgaggtgtcatcagaccaggtttagtagttttgtagtttcccaatcaacttgttgataaatcatgattaacaattcaggaaactcatattagacaatagtaattcaaattaagctaaaccgggggagggcatgtaatttatttggatttgcaatctgtctgttgcaaggagccagaatcgtgctgtgatttgcccttcatgtgcaaagctcattttgcaaaatccatcttccatagagagggaaaatctcaacccagagaatctagcccattaatacattaattctttaatacatcactaaccaaactagctttttggtcatttgtgaccaaaggagttacaatgagtgtggaagactgggacaggaaaagagatattcactggaatcaggaaataacaagtttactacttttaacttaggaggttagcaatggaaaacccatatttagggagaacaggcaaaaggaaatagaagtcagtacaatacattctattcaattccacctggaatactactgataaaaatcacgtattaaataacctagccattgtcagcttctcggattcaatc

SEQ ID NO: 16556 - DNA, 508 bp, Homo sapiens
tgccaagagactgaccagctcaagccactctcttgagaaataggaaaccagagatcttgatagtttgaagtttagtctagtgttacaaamaagggatgagataaattctaccctcttgactatgcatttgttattcttgaccctattcaacatttcaaagtttttatacaacaaaggcaaagattaagatagaaacactccagttttgacaaaactctttctacttacttatggaaacattcgggcattatataccggtgttttggacaaagtccactatagagaagaaacttggatatattatggccccagtgaatggaatttcagaagcaatcaaaacaagtacagcaacaaaaatattaaagatgctcttgtggaagaagaaattccatttcataggaaatcaaaaggtcattgccaaagtaattgagattttgcaagacaacaaccagcagaacgacagacatgagtgaaagtggtatgagaaaaaatatagtcaacttataaa

SEQ ID NO: 16557 - DNA, 539 bp, Homo sapiens
gacgaatacactgagagcccaggcttcaccaccatgcaatagatgcatgtaacacaactgcacttgtcctcaaatttgtacaaatgaggaaaaaagaaatctatatatttatatataaataaagaccagtcaggcaacctgattggaaacctttggtttcaagaaaataaataaatcaatgagtgaatgaatgaatgttggttcccaatactctttcctagacccattatttctgtyttcttttttagtctcatggtttggaacaccatcttgatcctaatgagtctcacatttttctctcctataattccatacttatttgattctaaattagatatgtaataggcatgtctcagaagcaaaatcttgatttcttaccgtctgcatccaccaagcttatttccccctcaacttttccatttcagtaattaatgccaaaagtctcccaagtgttcaagcaaaatgtccagaaattatctttgttcatctcttaactctatccttcccaaagtgtatgtattctcacatatgcacggaca

SEQ ID NO: 16558 - DNA, 539 bp, Homo sapiens
gacgaatacactgagagcccaggcttcaccaccatgcaatagatgcatgtaacacaactgcacttgtcctcaaatttgtacaaatgaggaaaaaagaaatctatatatttatatataaataaagaccagtcaggcaacctgattggaaacctttggtttcaagaaaataaataaatcaatgagtgaatgaatgaatgttggttcccaatactctttcctagacccattatttctgtcttcttttttagtctcatggtttggaacaccatcttgatcctaatgagtctcacatttttctctcctataattccatacttatttkattctaaattagatatgtaataggcatgtctcagaagcaaaatcttgatttcttaccgtctgcatccaccaagcttatttccccctcaacttttccatttcagtaattaatgccaaaagtctcccaagtgttcaagcaaaatgtccagaaattatctttgttcatctcttaactctatccttcccaaagtgtatgtattctcacatatgcacggaca

SEQ ID NO: 16559 - DNA, 539 bp, Homo sapiens
gacgaatacactgagagcccaggcttcaccaccatgcaatagatgcatgtaacacaactgcacttgtcctcaaatttgtacaaatgaggaaaaaagaaatctatatatttatatataaataaagaccagtcaggcaacctgattggaaacctttggtttcaagaaaataaataaatcaatgagtgaatgaatgaatgttggttcccaatactctttcctagacccattatttctgtcttcttttttagtctcatggtttggaacaccatcttgatcctaatgagtctcacatttttctctcctataattccatacttatttgattctaaattagatatgtaataggcatgtctcagaagcaaaatcttgatttcttaccrtctgcatccaccaagcttatttccccctcaacttttccatttcagtaattaatgccaaaagtctcccaagtgttcaagcaaaatgtccagaaattatctttgttcatctcttaactctatccttcccaaagtgtatgtattctcacatatgcacggaca

SEQ ID NO: 16560 - DNA, 539 bp, Homo sapiens
gacgaatacactgagagcccaggcttcaccaccatgcaatagatgcatgtaacacaactgcacttgtcctcaaatttgtacaaatgaggaaaaaagaaatctatatatttatatataaataaagaccagtcaggcaacctgattggaaacctttggtttcaagaaaataaataaatcaatgagtgaatgaatgaatgttggttcccaatactctttcctagacccattatttctgtcttcttttttagtctcatggtttggaacaccatcttgatcctaatgagtctcacatttttctctcctataattccatacttatttgattctaaattagatatgtaataggcatgtctcagaagcaaaatcttgatttcttaccgtctgcrtccaccaagcttatttccccctcaacttttccatttcagtaattaatgccaaaagtctcccaagtgttcaagcaaaatgtccagaaattatctttgttcatctcttaactctatccttcccaaagtgtatgtattctcacatatgcacggaca

SEQ ID NO: 16561 - DNA, 360 bp, Homo sapiens
attttttatggctacagagtacttcattgtatacagatagtgcattttctttwtgcattcatctgttgccagacacttaggcttattctgtatcttggctatcatacatagtgtgcaataaaaatgactaggtgcattgcaattagctttaaaaagatggaacggcattgtaaggacagaccatgaatctaagcccttaggttgaatacttaggttgaataaaattgttggaataagtggctatttgatgtatgtaatgaaagggattcttacttggcaggtattattaggagaaaaaaaaagagagagaaagttgaaggagaggggaaaactgccacagcaggttaagcaacttgcttt

SEQ ID NO: 16562 - DNA, 552 bp, Homo sapiens
tgtagtcccagctactccggaggctaaggcaggagaatcacttgaacccgggaggtggaggttgcagtgagcagagatcacgccattgcactccaatctgggcaacaagagtaaaactctgtctcaaaaaawatatatatatatatatagattatcatcataataattattttaaagtgaagccttttacattttatatattattcaagaatttagaatatattttacatgttactatttaatctttagatcattgccccacgcctctgaaggctgagagattatatgctatttaccagctaatttgttcgaagacttctaggtcacaggccaagacattttataactcatagcaatggtggtagctaaaatgtcagcacttttgtggtaattccccaatccccacttcccacaaggctactcaaatagaacagtgcattgccttagaggagaagaaatccaaacttagcagacacaaattattcataatgacagtgagcaacactatcttccaaggctattcaatatacaaacattcttggaaaaaattct

SEQ ID NO: 16563 - DNA, 509 bp, Homo sapiens
tccaatttaattgtattgatactcttaaatagagatggggacttattatagaatcagtattttttctatactttaaaaaatacattccctcagctagataatttgaaaacttcaataaaatggttgaatctcttgaaatctcaacttaaaaaaagataaaaaagatatgaaaaatttgaatattcrtataccttttaagggaatatttcaaattaatttttaaatatgtatatatatatatatatatatatatatagccgtacagatttatatatgtgtgtatatgtatgtatatatttgagattcaaatataataagcataagcaatgtagatgggcttgatactttcaacaaatatgttttggagggtatgatttacaaataaataattaaatataagatgttcaacataacgtgtttatataagtataccttgagtaatgatttccacaatcaagctaattgacctattcatcatctgacatagctaccatttgtttggtgtgtgt

SEQ ID NO: 16564 - DNA, 509 bp, Homo sapiens
tccaatttaattgtattgatactcttaaatagagatggggacttattatagaatcagtattttttctatactttaaaaaatacattccctcagctagataatttgaaaacttcaataaaatggttgaatctcttgaaatctcaacttaaaaaaagataaaaaagatatgaaaaatttgaatattcgtataccttttaagggaatwtttcaaattaatttttaaatatgtatatatatatatatatatatatatatagccgtacagatttatatatgtgtgtatatgtatgtatatatttgagattcaaatataataagcataagcaatgtagatgggcttgatactttcaacaaatatgttttggagggtatgatttacaaataaataattaaatataagatgttcaacataacgtgtttatataagtataccttgagtaatgatttccacaatcaagctaattgacctattcatcatctgacatagctaccatttgtttggtgtgtgt

SEQ ID NO: 16565 - DNA, 509 bp, Homo sapiens
tccaatttaattgtattgatactcttaaatagagatggggacttattatagaatcagtattttttctatactttaaaaaatacattccctcagctagataatttgaaaacttcaataaaatggttgaatctcttgaaatctcaacttaaaaaaagataaaaaagatatgaaaaatttgaatattcgtataccttttaagggaatatttcaaattaatttttaaatatgtatatatatatatatatatatatatatagccgtacagatttatatatgtgtgtatatgtatgtatatatttgagattcaaatataataagcataagcaatgtagatgggcttgatactttcaacaaatatgttttggagggtatgatttacaaataaataattawatataagatgttcaacataacgtgtttatataagtataccttgagtaatgatttccacaatcaagctaattgacctattcatcatctgacatagctaccatttgtttggtgtgtgt

SEQ ID NO: 16566 - DNA, 556 bp, Homo sapiens
taatttaactcaaaacagtcctttaatcctgggcaaaagtttacatttccatgccttcttataaccttttactaaaaaacacattttactgttcttacacaccctgcatgcaaatctatttctagtagtttcaatgaacacctagcratttttaactttaaagtaaaacttggtactttgctttaattgtgtggtaactgcagccaaggtttgcgttcttagttaaggatgtggttagttccgtatgtctccaggcattaccaatcatggtaaaaactttaaaaatagaggaaagagctttctttgcacataaactttataaactcaagaaataagtattacattctctaactaaagagttcctctggacttaacccagactactgctttttagtgatgaatattgcccttgtccaacagtccatacagaagactctgcgttttatgccaaataatatattaatatcaataattaatttttatttaataaggcttgttttccaaggaagaaaagtttatgttttcaaacaaatttttaatttaaaaattgtgtgta

SEQ ID NO: 16567 - DNA, 556 bp, Homo sapiens
taatttaactcaaaacagtcctttaatcctgggcaaaagtttacatttccatgccttcttataaccttttactaaaaaacacattttactgttcttacacaccctgcatgcaaatctatttctagtagtttcaatgaacacctagcgatttttaactttaaagtaaaacttggtactttgctttaattgtgtggtaactgcagccaaggtttgcgttcttagttaaggatgtggttagttccgtatgtctccaggcattaccaatcatggtaaaaactttaaaaatagaggaaagagctttctttgcacataaactttataaactcaagaaataagtattacattctctaactaaagagttcctctggacttaacccagactactgctttttagtgatgaatattgcccttgtccaacagtccatacagaagactctgcgttttatgccaaataatatattaatatcaataattaatttttatttaataaggcttgttttccaaggaagaaaagtttatgttttcaaacaaatttttaatttaaaaattgtrtgta

SEQ ID NO: 16568 - DNA, 515 bp, Homo sapiens
attttctgcctgttttggacttaggggtctattagttataaaaataattatcaaataacttatttgaaaatttctaagagattatttttcccctcacattcaaatttaacatttatcatactattattctttatattgttttggaaatgttacatttataataaatatataactataatcacttacacataattaaaacacctgaaaatagagagtargcaacagattgaagatgtggtgtttggagtttcttctcgcatatacactgaaaattgctaaaaatacttaggaatattttgctgggttactaggttttagaaatagaagtacagggtgacaggtaaatatctgactcaaaaatagttttttagatgtgttaattgaattaatacagtcccatcacaatgaatattttacctatgccaggtaatcaaaattaaaattacatttaataattttgaagtttcacaagcagagtattttggaactatttgggtcccattaaggactgggta

SEQ ID NO: 16569 - DNA, 586 bp, Homo sapiens
ctttatcctgtggctccaggcctgcagagaaatgggctttctcaggcttaattaggccaacatttggcaagaaacacctcaatatataaaaaacctcttctccagaaatgggcaatcaaattctctctccatacactttctggaacaatccatcagaataaacttccagtgargcttattatcttttaagcttcaatttttatccagagtttgcaaaaatcaccttgagaatttgaaaaaaaaaaaaaagaaacagatttcttgtatttcagaatgaaaaatgtattctttggctttggtgagtgaggtagtaatatcacaaatagatttatcacagagttggcaaggattgtaacacaatatgtggttatagttctagtctagcactttctccagtagcccttcttcatctttcctatttggtgaataagttgaaaaataaaatcttatcctattgaattagagtcttccagagaaatagaaccagtaagttcaaaatctgctgcagtgtggactggcaggcagagacaaaagagaactgatggtgcagatgaagttcgaaagcagtctgctggaaaattccctc

SEQ ID NO: 16570 - DNA, 586 bp, Homo sapiens
ctttatcctgtggctccaggcctgcagagaaatgggctttctcaggcttaattaggccaacatttggcaagaaacacctcaatatataaaaaacctcttctccagaaatgggcaatcaaattctctctccatacactttctggaacaatccatcagaataaacttccagtgaggcttattatcttttaagcttcaattttyatccagagtttgcaaaaatcaccttgagaatttgaaaaaaaaaaaaaagaaacagatttcttgtatttcagaatgaaaaatgtattctttggctttggtgagtgaggtagtaatatcacaaatagatttatcacagagttggcaaggattgtaacacaatatgtggttatagttctagtctagcactttctccagtagcccttcttcatctttcctatttggtgaataagttgaaaaataaaatcttatcctattgaattagagtcttccagagaaatagaaccagtaagttcaaaatctgctgcagtgtggactggcaggcagagacaaaagagaactgatggtgcagatgaagttcgaaagcagtctgctggaaaattccctc

SEQ ID NO: 16571 - DNA, 528 bp, Homo sapiens
ctctgaaattttgtactgggttattctttgttgtcagaggggggcgtcctgtgccttgtaggatgtttagcagcatactggtctctagccatgagatgccagtagcacccactgaaaaatgtctccagacattgtcagatgtgccctgggggcaaaattgttcttcacatttgctaccccttgagaaccacttctctaggtcttgttgaccagggcttctgaaacttagatgtacacaggaattccctcagaacgcagatgctgatccagtaggtcagaagcagggyctgagactctgcatttctaacaagctcccaggtgatgtgaatactgttggtcagtgtatcacaattaagtagcaaggttgtagaaaagtccacattcataccaactgggtgaactctcaagggaagccgatgaaagtaattatggaaatagtgaatttacaatgaattgtagcccaaacaatgtaaggctaatagaagctaagaaaacaagcattatcctgctgtcctaacaaagcagctg

SEQ ID NO: 16572 - DNA, 570 bp, Homo sapiens
agcccagtcgatctctctctcctctgcccccagctgcagtgcatgcctctgtgataccactgctcatactgtactgttttatttgagaatgtgtctctccctccttcaaagtgaattatgtatcttcrtgtctccagaaactagtacagcacctggcacataggaggggcttgggaagggtttgtaacatgaatgaatcctcagaaagctcagctgacacattggttgcatacccttatgagtggcatctgaacacctaatcacaaaacaatccagttttgaaattctggatgcatgtggcattccattattcatcttcacatatcacaccacagcatgtgtggtccactgccctgttgcctgtcattgctcattttcccagtcctaagagtctgagacctgcctttcctctttgtatcctttgtttgccaacaggtctttagctagctcttgaccctgcctgctcagtggcttctggtttcttagctgaggtgctccctatttctggctggattctatgaagcctctcactagtcccaggctcccttggttggagggagtgtgcaggga

SEQ ID NO: 16573 - DNA, 570 bp, Homo sapiens
agcccagtcgatctctctctcctctgcccccagctgcagtgcatgcctctgtgataccactgctcatactgtactgttttatttgagaatgtgtctctccctccttcaaagtgaattatgtatcttcatgtctccagaaactagtacagcacctggcacataggaggggcttgggaagggtttgtaacatgaatgaatcctcagaaagctcagctgacacattggttgcatacccttatgagtggcatctgaacacctaatcacaaaacaatccagttttgaaattctggatgcatgtggcattccattattcatcttcacatatcacaccacagcatgtgtggtccactgccctgttgcctgtcattgctcattttcccagtcctaagagtctgagacctgcctttcctctttgtatcctttgtttgccaacaggtctttagctagctcttgaccctgcctgctcagtggyttctggtttcttagctgaggtgctccctatttctggctggattctatgaagcctctcactagtcccaggctcccttggttggagggagtgtgcaggga

SEQ ID NO: 16574 - DNA, 597 bp, Homo sapiens
ataagttacaaagagaacattcagagacaggaacgtggtctggacagaaaacaatggtgggtgggaggaaggtagagggctgtccgtcagtggagaagtgggcatccggcacacctgcattccaaaggtggaggactgcagggagggttcatgggtcaaagctatggactgtggaaagtggatttacctgactggctctggacctctcttcttccctccaatgaggccacttgatttccttccctgtgtcctaagggaaatttagggatccacagaaactgtggacactgagacaactgactatcagcccactgtgaccctgggctctgatccacactaggctttagacttatcccagagtagaactcacagcgtaaaccaagttttagccctggaaattgaggcaataccctatacctaatccctgctttgttgacttactcactcgattctctaatgcagtggttctcaatcctggatgcacattagagtcatctgagggcttttaaacataccaacrcctagacttcaccccagaccaaatgaatcagaatttctggggatatgacttgtgcatagattttttaaagctcccca

SEQ ID NO: 16575 - DNA, 570 bp, Homo sapiens
tctattatagatcagcactctcatttcacagaggaagaaagtgaagtatatcttgatgatgtagtttgatgactggtggagtccacctctgaactctgagccttggatgatataatggaattcagaactcatacacattgaaaaatgagttgacaagaattgaactcagaagctattattttcattccaaagcaaaaatcagtgcatccaggtgtcaggcagattggagtgcaaggatgatggaaaagttatggccagaaaaaggaagaacaagccaatgggaaagaagagcaagacttcatttttttcctctaggactaaacagctgctgagacatggtaaatgtttcctttctggagctaactctgaattaactaaaggtgccaaaaatatacataaaaggaaaaacatgtagacattaaaactgactctctttgcccaagtaaaacagatggctggaaagaagtcaaataagctgtgttgaagactgaatgggtggtcccaggagagatggagayattgtcttattgactagtgcaagctttggaaaataatcagctattaaaaaaa

SEQ ID NO: 16576 - DNA, 1743 bp, Homo sapiens
catgttagcaaaaacttttttgacactatgaaaaataaaggtattgattgtggcaactcgtgtagttatatttgaaatatggaataatacttttagtaattgtttgctttaagtattccagaaaaaagtttcaaggcagcatgattggtgggagattatattgagaacatgtatgcctttgtgttttctttcttagaaatgccaattagaagcagacgaattgagagttggaaacaatgaaagaaatggagttaaaaaaaaagtttttgctaattcacaacatagataaccaacaattacttaaatgtattaaagctatttctttacaaaaccaatttctttaaatctattgtgttataaaaaaaatttcaggttccatgtcattcattcattcattaactcatgtaagaaaattgtatttagtgccaactttttaccaagaatgatgctactggtgatgatacagacataattcctgcccttgtggactttgtggtctgttagaaaatttttgtatcaagtgcaaaattaatggaggggagacttcctcctattctatgactctttgaagcatagttccttatatcctacttttgaaagctcttcgctaagatgtaattgtccctctatacaagattttgttttttcaaataactttgtttcttcctcggaatggtaattaatgaaaggatgaagcacctagtattctatagtggtagaggaacattaaaatatagawaaattagaataagtctttccaaagggaaaaaagtggccgtcaaaagcttgctaagttgtctttatttgtaatcacattagaagtttcccaacaataacaatcatttcaagagaaaccaaagcagtccactgaagggcatggccaggagcaggtggtaaatagaacacacagcctatagggcaaagagggaagttgagggagcaaggtcttctaaaattgatcattcttacagcaagcatttctacccactatcactttcaaagctcctattacacggttgtatccagctatttaagtgattcttttcttagaatcaaggagcttcaggagcccagaagaatcatagaggtcacctcaacatttatctaccaaggagagtttactaatcaaaacagggaactaaaatgccaaaggatgtgttttttcttacaatttaattataccacattctcccttttccatttaatgtgcataactcaattgaatgtatattttcttatttatttgatgatagcattggcatttataaattattgtctgaaagagcaccaggggatgtctggtttctttccctcagtaattttgcctgcttctgtttaacagaggcatatttatctcagatttctgcttcttgccttccacaatgaatgacatttcttttcagatatttccatttccagatacgatattaagtaacttcaataatgtagagaaaaatgttcaaggataaacctcacataacagtgttcttttaaacaaatatctttcttagtgacaactttgggaagatctctttagtctttttcatatgcacacacacatatgcacacttttagtttataggatagttaaaatgacatgtgcaaatagcctttagtgaatctttttgacatgacagtttatggtttaagaggtggctagtgggtctctgctttcaatgttatgcataaaataaagaagtatgaacacttcaattgcacaagaagtgtcattttaaaataata

SEQ ID NO: 16577 - DNA, 558 bp, Homo sapiens
taacaaaataatctatttattgttatatattaatatattaaaaataatatattttacaactacatgttttggaaagmaatctatgcaaagactaaaattagattagaatactaaactgttacaaggaaatgctcaattttatgaatccctctgccagccattattcccttcaaattatgagagttagataaagcccctgatagttgctaccctgcaaacttaatgtttctctagcagcttgcacacatattagacggtaaatatttcactaaggacgtagttttcttagcaggctccaatcaagtggcttctgctttactagtttatctgtcagacacattatgagaaacctcttccttgtacaggaatttttctgtgttgtttatataagtatcacagagcgatgtgcttgatataagttgtttcagttggaaagaactctgccaaagaaaacagacaggcagctgtttgcatagtgcataaaaattttttttgttaaatatggccacacctgtgtaaacacaaactttatttccaagaagtacacttgcagctgca

SEQ ID NO: 16578 - DNA, 558 bp, Homo sapiens
taacaaaataatctatttattgttatatattaatatattaaaaataatatattttacaactacatgttttggaaagcawtctatgcaaagactaaaattagattagaatactaaactgttacaaggaaatgctcaattttatgaatccctctgccagccattattcccttcaaattatgagagttagataaagcccctgatagttgctaccctgcaaacttaatgtttctctagcagcttgcacacatattagacggtaaatatttcactaaggacgtagttttcttagcaggctccaatcaagtggcttctgctttactagtttatctgtcagacacattatgagaaacctcttccttgtacaggaatttttctgtgttgtttatataagtatcacagagcgatgtgcttgatataagttgtttcagttggaaagaactctgccaaagaaaacagacaggcagctgtttgcatagtgcataaaaattttttttgttaaatatggccacacctgtgtaaacacaaactttatttccaagaagtacacttgcagctgca

SEQ ID NO: 16579 - DNA, 558 bp, Homo sapiens
taacaaaataatctatttattgttatatattaatatattaaaaataatatattttacaactacatgttttggaaagcaatctatgcaaagactaaaattagattagaatactaaactgttacaaggaaaygctcaattttatgaatccctctgccagccattattcccttcaaattatgagagttagataaagcccctgatagttgctaccctgcaaacttaatgtttctctagcagcttgcacacatattagacggtaaatatttcactaaggacgtagttttcttagcaggctccaatcaagtggcttctgctttactagtttatctgtcagacacattatgagaaacctcttccttgtacaggaatttttctgtgttgtttatataagtatcacagagcgatgtgcttgatataagttgtttcagttggaaagaactctgccaaagaaaacagacaggcagctgtttgcatagtgcataaaaattttttttgttaaatatggccacacctgtgtaaacacaaactttatttccaagaagtacacttgcagctgca

SEQ ID NO: 16580 - DNA, 558 bp, Homo sapiens
taacaaaataatctatttattgttatatattaatatattaaaaataatatattttacaactacatgttttggaaagcaatctatgcaaagactaaaattagattagaatactaaactgttacaaggaaatgctcaattttatgaatccctctgccagccattattcccttcaaattatgagagttagataaagcccctgatagttgctaccctgcaaacttaatgtttctctagcagcttgcacacatattagacggtaaatatttcactaaggacgtagttttcttagcaggctccaatcaagtggcttctgctttactagtttatctrtcagacacattatgagaaacctcttccttgtacaggaatttttctgtgttgtttatataagtatcacagagcgatgtgcttgatataagttgtttcagttggaaagaactctgccaaagaaaacagacaggcagctgtttgcatagtgcataaaaattttttttgttaaatatggccacacctgtgtaaacacaaactttatttccaagaagtacacttgcagctgca

SEQ ID NO: 16581 - DNA, 558 bp, Homo sapiens
taacaaaataatctatttattgttatatattaatatattaaaaataatatattttacaactacatgttttggaaagcaatctatgcaaagactaaaattagattagaatactaaactgttacaaggaaatgctcaattttatgaatccctctgccagccattattcccttcaaattatgagagttagataaagcccctgatagttgctaccctgcaaacttaatgtttctctagcagcttgcacacatattagacggtaaatatttcactaaggacgtagttttcttagcaggctccaatcaagtggcttctgctttactagtttatctgtcagacacattatgagaaacctcttccttgtacaggaatttttctgtgttgtttatataagtatcacagagcgatgtgcttgatataagttgtttcagttggaaagaactctgccaaagaaaacagacaggcagctgtttgcatagtgcataaaaawtttttttgttaaatatggccacacctgtgtaaacacaaactttatttccaagaagtacacttgcagctgca

SEQ ID NO: 16582 - DNA, 515 bp, Homo sapiens
caggtcctaatgtgagttggatagacactaggggctagttcacaggtagaaaaaacaaaacaaaaaaaatgactatacatattagaagttatgaatttcaatagtaacagaagttasatagatacactctagatgttaggaaacaggttgtaaagcaaagattgtagaataaacatatagtgaatctcaagaatatgcaaacattcaagaatcaggtaaaattaatagcaaatgtttatatgatgttcataattattccagccattgttccatatgttctacagatatttagtcatttaagccttacaataatcttatgaatttgataattctgatgtcccagttttacagataaggaaacaggtccccagagatcaaatatcctgccaaagatgccattgaaagccagtgaaacagctgtccgacaccagagcctatactctttacctgaccaaatgttggctacttactggcagttccacaggagagaaagtttatcatttcaagaagcaaaa

SEQ ID NO: 16583 - DNA, 467 bp, Homo sapiens
ggatgagaagaatggtgagaaaaatgcaaggtttattaggatttttatagatattgtggttgtgttcaygtttacatgatttgcactgtttttgtgcagttaaggctggaatgaaatgggaatgcttggaaggtcctgagtccaggtccagacaggccctcttcactccggcctgttatccgaatgatcttagccaccagagggagagggctgggagggcagacattggcaggattctctcaggaatgactttcctgtgatttgtccagcaattcctccctgcagccaaaccagaaataccactgaacctgaggtatttggcatgggtgatgcattctgaatccttgaagggcaaatagctgtaaaataaaaatggttcccttaaaagttcactgacttagtccttggagcatgtgtacagaggacgggtccaataaggctctcactttttccaaaggagcgtcccc

SEQ ID NO: 16584 - DNA, 467 bp, Homo sapiens
ggatgagaagaatggtgagaaaaatgcaaggtttattaggatttttatagatattgtggttgtgttcatgtttacatgatttgcactgtttttgtgcagttaaggctggaatgaaatgggaatgcttggaaggtcctgagtccaggtccagacaggccctcttcactccrgcctgttatccgaatgatcttagccaccagagggagagggctgggagggcagacattggcaggattctctcaggaatgactttcctgtgatttgtccagcaattcctccctgcagccaaaccagaaataccactgaacctgaggtatttggcatgggtgatgcattctgaatccttgaagggcaaatagctgtaaaataaaaatggttcccttaaaagttcactgacttagtccttggagcatgtgtacagaggacgggtccaataaggctctcactttttccaaaggagcgtcccc

SEQ ID NO: 16585 - DNA, 693 bp, Homo sapiens
agaatgagggaaataagttgtaattaccacaaaggatagttttaaggattcagtgatatttgtaaaatatttatatagtgttggtgcattataattgttaaataaaaattaaatcaaatgttgtgtagatttggaagcaggattaatttatcccgtacctattttattcagcacccttgcccagtgctaggtgtcagaggtgcagaaatggagttccaattgtggcatatatacagttactagggagcagaggtgaaggcaggctgaggtttaagcaactaccttattattccccagctgtgaagccctggcaaatgtccrttccccatcatgagtctgtttccccatctttgtgttactggtggaggatgtccaggttcttgttgttttgaacaaagaattggacaaaatgcacaaacgaaagaatgaagcaccaaagcagatttattcaaaggaaagtacactccacagagtgtactctacagagtgggagcgggcttcagcaagtggctcaagagtgctggttacagaactttctggggttttaataccctctagaggattctcattggctacttgatttacaccctgtgtaaatgaagtggtggcccgtgaccagtctgattggtcatggaaggtgaagttacatccaacgcaaatgaaattacaaagttacatcctatgcaaatgtct

SEQ ID NO: 16586 - DNA, 554 bp, Homo sapiens
ttatttcctagaacatcactagcaggatttgaataaagtatacatacatataaacctaatactgyttattttatttccaagaatgacttgccattagcatcagtcagggccaagaacacacacttagaacaggacaatggctacaagcaagattgactgatcagctcttgacctatgtgctctcctatgtgctatatgctcttccacctgccagcctttcctgctcttgcttttcatttgacattgatggattcaaaccagtgatgtctttatgttgatcattaagccttgattcctgcaggataattacaatactttttcccaatttcttgactgatttttctttcgagatttggagaaacataaaaaattctcaagaaatactgggaaggaattccagcgtggaaacactagtcagggtgtatgtatgaagcaaagggaggaggttctattactaaaagacaggagaaaatgggcactcagagtcatctctgctcaggactagctaacaatttataggctcaatgtgaaatgtaaatgtggaggactcttgt

SEQ ID NO: 16587 - DNA, 977 bp, Homo sapiens
  misc_feature (1)...(977): n = A,T,C or G
taaaaagttaatcatgaattattttgtaacagaaatgttaatcatcacttaaatgcttatcaagaggaaagagttaaataaaatgtgatatagataagaagaggacattacatatgaggaaaaaggagatattctaccattataggtagtccttgtaatcatttgttgtatgtaaaacaaggtaaataacggtacaatttgaggtaatttatatacaaataaaacataaagataacatacgttttgtatagttatgtaactgattagaaaatgtattgccttttggaggagaacaaaaggagctgggactaagggaagttatcagacaacttatgtattgtgtgtaatattctagtatttttgaaggatagctatatgatatttgtgttattaaatatgtttaacatttaatattaaatttaaggtcataaattgganntggagaaaatatgtaaacaaggagaaggtgaattannnnnnnnnnnnnnnnnnnnnnnnnnnnnnnnnnnnnnnnnnnnnnnnnnnnnnnnnnnnnnnnnnnnnnnnnnnnnnnnnnnnnnnnnnnnnnnnnnnnaccattagaggtgaaatatatatgtgttatactgcttacaatatatgtcaaagtctctattgtaaactactgttataaaatgaaaaactctagttagaattaatagctgatactgtatataacacatcaaatacaacagcagaaacagattttgttgtaaccttatctaggtaactgaattatcttaacaataagatattgtaagcaaaacaaattgatgtccattgtcttagaaattttctcaggaataattaaaaaargaatttccacaatttttccaagttagaatgcagaaataattatttcttctttcttcttttccttctcttcttcactgtctctctcccttctattttccttaagtttttcagtgcatttttgtctctgattttttttaattaca

SEQ ID NO: 16588 - DNA, 646 bp, Homo sapiens
ggactgccatgtaagcagataagtgaaattcagctacaattttgaaacaaatttctagggaccaattgtatgctagtatgagaatatggaagccctgaaaacagcagtttgcatctactggtaagctcttttccataaacctttatagggagcttataagaaagactgagggtaggataaaaaataagagaaagttttcatttttttattattatactttaagttttagggttcatgtgcacaacgtgcaggtttgttacatatgtatacatgtgtcatgttggtgtgctgyacccattaactcatcatttagcattaggtatatctcctaatgctatccccgcccccgccccaccccacaacagtccccagtgcaaatgaagtatgtatgggcctgtaggaggagtgcagcagctgctccagaaaaggcataaagccctatctggatgattttgctctatggaattaaataattaaggggttgtggaagggcagcaagctttaccatacacagagcaaaaatacacaccaaaggagagaaaaggaaggcaaccttctaacactcaaggaggagcatgaaaccattctgggtcagaccagtagggatcttccattgctggagaagggacaggatcactgagaaagc

SEQ ID NO: 16589 - DNA, 646 bp, Homo sapiens
ggactgccatgtaagcagataagtgaaattcagctacaattttgaaacaaatttctagggaccaattgtatgctagtatgagaatatggaagccctgaaaacagcagtttgcatctactggtaagctcttttccataaacctttatagggagcttataagaaagactgagggtaggataaaaaataagagaaagttttcatttttttattattatactttaagttttagggttcatgtgcacaacgtgcaggtttgttacatatgtatacatgtgtcatgttggtgtgctgcacccattaactcrtcatttagcattaggtatatctcctaatgctatccccgcccccgccccaccccacaacagtccccagtgcaaatgaagtatgtatgggcctgtaggaggagtgcagcagctgctccagaaaaggcataaagccctatctggatgattttgctctatggaattaaataattaaggggttgtggaagggcagcaagctttaccatacacagagcaaaaatacacaccaaaggagagaaaaggaaggcaaccttctaacactcaaggaggagcatgaaaccattctgggtcagaccagtagggatcttccattgctggagaagggacaggatcactgagaaagc

SEQ ID NO: 16590 - DNA, 528 bp, Homo sapiens
tggcctccagggcaaagctacctaggttctgagtccaattatggccttcatgagtcttgtttctttggacaggttttccagtgtctctgagcctcaacttcctcatgtataaagtggagatgatgccattacaggttgctgctttatggcacataattaatactagctcttatttataggaactgaacaaagccccagttgttttgaagcatgtcctatcattaacacaggtaatcaggatatattcattgaagtctcactgtgtgccaggcactatgctatgcaccttaygtgtgttattttatttcatccttccagctctgggaggtgatgactgtcatctgcattttgcacatgacaaatctgagggtcagagaacttgcccagggtcacacaattagtagatggcagctcaaggggtttttgcctgcgtcttcacccaaagccactaacacgggatctgtcaattgcattgctggtgatcaagaaatgccagctcctccgctcttccctgagtgccttgttgga

SEQ ID NO: 16591 - DNA, 586 bp, Homo sapiens
ttagccactattttttaaatgactttttatttttattttaattccttgagctttgtcacctaatttgaatatttttaattttgatttgtttttttcatatcttatatcattttctcaacatattttagacttttttttwaaaaaaaacagaatgtcccaattttttatctttgttttttgagtatctatctctggaatgttttcatcctgtataaggatatcttctaccatttattctctttctttgttataataattttgtatgggatttgacctggatacttttctttcgctcatatctatgtaaaattactctccttgaacttttagaagaaagcttggttcagagaagatttcttttacttaatagaactctcttttcagttgttttcacgtagtattaaaaatacggtggcctgtttttgagattctttgtatctgttcctctctcctatttttatccagatcttgtttttctgttgtatctattgtccctgtactgctaaattttgattcaactcccaacagtttctcgttggtgcagagtcctgtcctggagggaccctgggaagtcagagtggagagt

SEQ ID NO: 16592 - DNA, 2275 bp, Homo sapiens
caaaaatttatgttcacctttcatattttgaagctgctacttaaagcagttacccaaccagggttagcacttcctagcccctcttccatcagtcatgacgttgtgggtgaaatcttgtcaacagatgtacatgtaaatgacactggctagtcccatacaaatttcccctacaattctttgtgttctctcactctatgtttgctgtgtggatgttaacacccaagatgatatggggagccattgcaataaaaatggcaaaacctcctttagactgggttcttgagtaactgagcagagctttcatcccaggcagccactgtttccaggtgagtgagcaacaaactattttgttaaactgctgacatagatttgcctgttacagaatctagtgtttgcctcacacggttaagcactgatatgaagtcactgatcttctatctataactgtacatatacgataaatcaataatgtagatcttacatttttgtcataaaatgtcagtcattttcaatgttttaaaaggttgactagctcacaattttaataaaaataaataaaagagaaaattttaaagcaaaataaatactgtaaaaatatagcagagtttccaaaataaactctgtataggtagatgagggcttcagtaggatgcgctatagtcaattaacttagagaatttgagttaaaaaataatacagtctccttatggcataaatacataaacgttcagatgcttttataagccaatgcactcttgtacatcttcaaggagtgaatgcagtgagcatggggaaagaattgtttaagcttttcctcagctttgaacaaaacatctttattttccacggcatttcttgaaacaatcatttaatggggcacactttggaaatgatcacacagcacagctatagtctggagattaatattacacatgggtgaccatccttctcactctcacattttcccactgtctttataaggagccagaccacaagaccataggtagcaccattaatgcttcaacaagtactctttaaaaaaaaaaaaaaaaaaaaaagctgtgaaggatattactggggcaactgacaaaatctgaaaatggactgtggatcagataatagaattacagcaattttaagtgtcctgagattttattattgtactatgcttatgtaagagaacattactgttcttaggaaatacacattgaagtatttaaaagcaaattaccttcagatcgttttttaaaaagcacatatggggaagcagacggaaaaaatcggaaggagagggaaagagagaggttgacagagagaaggaaagggaaggagtggggagaataagcaaatgaagtgaaatgtaaataactggtgaatcttggaaaaggatcttcaaaagtttcttttactactcttgcaattttttggtaaatctgaaattttacacacacacgcaaaacaaaaaagactgtgaagagtgatgttctatagtaagtaggtttgatattcattttgcttgtgtttcatttcgaacatgtcacaaatgtttatttaaaattgctattctcagagctgaatgacactagcgagactgcgagctttgactcaggctgcctcacaccacggctggagtgttggtatgcygtcagcatgtcaggggcaaaaagacagtgttgctttgggagaatggcgtgaacctgggaggcggagcttgcagtgagccaagatcgcaccactgcactccagcctgggcaacagagcaagactccgtctcaaaaaaaaaaaaaaaaagacagggttgctttgtattgtttattcatgcaggaagcttctgctccaagaaacaattgagactttttctttcaaatttgctttgttttttagcaaaaatcaatcaattttttttcttccatcaacgaataggttgagtgctgaaaaataaaatgcccaatttgctaggtttctgttgctcttggagaagagcaactgaaaactcaatagctgatgaccaagaaaactattaatgttttgctcccatgtgaagctgactggcagtaatgactccacagattacttttgcgttatgctatagttggtcacgtgttactttctccacagcttggaagatctaaaaaccctagttattgtgatcaagccaggcatgagtgagcttgtttcacaggtattttctgtggcacaggttttgggtaagaaaagtccttaaatcaaaaatatattttaggctagagagtgaaatgagcaattttaacactaa

SEQ ID NO: 16593 - DNA, 408 bp, Homo sapiens
  misc_feature (1)...(408): n = A,T,C or G
tgttttagtgatagtatagttattgagctttccttagtttacacattcacaagtgtttttgaagcactgaagtccctgtgctgaatcagattgtgtggtcagcagtgtgatctgaggaccctatagtgtgtagggtagggtgtgacaaggtaaagagggtggactctgtagccagtttgtctgtgactatcttctgtgtgactctgagaatgtcccctggyctctctaaatctaaattttaacatccattaaagtaggtatgaggattaacaatatatttaaaattttaatacaaatattaacatagcacaaagtgcaaatacaatacatgtggccaaggttataatcatcgtctgcattatcacatntaatggatgaatcactggacttaagcataaattctgagtt

SEQ ID NO: 16594 - DNA, 552 bp, Homo sapiens
gcagatagttttcccttggagtcgggccccttggtggcctgtgctctcctctgactgccccagccaaactttgggtcattctgctggtcggtggcctgccagcatgctggtgcctgtcagtgcattcctctcgacatccagccacccatgtgctcctcccracatccagccacctgtgtgtctgcctgcttgcttgggtctcgggtttttataggcacaggatgggggcgtggcggggaaattcaacatttgggcagaaaaacaaaaatgcctatcctcacctaggtctgtgggcacaggcccagggttggagccctagccagggatcatgccctcctctacccagcacttccctgccccgcttccatatcatttaaagggaccacgcccttctcttctcagcatttcgcttctctatcagtagggaaaccaagagacagggacaggacggacatgcttgaataaatgaaatgtaattaagcagttcctttactatgtggtgatctaagacctcaaatgttaggggtatttattttcacaagaatcctatag

SEQ ID NO: 16595 - DNA, 536 bp, Homo sapiens
gcaagcacagttttcaagcacgtattcattctctcattcactcattcaaagaaaatcttagcaaatgacttgcatgaggcattgtgacttacaaggctagcaggtggtttcacttgtgtttagaagtagtgatgcctgagtggcagatatttagaacgtggcttggaggttaagactgatgtaggttagacaccatttcagcaacttcctagccatgtgatattaaatatgtctgtaaactctgaagtttggtttgctcatctgtaaaatggggatagtggtactaatctctcaagatttttttgtgtgaagcaagagaattgatatcaagtgtgtagtgcagagcccagagatgtatataggcaggctgtggtttgcattttaatttgaattataggcaaagccaaggcaygggatgtgatgatacatctttttctctcgtaagtcgagtagaagatgtatgcttttccaggcattgtgtgcatggtggtagcatcagagtttgagacaccgtttcagtaacttaggaaacagaa

SEQ ID NO: 16596 - DNA, 555 bp, Homo sapiens
ttgagttttattattctcattcatgtcttcatatatgtatagaatgtgcatatcctattatatctcagtacaaattgtcaaaattgaatatattaattgcaaattctctatattcttacacaagccttccttttcactaaatttttgttagattgatccttgttaataatgtagtgctaatgcattggtaatcactgttgaattctattcgattttatgagtagatagcaccatatgcatttccctgtggatgaatgttattatgcaaagagtgattagacactgtgtgtgtccctaattttaaaaacaaatgaacagtttatactggttgaattaattagagctagataatttatgttattgttaatgttagtcatcatgtttttgaatgaaatcaatatcttacataaacctagactatgataatgagtgtatatatgaaaactcatggcaaaattcaacatttcatagattttctcrtatatatagtgttcagttttatatttaagtctaaaattcattttgaattaatttttgtataaagaaagtcataaa

SEQ ID NO: 16597 - DNA, 521 bp, Homo sapiens
tgaggcagcagactgctgcagtttacccagccagactctctctgactctcatggagagaagagtgtgacaaggggcaggtagaaagaatgattgtgacttggtcctctccccttcatgaagctggacaagcagcagttaccctcttgcccactagtaaagaaatagaactgattattctatagatggtatcttttttttttcctcagtatcacactaatcaactccctgtggctgtgatgatgagagatgctaaattgctgaaacggcaggctttcagaggagataaaattgagcacctgctcttaggtccataaataactgagggttattttccctggggactctgatgctggtcctaacattcccaccaaatgttaatgtagtcattacactgtgtctgattgaattatcattgtaatttcaggagaaaactttggtttggccagagcaaaaaatatactttaagaagcactagtttatacctgaattaggwtttgtggctgaacatctgtgaattcac

SEQ ID NO: 16598 - DNA, 538 bp, Homo sapiens
ggttgacctaggacagggagtgtgagccaggtggggtggggaggttggggggattaattatcaccacttctgaagctctgggctgtggttactggtgggtgrggctgtgtctgccagatgggtggggagggaggaggtggaccatggccagcgtcaggcagcttttccaacccgggctgcccattagaatcatgaggagctctttggaccagcctctgtcagggcctgatcctagaccacaaagtctgagtctttgaggggacagccctggtactgaaataatctgcacactcctcagggcatctaatgtgctgccagggttgggaaccactggcagagaagaaaggactaacacttgtggccagccgtcctctcccctcccgactacatcaacacatctagggcagcaacaacctctgattctaggagctccaaagtggggctcaaaatccctgccacaagtgtctgttttgtttcctgaactataaaagccatttctgctggtgtcttatctgcctctgacatggtactagtgagg

SEQ ID NO: 16599 - DNA, 515 bp, Homo sapiens
agagtgttctgaggtctcaygaatgcatgattcttgtcaaaatgaagcttttggggaaagtacatctccctaagatttcagctatgtccttttgttgttggtaaagtaaaaaacaattttttctagttttttagttttctatcttagcgtaatgactacctgcagctaactcggtgggttgtaatttttttttttttttttttaagagcagaagggtatggcctctactttattttattttcttcttttttttttttattatactttaagttttagggtacatgtgcacaatgtgcaggttagttacatatatatatacatgtgccatgttggtgtgctgcacccattaactcgtcatttaacattaggtatatctcctaatactatccctccccactccccccaccccacaacaggccccggtgtgtgatgtaaaacctctctttgactatttgggtccaggtaaatggcttggctgcctttctgcacagagtgacccaactgattggggacgc

SEQ ID NO: 16600 - DNA, 678 bp, Homo sapiens
tcgggaaatctcggtctttgcttttaaggcctttgactgggtaagacccacccaaattatggagtgtcattggctttattcaaagtcttctgatgtaattgttaatcatatcttaaaagaaataaaagacttcgtagcaacatccagactagtgtctggccaaatgactggggccatatccagacaggtggacacataaaattagccatcacaagggggcagcctttctccctggacctctgctgcttggatggggtttctgatgtcacattccctgctggcgagtcccttagcatgtccttaccttactttcctcatttctgaaatgggatcgtaatcgctccttccccaaggagctgctgtaaaggctgggcgtggtgaggctccgacagtacctgcccctggccagctgctgtggggtgctcgtgagagatgcgcttattcaggcacgtgatttagtgtcttctctctggtttccccccacccgctatttcatggggtgacccggtttttatgttccttgtttcttcgggtgaggtgagtgtgagttatattacatggtcaaaagcggaagccatttgtaagaaacttccctccctgtatttgagaaaactagaaaccaagggyggaagtttgctggatgttcagaggtaggttccaggtgtggaggggacttgg

SEQ ID NO: 16601 - DNA, 488 bp, Homo sapiens
gttgtcaaatatcacaaaatgataggatgtaaatccagtccttggccacattgaagataatctgagatttcattagacaacaggtcatttccaataaagtgacagctatagtttctgcaattagtgcacsttaaagcaagtgttcttagtatgttagttcctagttgtctccttcttaatcattttcccttatctcagataccattagcaatacagatcatttgagtcttaactcttgccattggcttagactatctacttgcagcttacactggtagtttacctcaccctttcatacagttatgaaattgagtttcttaacctcaaatccagatgcctgttacatcatatacttggtacttgtgaggacttctggattttttctaaaccacataagaggagagggatagtgtgaggagtgctatgtttgatcgcttgtcctaaatatgctacatcacttcctagacgtggtatacagccagttctag

SEQ ID NO: 16602 - DNA, 488 bp, Homo sapiens
gttgtcaaatatcacaaaatgataggatgtaaatccagtccttggccacattgaagataatctgagatttcattagacaacaggtcatttccaataaagtgacagctatagtttctgcaattagtgcaccttaaagcaagtgttcttagtatgttagttcctagttgtctccttcttaatcattttcccttatctcagataccattagcaatacagatcatttgagtcttaactcttgccattggcttagactatctacttgcagcttacactggtagtttacctcaccctttcatacagttatgaaattgagtttcttaacctcaaatccagatgcctgttacatcatatacttggtacttgtgaggacttctggattttttctaaaccacataagaggagagggatagtgygaggagtgctatgtttgatcgcttgtcctaaatatgctacatcacttcctagacgtggtatacagccagttctag

SEQ ID NO: 16603 - DNA, 474 bp, Homo sapiens
ttaaataaatgcctgtagtaaattggctctatccaattgataaaaactttaaattccctmctctatatcatatcatatttttagaaattccaaatggattaaatatataaatataaataataataattatctggcaaaatcaagggtaagatttgcaaaaccctgtagtaaggagaactttttttttagcaaaacagaaagctcaagaaatatggtgaagattgatatatttgaccatatggagtttaatttttccccaaggaagaaagaatatgctaaaatcaaaggaaaaacatgaaaaatgcacataaataaacacataaatcagtcaggtatttaatttttctatagaaaaaacattgtttgaaaatttactaaacacacacacatatacatactctagtagaaagttacacaaatatatgaacctatttaaataaatatttgaaaagataatctcattacttgtaagga

SEQ ID NO: 16604 - DNA, 540 bp, Homo sapiens
cctcaaaggtgcagtctctgaggtgggagagggctgcaggcctgtcctgtcgtttgtcgagtggatgaagagatgcccccggaagtgatctgtaagttacaattgaaaggtaagcagagacaaatgtgcattatccctccagatcctttctaggatggaaacacaggctcttactttctctttccttgtgtgcaacattgagtcatttgtttgttcatctttcattcattcattcaataagcaggtatcacatatcaccgttgagttccgccttggaagctgcaagcccgtgggtttgggaccctgccctacaggtgggcaccttcccaagacctcaaaggagctcctgtcagtgctgacaaagagggggtctgatcaaccaattcctgatgaggtsttaattagtggtaagtacttaatgctccagggtgttaaaaatgaaatttagggagcatgagggtgcttcctagtacaacccaaaaggctttctaggactcactctgtctacatttaagcctgggtttttaaaatacatgaaca

SEQ ID NO: 16605 - DNA, 540 bp, Homo sapiens
cctcaaaggtgcagtctctgaggtgggagagggctgcaggcctgtcctgtcgtttgtcgagtggatgaagagatgcccccggaagtgatctgtaagttacaattgaaaggtaagcagagacaaatgtgcattatccctccagatcctttctaggatggaaacacaggctcttactttctctttccttgtgtgcaacattgagtcatttgtttgttcatctttcattcattcattcaataagcaggtatcacatatcaccgttgagttccgccttggaagctgcaagcccgtgggtttgggaccctgccctacaggtgggcaccttcccaagacctcaaaggagctcctgtcagtgctgacaaagagggggtctgatcaaccaattcctgatgaggtgttaattagtggtaagtacttaatgctccagggtgttaaaaatgaaatttagggagcatgagggtkcttcctagtacaacccaaaaggctttctaggactcactctgtctacatttaagcctgggtttttaaaatacatgaaca

SEQ ID NO: 16606 - DNA, 549 bp, Homo sapiens
gcctcagagcaccctggtttttattaatctggtcgcattcggagtcgtttagtcagccgccacttcctgcttagacgcaccatccacaggtgtgtcattagcgtggaggaattcgagcaggactgggttcaacttcgcgtttcccatattactgaggatgactcatttctcattaaaaggtaagcaagactgsatgacccaaattaaaacaaaaatcaaccgcaaattaactgagttcaagagagaaggtggcctgctaagcttcacattgtggagagtgtgccggttttcagagttgtccatggcacagtctgaaagacggcatctcatctcatccaaagggaaaccaggcccgctcctccccttctctgaccagacatttccaaggattgccttccggagagaatggtgcttctttcgttcgtcctgtgtgggacaaatggctctctggaatggctgttccccgtgatctgtgatgctggtgttctcttaccgcattctacccacttggcatttttgtacactgagaacagggatttgaaagactag

SEQ ID NO: 16607 - DNA, 549 bp, Homo sapiens
gcctcagagcaccctggtttttattaatctggtcgcattcggagtcgtttagtcagccgccacttcctgcttagacgcaccatccacaggtgtgtcattagcgtggaggaattcgagcaggactgggttcaacttcgcgtttcccatattactgaggatgactcatttctcattaaaaggtaagcaagactgcatgacccaaattaaaacaaaaatcaaccgcaaattaactgagttcaagagagaakgtggcctgctaagcttcacattgtggagagtgtgccggttttcagagttgtccatggcacagtctgaaagacggcatctcatctcatccaaagggaaaccaggcccgctcctccccttctctgaccagacatttccaaggattgccttccggagagaatggtgcttctttcgttcgtcctgtgtgggacaaatggctctctggaatggctgttccccgtgatctgtgatgctggtgttctcttaccgcattctacccacttggcatttttgtacactgagaacagggatttgaaagactag

SEQ ID NO: 16608 - DNA, 558 bp, Homo sapiens
  misc_feature (1)...(558): n = A,T,C or G
tttttccccatgggagaaataaatactattgtactcactatgtgtatttctacaatccctttttgggatgaggcagggtatgtatgaataagtagaatgtatctttattatttatttatttattttgagatggagtctcactctgtggcccaggctggagtgcaatggcgcgatcttggctcactgtaacctccgcctctcaggttcaagcgattctcctgcttcagcctcccaagtagctggaattataggcacccaccamcacgcccagctaatttttgtgttttcagtagagacggggttccacaacgttggccaggctggtctcaaactcctgacctcaggcgatctgcctgtctcagcctcccaaagtgatgggattacaggcgtgaggcaccacgcccggccggaatgaatctttaatctaccacttatagttttaatctccctcctnccgctccctccctccctcacttccttccctttctttccctccctccctctttcactctctttctctccctccctccctctctctccttccttcctctttctctt

SEQ ID NO: 16609 - DNA, 557 bp, Homo sapiens
ttggacataggtgtccttcaggcacctcaaactcaacacctaactcatcatttctaagctcattgatttcattatcaactaagctcatcatctctgstcttcaatccggaccccgctccctgtctgttttatgttccctgtcatataaatcactctgttggccatgtcaaaaatttagaaatcatcatccctgccttctccccatctctctctcaccttcctctccaaccacatccaatcagtcaccaagttctgttcattttatctactagatatctattttgtgagtctgattatctttctccatcttttttgccttttcttcattccaagccaagacagtcttttgcctagatcatcagaataacttgttcactggtcagactcacagaagaacttccctaccaatctgttgtctatgctgtggccagtgtgatcttccaaacacatatcagttcatggcaattctccattgcctttagaatgaacagttgaattccccattgcctgtagaatgaacacactcctgaacccaactcataggaactccataagcc

SEQ ID NO: 16610 - DNA, 345 bp, Homo sapiens
cgaactttttaaagctacttttcggtgattggccctccagatctgcacgtgaatgtttccacaggattaaaaacaaaggcaggtgcagtgctagaaatatgtcttaggagaacttggacagagcattctgaaaacagtatgccttaccagcctgagagcaatagtrtgtatatcttgatttgttcctacataggtgtgttcatgtgttcacattgtaattattcatctaactgaacatttgagatttgtgcattttccagcatgtccataatggctcaaaaacaaaaccagaaagtgaaggaacaggcagttgtgtgagatgttttggtaaaacaggaagaaaaa

SEQ ID NO: 16611 - DNA, 531 bp, Homo sapiens
tgttctcctaggacaccaggtttttagacaggccactgtgagacctctgaatgcccgatgcycaatagtgctgagtgggtaagtgacaagaagcctgcacccccccagccctgtgcacctcctgagaccgaggagcctgtgtcaccattacctagggctagaagaaagggcttccaaatggctcaggaagatgagtgggcatttcacgccacctctgggaccagatgaccacacctcccctgaggaatcccttagccaaaataattgaacataataatgttgcttaaatataaactggctcatctgatcaccccgacactgacccgaggacacccccctcaaggtggctccagtttcccatcatctagacttttattcctgccctcccacactccctgagcctggctggaggtctgcttgtcccctctacttcccactccaaagctaataagaaaccaagagcatgggcttgccatagatcgaggaaagaggcttggtgacacttcctttgacttggaaaattcctctact

SEQ ID NO: 16612 - DNA, 531 bp, Homo sapiens
tgttctcctaggacaccaggtttttagacaggccactgtgagacctctgaatgcccgatgcccaatmgtgctgagtgggtaagtgacaagaagcctgcacccccccagccctgtgcacctcctgagaccgaggagcctgtgtcaccattacctagggctagaagaaagggcttccaaatggctcaggaagatgagtgggcatttcacgccacctctgggaccagatgaccacacctcccctgaggaatcccttagccaaaataattgaacataataatgttgcttaaatataaactggctcatctgatcaccccgacactgacccgaggacacccccctcaaggtggctccagtttcccatcatctagacttttattcctgccctcccacactccctgagcctggctggaggtctgcttgtcccctctacttcccactccaaagctaataagaaaccaagagcatgggcttgccatagatcgaggaaagaggcttggtgacacttcctttgacttggaaaattcctctact

SEQ ID NO: 16613 - DNA, 551 bp, Homo sapiens
tttttttttgagacggagtctcgctctgtcgcccaggccggactgcggactgcagtggcgcaatctcggctcactgcaagctccgcttcccgggttcacgccattctcccrcctcagcctcccgagtagctgggactacaggcgcccgccactgcgcccggctaattttttgtatttttagtagagacggggtttcaccttgttagccaggatggtctcgatctcctgacctcatgatccacccgcctcggcctcccaaagtgctgggattacaggcgtgagccaccgcgcccagctgtagcttcttattagaaatagcacagcaagagtagttagttggccaaacatatattaaatttttttttttttttttttgaaacagggtcttgctttgtcacctaggctggagtgcagtggtgtgatcatagctcacatcagctttgacctcctgggctcaagtgatccttttgcctcagcctccagagtaggtgggaccacaggcacgtgccacgataccctgcctttttttttttggtagagacgaagtctcc

SEQ ID NO: 16614 - DNA, 551 bp, Homo sapiens
tttttttttgagacggagtctcgctctgtcgcccaggccggactgcggactgcagtggcgcaatctcggctcactgcaagctccgcttcccgggttcacgccattctcccacctcagcctcccgagtagctgggactacaggcgcccgccactgcgcccggctaattttttgtatttttagtagagacggggtttcaccttgttagccaggatggtctcgatctcctgacctcatgatccacccgcctcggcctcccaaagtgctgggattacaggcgtgagccaccgcgcccrgctgtagcttcttattagaaatagcacagcaagagtagttagttggccaaacatatattaaatttttttttttttttttttgaaacagggtcttgctttgtcacctaggctggagtgcagtggtgtgatcatagctcacatcagctttgacctcctgggctcaagtgatccttttgcctcagcctccagagtaggtgggaccacaggcacgtgccacgataccctgcctttttttttttggtagagacgaagtctcc

SEQ ID NO: 16615 - DNA, 551 bp, Homo sapiens
tttttttttgagacggagtctcgctctgtcgcccaggccggactgcggactgcagtggcgcaatctcggctcactgcaagctccgcttcccgggttcacgccattctcccacctcagcctcccgagtagctgggactacaggcgcccgccactgcgcccggctaattttttgtatttttagtagagacggggtttcaccttgttagccaggatggtctcgatctcctgacctcatgatccacccgcctcggcctcccaaagtgctgggattacaggcgtgagccaccgcgcccagctgtagcttcttattagaaatagcacagcaagagtagttagttggccaaacatatattaratttttttttttttttttttgaaacagggtcttgctttgtcacctaggctggagtgcagtggtgtgatcatagctcacatcagctttgacctcctgggctcaagtgatccttttgcctcagcctccagagtaggtgggaccacaggcacgtgccacgataccctgcctttttttttttggtagagacgaagtctcc

SEQ ID NO: 16616 - DNA, 534 bp, Homo sapiens
tatgagtggttgaagtatggctgctgagattggccaagactcaactattattacaggagcatactcctaagttaggtttccaatcttgtctacctattaagttaggatatggtttgtccacaaggtctcaaatatagaagtatggagtccttctcaggtcatatttagttctctttaacaagaccagtatcactaatccccaaggctactctaccaagtagatatgattacacctttttatcaaatatgataactgtccaagtttactwagccagtaagtggatgggccaggattttacctcgacctgtcatctctatgtcactagtctagtgtatgtgtctggctccccaactatattgtgcatttgaggacaacaatcataccctattagtttcgttttccctaccctggcaccaaaaaaaaatcacctatattatagttaaaactgcttgtggaacttcactgaagtaatttcaattaggctccttaacaggaagcataacatcacattatgaactgaacttcatccccac

SEQ ID NO: 16617 - DNA, 997 bp, Homo sapiens
gtttacacatatgtattctatatttgcatatgtattctatatttaccttcagcaagaaagtaatctccaccaccgctgaactcaacagacattgtttatgctcccctcaaggcattcatcatttccagcttgtattctagcaatttaggcatgtttttttatctctgctaaggtttttacaggtaggaagtgtgtttaattcatctttatatctcccacagtgcctagacagctttgcatactgtgagaacttgttaaatgttgttaaatgaatgacagaagaaagtaaatttggcttatttgactcttgagtctacaaattttttaaatccaaatgcagtaaatttagtctttataaaagttttccctcattatatctttcactgatataaatgtatatttatgagaatttaataaaaagcagtgtcagaggtatatttcaaccacgtagtagacagcaaagaggctatttattggtggaactaggcaatatattggtgaaaccaggcaatatgcacaatagtttttttttctcaacaacacagacagcagtaaagtgattaaacagcattgttgctgatagagtgttgagcaacaagttcaattgagatcaatgtttgaatatacgtttcttaaaagaatctatatttgaagagtggacattgctaccatcttctcttactgtgattctttattttacccatggataaatcacatgtaatagcaactcttgacctgtggcttccaatgcagcaagacacgattaacagatggcttgactcattgattcactttttcattcaacagatgtttactaagtgtaaagaggatgcattgtatgctgtgaactaataataatatatacaatttcaacagaattttgtgtttctcagatttctttttacatgcattgcctagctgattatcaaaacaagtatgtgataccargatcaaaatatttctatttgcataatagaaatttgcagtaatgactccc

SEQ ID NO: 16618 - DNA, 558 bp, Homo sapiens
acccaaatctaatcttgaattcccaagtgttgtgggagggacacagtgggaggtaattgaatcatgggggcaagtcgttcccatgttgttcttgtgatagtgaataagtctcacgagatctgatggttttaaaaacaggagttctgctgcacaagttctctgtctttgcctgctgtcattcatgtaagacatgacttgctcctccttgccttccaccatgattgtgaggcttccccagatatgtggaactgtaagtccaattaaatctcttyctttgtaaattgcctagtcttgggtatgtctttatcaaacatgcgaaaacggactaatacaatgtccttagaggatatcacagaaaaaaactagagccctcccttccggattccaacaccctagaattaaatgagataaaagaatgacagatgcaaaagaacaagtgtaatgtatgttacaacatgaaataattatgaccaaagggcaaatattctagattattctttttgaaagttaaactaggtgaactttaaaaatgcctgtgatttctggtttaaactgcta

SEQ ID NO: 16619 - DNA, 530 bp, Homo sapiens
atctctgaattttgtcttgtttccactaagtattgcttgccccttcttcttcatactcaaaaatatggatgtaatatacctgcctctaaggcccctttgaaagttcatcttcacccccaagttaaacagaaaaccctcatgcatgtgtgcagtctgatttcatcttatgtggcgctcctcctactgacaaaatatgttctcactctgagaagtttccctgtgccgctttagtaataaacaaatccacctgtgtttgcatcctaggcgttctcagtgtaccacacttgagctctgcctccccggttaggcatctgctctggaagcaygaggaatattgctttcagtcctcttatattcctgatacccttgactttgcaaggcctagcaatacgcggcacttactataaattaaataaataaaaatccatttaagtcaatcaaaccaacagctctctgtttctcctgtgaaatggagaggcagatgagtagcccagcattctgcatggttcccctgatgcactctccctgcc

SEQ ID NO: 16620 - DNA, 530 bp, Homo sapiens
atctctgaattttgtcttgtttccactaagtattgcttgccccttcttcttcatactcaaaaatatggatgtaatatacctgcctctaaggcccctttgaaagttcatcttcacccccaagttaaacagaaaaccctcatgcatgtgtgcagtctgatttcatcttatgtggcgctcctcctactgacaaaatatgttctcactctgagaagtttccctgtgccgctttagtaataaacaaatccacctgtgtttgcatcctaggcgttctcagtgtaccacacttgagctctgcctccccggttaggcatctgctctggaagcacgaggaatattgctttcagtcctcttatattcctgatacccttgacttygcaaggcctagcaatacgcggcacttactataaattaaataaataaaaatccatttaagtcaatcaaaccaacagctctctgtttctcctgtgaaatggagaggcagatgagtagcccagcattctgcatggttcccctgatgcactctccctgcc

SEQ ID NO: 16621 - DNA, 530 bp, Homo sapiens
atctctgaattttgtcttgtttccactaagtattgcttgccccttcttcttcatactcaaaaatatggatgtaatatacctgcctctaaggcccctttgaaagttcatcttcacccccaagttaaacagaaaaccctcatgcatgtgtgcagtctgatttcatcttatgtggcgctcctcctactgacaaaatatgttctcactctgagaagtttccctgtgccgctttagtaataaacaaatccacctgtgtttgcatcctaggcgttctcagtgtaccacacttgagctctgcctccccggttaggcatctgctctggaagcacgaggaatattgctttcagtcctcttatattcctgatacccttgactttgcaaggcctagcaatacgcggcacttactataaattaaataaataaaaatycatttaagtcaatcaaaccaacagctctctgtttctcctgtgaaatggagaggcagatgagtagcccagcattctgcatggttcccctgatgcactctccctgcc

SEQ ID NO: 16622 - DNA, 366 bp, Homo sapiens
tcagccataaaaaagaacaaaataatgtattttgcagcaacttgaatagaactgaaagcgattatcccatgtgaagcaactcaggaatgaaaaaccaaataccacatgttctcacttctagttgggagctaagctaagggtacgcagaggcatagagtggtatcatagacactggagactcaaaagcggggcggggatgaggaatgaaaaattacctattgggtacaatgtacacttttcaggtaacgggtacactgaaagcccaaatttcaccgctatacaattcattcacattaccaaaaactactcattcycctacagtgattgaaatttaaaaacaaaaggatgcctgtacctttggtgatt

SEQ ID NO: 16623 - DNA, 451 bp, Homo sapiens
ctgccaaaagaggaataggtctcagctccaaattagatacctggaggtacaactctgtgtttycttcatgcgatgagctggctcccacgctcctggggccttccactgcagcgcagacctcccctgggagagctgcatggacacatgttttcggagaatggagacttggtgctgatcttctgcgtgttgtagagacgatggtttgctgtcagttcctgcctgccatccagcaaaaaaggctctgatggctgagtagctgattgttctccaaaaggcccatgagaaaagctgcatgttcagaactccaaagattgatttctgacccagagtgaattttcatggagttatcagaaacgagcgccttgtgactttcagttccccagttagccagctgctgatgagggaactccctgctgaatgtctggcatcttccagctttagttcccagttg

SEQ ID NO: 16624 - DNA, 623 bp, Homo sapiens
aggttctagtcatttatagatagaccctgtgttacagagtgattagagttgacagctacccaagcctacctatttagagaaactgttctcccttgcctggttgggaaaataaaccttcgaataactgagtccattcttaatttcattttcccagcacataccttgttcatagcagacccaatctatacatgtaagtcatctagcctctaactcaagggaagaaagtrgggaagccaagggactaggcaggtctaattcatcacccagaaattacacagggccctgctactgtagtggtgagaagatagcagctgcattataactaagagtcccagccacggttgttgaacgagacccaaccaataaaagcttgaccttgagaaacaaagagagtcagaagacagatgaccaagcccagagagatgagtttcgttctctgtaaaatgaagaggctatgtaatttcttatatttctctcattctccactttacaaggtacattaaaacacacgttctcatttgatcctcatgaccttgatagggagagatggtcttgaaagccttgcccagatgacttggaaggatgctatccgactctatcatttcatcatatcacaagattca

SEQ ID NO: 16625 - DNA, 3084 bp, Homo sapiens
tgtctgtgtacctgagtgtaggtgaacatggaccttttttttacatgaatgggtcccctagcgaaggaggcaagacctttaaattttatcttttgaagttatgtaaatttttataacaaataaataatatatatccatgggccaaacaaaaactaaagtaatcacaaattatgagtttcaaaatcaaagcacaattgtatatacaaaacaaaatccaaaattaataagaatattctaaaatattttcatagttaagcaaaatgttattggttcatgttgagaaataaatgttggcttctagagtccaggaggctttctaaagttagaaatctttctttctaacgctacactttaacatatctagggatacttcatgagaaatctaatattcatacttaatttttctattaatattataattaatgtttgataatggtaactccaatatactgcaataactttagatattagaacaattcttatcacaaacatatttttataacagggttttcaatcaagggtcaaagaatcacaattcaaatagaaataatttaatgagcacattttatattttacatactttatttacatgaattaaacatgcaaagtgtcttagtttatttaggctgctataatgaaattgatggaatggcttataaacaacaattgatggaatggcttataaacacttgtcacagctctggaggctaggaagtctaagatcaaggcttccagcaggttcaatatccggtgaagtcccacttcctagttcatagaccagagattttctgattgtattttcacatgttggaaagggcctcttttataagggtattaatcttgttcacaagaactccaccctcatggtcaaaccacttctcaaaatcttcatccccaaatattataacattgagggttacgtttcaacataagaattttgagggaacataaacattcagtttaaagtacaaaagtaaccgtattcaatagtataaaggaaacctaaataatgattcttgtcaaactcatattgtccaactactgaacttcgaaacaaatgagaagtcgtgccttttcattaatgatcaagagaaagttgttagttctgtttcttgatccaaacttttgataacggagaatggattattacaacttaaagttgaagagtatatgtaacaaactttgactgtctcaatgtggcattcaaataggaaccaagagacagccaaaccttagtattcagcttttctccttatgggtccagagcattagaactaaatgcatggagacacacccaaatggaagacagaatctcactttattatttgctgaatgaggggcttataacttattgtatggggctctctggcaaaataaaaagaaaacaaataaaccaataagtagagaaaatttcccctgctttccttcttcttattctgagatggccagttctcagagcagcctcctttcgctttcagatgtaggcagaaagtaaaccacaaggaaagaatcaggctattttaaggtagagtgggcatttggttgtattaaaattgtgtaatattctggaactaaaaactctcctaatgcttcactgctgcacatccctctttccaacaattttcttgaagtaaatggagctcttttctaaaaaaataggaaattttggaaagtacaatttcactgttgttgttacacatttgaaaaatcccacaatagggctctttggtaaaaattagattggagagtgtggtctgtgcctagaaatcaaattgagacttccattttttttcccacccttttcccaaatccaaggtgggtagaagtccagagcaaatccaaagtccgtttagtcaaccagacattgcaaatgggaaaacctgctaggctttaagctgagctctgcctaagcaggtcctctgggctggagtggatttgagagccccatctgacacatgacaaagtaataacacttactgatagaatgtagctttgacaacttctgagttaacgtgggccagttatcagggtacttcttagccagattggtctatagttttagatttcacagaagggatctaaaattgaattctagcccactcagggtttattaagcttgggggaaaatggacagaatgtaattgagttcatcaatgatagtatgaaaaaagttgtcagtttatgatgatgaaatatatagcagcaaagcaattcaatactttgtctactgataaaagcatttgttccctaaaagagtatttgggaaaccaaatattccaaaatagtagaaaaattgctgagtgaagatacctataaacaaaatgtgtttttaaaaatctgctattaagaataacagattgacttaaaattctgacacttaacgaaaaaaatgctgccatttagccattttatcacataatatttatcgcttatgttgtttacatacttgaacttatattttctgcataacattgaagtatgcattttatcattcaacattgtgccaaaagcataattttcttttcaggggaagccttgaggatattatgtaaatagttgtgtagcattctttcgtatatacaagtaccataattgattaaaatatttactttgttgaccatttaagctgttaacattcttttttgctgctacaaacaactctctcctgagaatatttctatttatattttttcaatttcagatcatttcttagagtacatacgatgaataaaattatttggatcagagtctatgaacatttttaggactcaatatacagaatacacaatgttttaaagtttgtatcaatatttatttccttcagtctcttgtgaaactgctaaaattaagtattatcaggtttttaaacctakgctaattcatcaagcaaagaaaaagattgtagaagtatttttaataatatagttatttaattataaataaaataagcattttgacatatttgtttgtcatttgtggtttatctttagtgaactgcttattgtggtactttatctggtttatagaagtatcttttcatttcatcagtatgcaaaaaaattatagactatgtgtatcaatttt

SEQ ID NO: 16626 - DNA, 515 bp, Homo sapiens
aagccgccatttccccggcccagccaccacgtgacccttctgcgcaggcgtcgcctcacgtgattcttacaggtscgctcctctagccccgcctcccgtctgagaggttcttaaagggctcgcagcccagccaggcactttaaaagtaggtgggctttttaaaatttaaacgaattacacataacatataattagccactttaaagtaaataatgtgcttaagttattgttaggtaaaaaataataagaagaataaaagaaaaagtgaataattcagtgggtttatttatttatttatttttgagacaggatctctgtcgcccaggctggagtcgagtggtgcaatcacagctcactgcagcctcgacctcccaagctcaagcgatcctctcacttcagcctcccgagtagctgggactgcaggcgcgcgccaccatgcccggctaattttatgtacttttgtggagacggggtcttgccatgttgcccaggcctcccaaagtacaggaattaca

SEQ ID NO: 16627 - DNA, 515 bp, Homo sapiens
aagccgccatttccccggcccagccaccacgtgacccttctgcgcaggcgtcgcctcacgtgattcttacaggtgcgctcctctagccccgcctcccgtctgagaggttcttaaagggctcgcagcccagccaggcactttaaaagtaggtgggctttttaaaatttaaacgaattacacataacatataattarccactttaaagtaaataatgtgcttaagttattgttaggtaaaaaataataagaagaataaaagaaaaagtgaataattcagtgggtttatttatttatttatttttgagacaggatctctgtcgcccaggctggagtcgagtggtgcaatcacagctcactgcagcctcgacctcccaagctcaagcgatcctctcacttcagcctcccgagtagctgggactgcaggcgcgcgccaccatgcccggctaattttatgtacttttgtggagacggggtcttgccatgttgcccaggcctcccaaagtacaggaattaca

SEQ ID NO: 16628 - DNA, 515 bp, Homo sapiens
aagccgccatttccccggcccagccaccacgtgacccttctgcgcaggcgtcgcctcacgtgattcttacaggtgcgctcctctagccccgcctcccgtctgagaggttcttaaagggctcgcagcccagccaggcactttaaaagtaggtgggctttttaaaatttaaacgaattacacataacatataattagccactttaaagtaaataatgtgcttaagttattgttaggtaaaaaataataagaagaataaaagaaaaagtgaataattcagtgggtttatttatttatttatttttgagacaggatctctgtcgyccaggctggagtcgagtggtgcaatcacagctcactgcagcctcgacctcccaagctcaagcgatcctctcacttcagcctcccgagtagctgggactgcaggcgcgcgccaccatgcccggctaattttatgtacttttgtggagacggggtcttgccatgttgcccaggcctcccaaagtacaggaattaca

SEQ ID NO: 16629 - DNA, 568 bp, Homo sapiens
ctatgaatgaagtttttaatcctcataattttaggtgaaacaaatagagaagagagactcggttctaacttcgaaaaatcagattgaaagactgacccgtcctggttcctcttacttcaatttgaacccatttgaggtgagcygattgatgttgctagggcctctgtaatgggggagatttgcatagctgcaggcatacctacatcagaatacatacctaatttatatcatagttaggattgagaaaaatggtggagtaaagtgatggaatctgtatagtacaaaattgagtattccttatccaaaatgcttgggaccagaagttttttggattttggatttttttgggattttggaatatatacatacattctgcttacttactggttgaagcatcccaaattagaaaattcagaatgttaatgagcattttctttgagcatcagttgactctcagaaagtttcagattttggagcattttggattttgcatttttggattagggatatgtaacctgtatatagattgtctttaaacttgggtgattgtaccgagcagaactggaga

SEQ ID NO: 16630 - DNA, 550 bp, Homo sapiens
ggatgatgttgccatggtacccagtgaactctaacatactgtttctagtcaaatgtgtctctgtccaacagatatagtcaaatgtttgttatctgattatgtgtgcactagggtagaagtgaaaatgtytgacgatctctcaagccagagggaacatttaaaaaggaaggatccttgtagatgctagatgtaatgtaagtggaagatattgatgttttcaaacaattactcaggatgccagatgtcagttcctggtaaagacaaagttagctttgtaatgagaatttattgaacttccacagagcatgtagccatgtacaaactggattacaaaatcattgtattctttcctcctatcccaacaggaaaatatgtttccaaatcaccaaagccaagagtttagtagaagcaacacaatttttccctgcttcatctttgtagaggtaagaaagctctggacatttaccattagaatatgtattattcaaaagaaatagactgttcctttaatacttacttcatgtatcccttttgacatacattgatgatg

SEQ ID NO: 16631 - DNA, 511 bp, Homo sapiens
acctgctacacctgagaaaacttaccatttgcataaggtattataaaatatattcacagaaaagtgtacaacatagatattatgtcttgtcccacattatttacccaattcttaattagcaagagtaatcaaataaaaaaaccaggtaattaccaatataaatagccttaraatgatagtgatttggtaagcattaaagcaaaacccaaccagtctggggtacaaatatgccccatttctcaaaaaaaaaaaattcttctggtattttcccacacatgtatatcatttaaggatataagaagctctccagtggagcaaatgagctttctcaatagaaaactggagaatgccattactatcaccaagcagatattcttccaagatccggtttttgtaacagtgcactacatattccctattatcaaaatctgccacattgtgtcttgaataattttgactttcttagctttctcttgacattatagcatatcaatgacagtttacactattc

SEQ ID NO: 16632 - DNA, 530 bp, Homo sapiens
gccaagggagatctgttctcctccctccagtggcctatactctgcctgagttgtttcatgtaagaactgcaagatacactattgtcacactgccaattaatcaggattttgcaaaaagagagatgtagtggatgctgatgttcttctgttacaaggtctgggtaatagtcaatcatcttgttttatgcgtgaagaatctggctgatgcttgagaattaatgtagggtttcattgctttttccccgaagttaaatttcattatgattgacatactgcactttttcttttctakactgttcccagaaaactttatcaattaatctgtggtggcttagctgtagaacagataccttctatttcttgttcttaacttttcttgtgaaaagaagatttttagatcccctgcatctctctctttatttcagttacaggcaattgattttataatcttggtgcaagagggaggtattcctggatgtttggtgaactcagaatagatgcaaagtcttcaatagctttctgcaatactg

SEQ ID NO: 16633 - DNA, 1227 bp, Homo sapiens
tcggcattatctctatgcaacagagtggagaaacgtaggggctggggttaatgatttatccaaggtcagcagcaaagctagtaccaaactgaaaattacactgcatctttcctttggggtgacttatgattttccygtattttaaaaaattattatgagggaaggctttccatgaaaagaaacattttatgtttaggagctgaaagagaaatcagcttttccaaatatctcaatttcaacttgaggaaactgaggcacagagagataaagcagcttacccgtggcttcccagcaggtccgcgggaaagctgagcttgaatcctgagtgcccacccacttggtcagtccatttttcactaaacttccagttgggatgttgaggcatagtagaatatttcaaatacaatagcgtattttaaaactttgattgagaaagttctctaggagtgtattgagaaagcaaaggaagaaaagtgagaaccaagatttgttatatttttagacatgaataaagatagaaaggctgtgtgattcagaagcaggcacatggcctgcttttcattcagctgtggtcagtttgcagctaatccaggaggcatctccaggatgacctgggaggtaaaccacagtcaccgaggccaagtctcctggcaactgtgcagctccactctgcacccttggtttatccttcctgtttcctcacttatcaaatatttattgtcaacaacgggcagttctgtttgcacacagtgtgatggggtaatgagatagttaggtttcctcctgttattgatggggagtgctgatggcatgaataatttcctctttttataaatgggaatttaattattgatgccttgtttaggcagtgacaaaggtgttgccaacaaacactgcagttggaggccttggcaggcatgaggctgccaggctgcagtctaaggttggtgggggtcatgaaataaacttgcttttaattgtttaggagagacagcaagtgtctttaccatatatatataggcacagtatatatacatatacatatatcgatgtgtgtgtgtgtatataaaacctctaaaactaaatcctaacaagatgtaagctaatcaaaccagtgagaaactagttctttcatacttgcataggacattaattgaatgtttagcattgccggtggaatgtttattcatatagcaagggtttttgtggactgacaacttactttag

SEQ ID NO: 16634 - DNA, 1227 bp, Homo sapiens
tcggcattatctctatgcaacagagtggagaaacgtaggggctggggttaatgatttatccaaggtcagcagcaaagctagtaccaaactgaaaattacactgcatctttcctttggggtgacttatgattttcctgtattttaaaaaattattatgagggaaggctttccatgaaaagaaacattttatktttaggagctgaaagagaaatcagcttttccaaatatctcaatttcaacttgaggaaactgaggcacagagagataaagcagcttacccgtggcttcccagcaggtccgcgggaaagctgagcttgaatcctgagtgcccacccacttggtcagtccatttttcactaaacttccagttgggatgttgaggcatagtagaatatttcaaatacaatagcgtattttaaaactttgattgagaaagttctctaggagtgtattgagaaagcaaaggaagaaaagtgagaaccaagatttgttatatttttagacatgaataaagatagaaaggctgtgtgattcagaagcaggcacatggcctgcttttcattcagctgtggtcagtttgcagctaatccaggaggcatctccaggatgacctgggaggtaaaccacagtcaccgaggccaagtctcctggcaactgtgcagctccactctgcacccttggtttatccttcctgtttcctcacttatcaaatatttattgtcaacaacgggcagttctgtttgcacacagtgtgatggggtaatgagatagttaggtttcctcctgttattgatggggagtgctgatggcatgaataatttcctctttttataaatgggaatttaattattgatgccttgtttaggcagtgacaaaggtgttgccaacaaacactgcagttggaggccttggcaggcatgaggctgccaggctgcagtctaaggttggtgggggtcatgaaataaacttgcttttaattgtttaggagagacagcaagtgtctttaccatatatatataggcacagtatatatacatatacatatatcgatgtgtgtgtgtgtatataaaacctctaaaactaaatcctaacaagatgtaagctaatcaaaccagtgagaaactagttctttcatacttgcataggacattaattgaatgtttagcattgccggtggaatgtttattcatatagcaagggtttttgtggactgacaacttactttag

SEQ ID NO: 16635 - DNA, 548 bp, Homo sapiens
aataaattgtgcatctaatgtctaccaattaatgtacttgtagatgtatcttatcttaacttgagtctttgctgccmctaatgaggtgtgaaggactcttctcccatggggaagtttttctttttccggagggaggagggcttttccaggtaatgtgtctagagtgttgggcagaagaatctgggaccacacctcaccagttctctccttaatcgacgtcatttgccttctcttccagctatgtttccagtgtcctctgggtgtttccaagagcaacaagaaacgaataaatctctggtgagttgtttatttgttcttcactttgttttacactgtattttctgagtttatgggtgtctgtgaattaaaaaggaaaagtggaaataagtaaaactcaggttgaaggaaatatacataaataagataaagctgacctgtagatatagacaggttataaaagcttagagttgtctaagttgagtgcaaagtttcctctgatctttctgatgccgaaacaaaaaaggcagtcatgtttgttacgtgattgg

SEQ ID NO: 16636 - DNA, 557 bp, Homo sapiens
ccaagtgctgggattacaggtatgagmcaccatgcctggccattgtttaacctttgtactaataaaacactacctttctaaaatcatgtatatgcaatagatcaatattaactgcatttttgtcagattactctaaacagcattacacatatacatcctctgttatctaaacttaaaataagtagaaattttattttatttatgtgattatttttctatttaagcaaacttcaagtaatgtctagtcactaaaaatactaaaggccacattttgtaagtgatacatgattttcatgataatgtttcttgtttaatttagacattattattatttttacttattttagatggggctggactgtgtagaataaataattagagaaacaaagagaagtacgttgacaaaatttattaattaaatttaggtttattttagaaataaagtgtaaatagcaaatggcattccttttcattcttgggttagtagatactacatcaatattttttcttacacacatctaatgaaagatgtgaaaacaaaaactttcacagagaag

SEQ ID NO: 16637 - DNA, 557 bp, Homo sapiens
ccaagtgctgggattacaggtatgagccaccatgcctggccattgtttaacctttgtaytaataaaacactacctttctaaaatcatgtatatgcaatagatcaatattaactgcatttttgtcagattactctaaacagcattacacatatacatcctctgttatctaaacttaaaataagtagaaattttattttatttatgtgattatttttctatttaagcaaacttcaagtaatgtctagtcactaaaaatactaaaggccacattttgtaagtgatacatgattttcatgataatgtttcttgtttaatttagacattattattatttttacttattttagatggggctggactgtgtagaataaataattagagaaacaaagagaagtacgttgacaaaatttattaattaaatttaggtttattttagaaataaagtgtaaatagcaaatggcattccttttcattcttgggttagtagatactacatcaatattttttcttacacacatctaatgaaagatgtgaaaacaaaaactttcacagagaag

SEQ ID NO: 16638 - DNA, 557 bp, Homo sapiens
ccaagtgctgggattacaggtatgagccaccatgcctggccattgtttaacctttgtactaataaaacactacctttctaaaatcatgtatatgcaatagatcaatattaactgcatttttgtcagattactctaaacagcattacacatatacatcctctgttatctaaacttaaaataagtagaaattttattttatttatgtgattatttttctatttaagcaaacttcaagtwatgtctagtcactaaaaatactaaaggccacattttgtaagtgatacatgattttcatgataatgtttcttgtttaatttagacattattattatttttacttattttagatggggctggactgtgtagaataaataattagagaaacaaagagaagtacgttgacaaaatttattaattaaatttaggtttattttagaaataaagtgtaaatagcaaatggcattccttttcattcttgggttagtagatactacatcaatattttttcttacacacatctaatgaaagatgtgaaaacaaaaactttcacagagaag

SEQ ID NO: 16639 - DNA, 557 bp, Homo sapiens
ccaagtgctgggattacaggtatgagccaccatgcctggccattgtttaacctttgtactaataaaacactacctttctaaaatcatgtatatgcaatagatcaatattaactgcatttttgtcagattactctaaacagcattacacatatacatcctctgttatctaaacttaaaataagtagaaattttattttatttatgtgattatttttctatttaagcaaacttcaagtaatgtctagtcactaaaaatactaaaggccacattttgtaagtgatacatgattttcatgataatgtttcttgtttaatttagacattattattatttttacttaytttagatggggctggactgtgtagaataaataattagagaaacaaagagaagtacgttgacaaaatttattaattaaatttaggtttattttagaaataaagtgtaaatagcaaatggcattccttttcattcttgggttagtagatactacatcaatattttttcttacacacatctaatgaaagatgtgaaaacaaaaactttcacagagaag

SEQ ID NO: 16640 - DNA, 557 bp, Homo sapiens
ccaagtgctgggattacaggtatgagccaccatgcctggccattgtttaacctttgtactaataaaacactacctttctaaaatcatgtatatgcaatagatcaatattaactgcatttttgtcagattactctaaacagcattacacatatacatcctctgttatctaaacttaaaataagtagaaattttattttatttatgtgattatttttctatttaagcaaacttcaagtaatgtctagtcactaaaaatactaaaggccacattttgtaagtgatacatgattttcatgataatgtttcttgtttaatttagacattattattatttttacttattttagatggggcyggactgtgtagaataaataattagagaaacaaagagaagtacgttgacaaaatttattaattaaatttaggtttattttagaaataaagtgtaaatagcaaatggcattccttttcattcttgggttagtagatactacatcaatattttttcttacacacatctaatgaaagatgtgaaaacaaaaactttcacagagaag

SEQ ID NO: 16641 - DNA, 917 bp, Homo sapiens
ctgtcatggtatctatgactctatatggacattgcctgcctgtctgttttttaggttatagcttatgactgttgagaggtggaccatgccatcttcatcttgtaattccagtgctggttctagtaccttagcatgtggctgttgattacatgaatgaagactgaaaaagctctgatatttaaacacaattagaattaatgccatgtgtaaattattaaatagtaattttgtattgtaaatgtacatacatatttctcattcttattaactctgataaagttctcaagtctttagtttttaaactcactcttagttaactgaagtgttttaggtaaagaacaaaattctttatttttctttccagctgttgctgtattggacacttgctcccatctactttcttctctagaatccacgggtaagccacatctaatgaagagaatatttaaccataaagtcttaaggaaaaattctatgatgatttaaaagattataaaactttattactgggctatttacacattttaattgtttctcataaaatatataacattccaatatttactgaagtaggatatttttgtatcatatgtatgattataatttataggrtattttaaatgatgttttttggcctccttaagttttaagtggatcttgcaaatgaaaaccagtattattgagtttgacatactcaaattgcccaaatttcagctgtttaaacaaccaagtcatcattgatactttagtaaaggttagtaaatgtcatcgaaggcttatttgcattttacagtttttattacttaggagagttaaggagtacctgccaggtttgtccatgctaatgttacaattttctttttgtagttcaaccgtattttgtatggagatactttgaggctctgtaaatatctggt

SEQ ID NO: 16642 - DNA, 917 bp, Homo sapiens
ctgtcatggtatctatgactctatatggacattgcctgcctgtctgttttttaggttatagcttatgactgttgagaggtggaccatgccatcttcatcttgtaattccagtgctggttctagtaccttagcatgtggctgttgattacatgaatgaagactgaaaaagctctgatatttaaacacaattagaattaatgccatgtgtaaattattaaatagtaattttgtattgtaaatgtacatacatatttctcattcttattaactctgataaagttctcaagtctttagtttttaaactcactcttagttaactgaagtgttttaggtaaagaacaaaattctttatttttctttccagctgttgctgtattggacacttgctcccatctactttcttctctagaatccacgggtaagccacatctaatgaagagaatatttaaccataaagtcttaaggaaaaattctatgatgatttaaaagattataaaactttattactgggctatttacacattttaattgtttctcataaaatatataacattccaatatttactgaagtaggatatttttgtatcatatgtatgattataatttataggatattttaaatgatgttttttggcctccttaagttttaagtggatcttgcaaatgaaaaccagtattattgagtttgacatactcaaattgcccaaatktcagctgtttaaacaaccaagtcatcattgatactttagtaaaggttagtaaatgtcatcgaaggcttatttgcattttacagtttttattacttaggagagttaaggagtacctgccaggtttgtccatgctaatgttacaattttctttttgtagttcaaccgtattttgtatggagatactttgaggctctgtaaatatctggt

SEQ ID NO: 16643 - DNA, 434 bp, Homo sapiens
cattataaaataagcacaagaaaaactttgtagttaggttaaattcatgcaatgaaaggcaatcttgttggagctcaggctgaattctcatttaggtcaccaacttgcttgatgattctgcataagctaaaatacctttcttaaccttagtatttacagctgaagatttacattagtggttctcaaactttagtctgcactagaataaccagactttttaagaaacagattactctttcagtaaatctggagtgatatccaataatatctcaaatgatgttgctgctgatcttgagaccacactttttaagaagcactaatgtataagatgacacacwaacacacacaaatttccaggggtcaaatttctctattagataatttaaatttaaacttaatccttttgacttgacatcatatatgttggatgtact

SEQ ID NO: 16644 - DNA, 551 bp, Homo sapiens
gaaatcacacagcatataaacgataacagcaatatatttgagacatcagtctgtgtaaagtgtctcaaagtcctatcccattatgtgataattgtttctttcaatagttactcaggagctatttattaaataatgatrtattaattttgttccattttatcaacagctatggttaattaaattctgatttgatacaatattgacttgtagttctatcatatgtgggtaaattattggaaaaagagtgatgctttaggatttaaaatgtatagagatattgaaatgaatatgacatggggaggggtggaaaaaaatgaatgaatgcaagcttccatacctggaaatataatatgtcagactagatacccgaaattgccctctctttcaaaggaaaaaaacctgaaattaataaaaactattctatttaagtgcacggtattatgcagatatcatataagtgatagattaaataaaaaataaatttttatagtgaaatttcaaaaaatataagcaaagaataaaaaatggccaatatattcctgagatgaaaa

SEQ ID NO: 16645 - DNA, 722 bp, Homo sapiens
ctcctcagcaaggtttcccttttaacaaaaagcagccaccaaatcatttcttttctaaaaaagagcagcctgtaaaatcgagctgcagaagtagataagcaagttggaagcttgcatgggtgaatgccagcagctgtgccartaggaaaagtctacctggggggccagttatgttcaagatggaggctccattctttccttttcttggtcaccatgcgtgcaacaagggaagaggcaacatggtgcgggccaggtagagaacacatcagcataataaaagattagggtgggatggcatgctatgtaaatggcacacctggtccaaccaatcttttgggccctatgtaaatcagacaccacctcctcaagttcatctataaaaccaaccatatctctccacaaatggggagatctgttcggaaccccttccctctggacaagggagcttctctcttcgcctattaaacttctgctgttaaactcactccttgtgtatctgcgtccttgatttccttggtatgaggcaatgaacctcaggtattaccccagacaaatgacttgacttcattgccaacctttattttctctctctctcttcaattttgcctttaagcccttaatttcatctgaagagaatgcatttaactgctttattttggaatatattttagaatatgttattaagggagtaccctccatacataatatcttcctcatataat

SEQ ID NO: 16646 - DNA, 533 bp, Homo sapiens
cctaattcccagggataggagagttgaggttttggggtaacaaaatgtaaacctgtctctgaacattaggaaactggaataatcagtggaatgctttagtatcttcattaataaaggcacagattttattacaatgcttttaagtcctagcaacaccaaattttttcctmatctattgataaacactaaaccaagagattttcattctatgtggaaagtaaaaatattgattcctatcatattctgcgttccgtgtgaaacacatcacataaagatgggcattttgctcttgagacaaatttagaggtaggctctttccacccatttcgcataagataaaactcaggctcaaaaaaataagtatcttttccaatttcacagaactaaaaacaagatgagccctacataaaggatgttctatgggatttacttttccacttctgctttctattgtatatgattgtatgaaacagggtggtatgccttaatattcttgcaactaattcttaaaaatacaagaataattagaaaaa

SEQ ID NO: 16647 - DNA, 533 bp, Homo sapiens
cctaattcccagggataggagagttgaggttttggggtaacaaaatgtaaacctgtctctgaacattaggaaactggaataatcagtggaatgctttagtatcttcattaataaaggcacagattttattacaatgcttttaagtcctagcaacaccaaattttttcctaatctattgataaacactaaaccaagagattttcattctatgtggaaagtaaaaatattgattcctatyatattctgcgttccgtgtgaaacacatcacataaagatgggcattttgctcttgagacaaatttagaggtaggctctttccacccatttcgcataagataaaactcaggctcaaaaaaataagtatcttttccaatttcacagaactaaaaacaagatgagccctacataaaggatgttctatgggatttacttttccacttctgctttctattgtatatgattgtatgaaacagggtggtatgccttaatattcttgcaactaattcttaaaaatacaagaataattagaaaaa

SEQ ID NO: 16648 - DNA, 533 bp, Homo sapiens
cctaattcccagggataggagagttgaggttttggggtaacaaaatgtaaacctgtctctgaacattaggaaactggaataatcagtggaatgctttagtatcttcattaataaaggcacagattttattacaatgcttttaagtcctagcaacaccaaattttttcctaatctattgataaacactaaaccaagagattttcattctatgtggaaagtaaaaatattgattcctatcatattctgcgttccgtgtgaaacacatcacataaagatgggcattttgctcttgagacaaatttagaggtaggctctttccacccatttcgcataagataaaactcaggctcaaaaaaataagtatcttttccaatttcacagaactaaaaacaagatgagccctacataaaggatgttctatgggatttacttttccacttctgctttctattgtatatgaytgtatgaaacagggtggtatgccttaatattcttgcaactaattcttaaaaatacaagaataattagaaaaa

SEQ ID NO: 16649 - DNA, 575 bp, Homo sapiens
acatacatatacatatgtatatatacatatacatacatatacatacatatacatatacatatgtatatatacatatacatacatatacatatacatatgtatatatacatatacatatacacatatacatacatatgtgcacatatgtatgtatatgtgtgtgtaggtaggtaggtagatagatagatctccctacagaagaccttatttcttcaaagtagcttgaacaacagtgtgtgaacagtgcttatggtaagaaaatctatagagaaatgaagagaaaagtagtcaacatttgtttcttttatttatcaggtactttccaagaaactagaggatacagatatatacaatgtaagattctacaactcaaaatctatgcttacttttattctgtcaccaatactttatttatacaacatcactctaataaccctaggtattttctttctcagcttctctctmtatatattgatctctcttttcagctctctcttaatatacaccttgactcatgttatttatacacacacacacacacacacacacacacacacaccattaatcatacattc

SEQ ID NO: 16650 - DNA, 516 bp, Homo sapiens
tgctgctttgttttctcttgcttcctctatatatgaaaccattccaatagatctgcaggaagagatttagttgcagatggcagaggtcagtgtcttgtgtattcaatgtagtcaataataaagtcaggacttatgctacctgaatgttaataaggaagcacaaggaccttggaaagtcattatgtctggtcatttgcttcataatattactccaacaggctcaggaggccaatgcaaggagatttttaaacaagtaacaagaaaaggccagaaaaataaggaaacaatkgaaatgttgcagaaattgtaaggttcatgtaatatactacagctcggcagaaggagaattttaaaatgtagtttatgtgtagcagagggaatagtattatttcttattgaaggaaatttggtccttatccaaatgtacatgttatgtttttcttgtctaaatactatgattccttcttaatatgtataatgggcttctacaggcactaattacaggtacttcaaatg

SEQ ID NO: 16651 - DNA, 626 bp, Homo sapiens
tttttccattttaattaagttagtagcatcccacagtgactaagaatttcgtattgtatatacagtagtcccctcttatccacatgaaatgcattccaaaactcacagtggaatgaaaccacagatagtcctgaaacctatatatactgtttctttctatacatacatacctatgattaagtttagcttgtaaattaggcatagtacgacattaacagcaataactaataatgaaatagaaccattataacaatatactgtaataaaagttatgtgaatatggtctttttctttctctttcaaaataccttacagaacagtagtatagtacctcaggtaacggaaactgcagaaagcgaaagtatggggaagggrcgactgctgtgtgttcttgcattagagattgtagggtatactcttggagtatatatttattgtttttgccaatgttttcccagttttcctttacttcgataaaaacacagtgaatttccttagagaattcctctcatgctcagttcatttgattttgcatggggcaggatcaatcagggctagacaggattctaggatgagtatatcacttttggtggttcaaccaaggccaatcctaggacattttttaa

SEQ ID NO: 16652 - DNA, 556 bp, Homo sapiens
tgaggttctagtattaactgttgattgccttcatccttgctgtatttcttcccagtagtaattgctaatcaatcatgactcagagagaatagaaaagttctagccttgtttacgttttacactattactacagtagcattttagacaaaagcaaaaagcaaagcaaaacaaaacaaaacaaaaaatcaacaacaaaaaaccaattttcaatgtcaccataagtcacatgaagtaaaattgtttgaaaatgggcttttttttctcagtaagaaagacctattacacctggagctgtactgttttcctcttcactacctcatgtcaaagcagtgggctgttctaggacacaacccttacaagtgtcatctgcctctaaccttaaaagtcaactaacctgaytcagtgatttggctttagacacagcgaagctgagttttcattttgggccagtttctgagaggtctgagaatggcattttttttcttccttttttgatttagagttgcttgtctcttggcaggcctctgtatcatgagaggcagctttgctgttgccc

SEQ ID NO: 16653 - DNA, 539 bp, Homo sapiens
gcagcggcatgatcttggctcagtgcaawctccacttgctgggttcaaatgattctcctgcctcagcctcctgagtagctgggattataggcgcccgccaccatgcctggctaatttttgtacttttcgtagagatggggtttcgccatgttggccagcctggtcttgaactcctgacctcaggtgagccgcctgccttggcctcccaaagtgctgggattacaggcattagccaccacccgccaggcccctcatctctttttgacatctggttctggtgcttcccacaccctcccactctccatcctatttcagatttggggcttgcactccttagagccttaccctttgctaatgtaatgactgctgcaaatgcattgcaattgtgttcttccacactgcactggggcattttaatacgcaaccaacagaaagtgatgacttgactcagtaattttctaaatttgtggatagttttttattgttattctttttcttggccttttgttttactttttcggaaaactccttttatgaac

SEQ ID NO: 16654 - DNA, 705 bp, Homo sapiens
atacttctaactgctttcttaacttctattgctccatttctccgaatagaaaaattctttgcgtggtctgtctgtcactgattgagggctacaatagacccacctcctattatcttctccccaccccttcccacgcctgctgacactactgcatgacttccttaaccctaggaatagagaggtcattcctaatgtgtgaaaagttctacctctctttccttctctctcatgctttatgtgtcgwgctctgctgttagtacaaccatgagctacttctactccagaggctgactctttggccccccaggttcctaagcaactgacctgttgatgatctggtcccctgctctttaccctgggctctccttccactgcccatctctctttactttgtgtgaactccagcagtaccccccacaaagtgtgaatatccccctcacactgcactctgctcaaacagccttatcatgtgctccatatatctaaaatatttgggtgaaattgatattgttttgcttacatatttttctttatagctttgtaaaatgtttttttttttagggaatagacaaatctgaagtataatctgtttagcccacactgttgaattaaaaattattgttgcttcccttttacattggctcgtccttcttgcatcaagcttatatatcatgtttttcctgaagatttaccttcacaagagta

SEQ ID NO: 16655 - DNA, 517 bp, Homo sapiens
aagaacagcaagggggatgtctgtcctcatgatccaatcacctctccaacattcaggattataattcaacgtgagatttgggtggggaaayggagccaaaccatattatccattaattccaattttgatatttttttcttaataatgcccagcaatgaacctggactagatgctgaatctggggatatgaaatatttggtcatcagagaggattttctgcagtagattagaaacattttttcaggctttaccataccctcagcaaaatatctcccaaaaatatctatctatatctgttctccttttcttgacatctaatactagttatgggtaaagtatggcgtttgtccaatatttaacctgtttctcagttccctgttttgtaaaattgagaaaaaagaatacctcatttgatgactgtaagattaaattacacaggtaaaggacttataatgtgcctgacatacagttttcaatatttgttggttctgattattattttatattattattgtta

SEQ ID NO: 16656 - DNA, 517 bp, Homo sapiens
aagaacagcaagggggatgtctgtcctcatgatccaatcacctctccaacattcaggattataattcaacgtgagatttgggtggggaaatrgagccaaaccatattatccattaattccaattttgatatttttttcttaataatgcccagcaatgaacctggactagatgctgaatctggggatatgaaatatttggtcatcagagaggattttctgcagtagattagaaacattttttcaggctttaccataccctcagcaaaatatctcccaaaaatatctatctatatctgttctccttttcttgacatctaatactagttatgggtaaagtatggcgtttgtccaatatttaacctgtttctcagttccctgttttgtaaaattgagaaaaaagaatacctcatttgatgactgtaagattaaattacacaggtaaaggacttataatgtgcctgacatacagttttcaatatttgttggttctgattattattttatattattattgtta

SEQ ID NO: 16657 - DNA, 680 bp, Homo sapiens
actgaacagttattcattttggaccaaaaaatatttcgtctctttggtgctgtgactttcttacagttttaaatactgtaataaaagtaagttaaaaatacttgaaagttagggtaaatgaatatttcattacatatgcattctatagttacatatastgtatatgcatagaaaacaaaaaggatatatattaacattaagggaatgggatagaggaagaatggggcctttattttctgatgtatacatatgtgttgtctgaatttgttacaaaaaatatatattaataaaaaataatacttgcaggctgggcacaatggttcacacctgtaatcctagcactttgggaagctgaggcaggtggcttcagatggcttgagtccaggagtttgagaccagcctgggcaacatggcaaaaccccgtctctacaaaaaagacaaaaaaacggcatggtggtgcacacctgtaatcctggctacttgggaggctgaggtgggaggatcacttgagtctgagagatggaggttgcggtgagccgtggttgtaccactgcaccccagcctatttgacagagtaagactctgtcttaaaaaaaaaaaaacaccactttgggaggatgaggcagatggatcacttgaggccaggagatcgagaccagcctggtcaacacagtgaaaca

SEQ ID NO: 16658 - DNA, 680 bp, Homo sapiens
actgaacagttattcattttggaccaaaaaatatttcgtctctttggtgctgtgactttcttacagttttaaatactgtaataaaagtaagttaaaaatacttgaaagttagggtaaatgaatatttcattacatatgcattctatagttacatatagtgtatatgcatagaaaacaaaaaggatatatattaacattaagggaatgggatagaggaagaatggggcctttattttctgatgtatacatatgtgttgtctgaatttgttacaaaaaatatatattrataaaaaataatacttgcaggctgggcacaatggttcacacctgtaatcctagcactttgggaagctgaggcaggtggcttcagatggcttgagtccaggagtttgagaccagcctgggcaacatggcaaaaccccgtctctacaaaaaagacaaaaaaacggcatggtggtgcacacctgtaatcctggctacttgggaggctgaggtgggaggatcacttgagtctgagagatggaggttgcggtgagccgtggttgtaccactgcaccccagcctatttgacagagtaagactctgtcttaaaaaaaaaaaaacaccactttgggaggatgaggcagatggatcacttgaggccaggagatcgagaccagcctggtcaacacagtgaaaca

SEQ ID NO: 16659 - DNA, 527 bp, Homo sapiens
gcaagaaatggatgaaggaaaggtgccttggtcctgagtaaagcctcaggacaaagcatcttcactactagggctttttacacaaccaagagtgacttcttagcttaaggcccatgtaccaaaggaggctttgtctctttttcttctttgtctgaaaaccccagagttagtagttattaataaaaacatgccaatttgagacaaaaacaatacaaaggtgagagatatctggagrttaagcagtgcttttatttcctattctacaaacatttttgagtgcctgttgtgtaatacgcactgatctggtattcatcagtgaaaataaagatctctgactttgtggaagttacattctagcaagggagcttacatcttgatatatcaatgtaaatcatgattaagtggtaggagaaaagccactgtatttgaaaagagcttattaccagacaccgggcctagttctagggtagagagagatgggactgaaaagtcttacctgaataattgacatttggtctgaaatctga

SEQ ID NO: 16660 - DNA, 527 bp, Homo sapiens
gcaagaaatggatgaaggaaaggtgccttggtcctgagtaaagcctcaggacaaagcatcttcactactagggctttttacacaaccaagagtgacttcttagcttaaggcccatgtaccaaaggaggctttgtctctttttcttctttgtctgaaaaccccagagttagtagttattaataaaaacatgccaatttgagacaaaaacaatacaaaggtgagagatatctggagattaagcagtgcttttatttcctattctacaaacatttttgagtgcctrttgtgtaatacgcactgatctggtattcatcagtgaaaataaagatctctgactttgtggaagttacattctagcaagggagcttacatcttgatatatcaatgtaaatcatgattaagtggtaggagaaaagccactgtatttgaaaagagcttattaccagacaccgggcctagttctagggtagagagagatgggactgaaaagtcttacctgaataattgacatttggtctgaaatctga

SEQ ID NO: 16661 - DNA, 527 bp, Homo sapiens
gcaagaaatggatgaaggaaaggtgccttggtcctgagtaaagcctcaggacaaagcatcttcactactagggctttttacacaaccaagagtgacttcttagcttaaggcccatgtaccaaaggaggctttgtctctttttcttctttgtctgaaaaccccagagttagtagttattaataaaaacatgccaatttgagacaaaaacaatacaaaggtgagagatatctggagattaagcagtgcttttatttcctattctacaaacatttttgagtgcctgttgtgtaataygcactgatctggtattcatcagtgaaaataaagatctctgactttgtggaagttacattctagcaagggagcttacatcttgatatatcaatgtaaatcatgattaagtggtaggagaaaagccactgtatttgaaaagagcttattaccagacaccgggcctagttctagggtagagagagatgggactgaaaagtcttacctgaataattgacatttggtctgaaatctga

SEQ ID NO: 16662 - DNA, 527 bp, Homo sapiens
gcaagaaatggatgaaggaaaggtgccttggtcctgagtaaagcctcaggacaaagcatcttcactactagggctttttacacaaccaagagtgacttcttagcttaaggcccatgtaccaaaggaggctttgtctctttttcttctttgtctgaaaaccccagagttagtagttattaataaaaacatgccaatttgagacaaaaacaatacaaaggtgagagatatctggagattaagcagtgcttttatttcctattctacaaacatttttgagtgcctgttgtgtaatacgcactgatctggtattcatcagtgaaaataaagatctctgactttgtggaagttacattctagcaagggagcttacatcttgatatatcaatgtaaatcatgattaagtggtaggagaaaagccactgkatttgaaaagagcttattaccagacaccgggcctagttctagggtagagagagatgggactgaaaagtcttacctgaataattgacatttggtctgaaatctga

SEQ ID NO: 16663 - DNA, 527 bp, Homo sapiens
gcaagaaatggatgaaggaaaggtgccttggtcctgagtaaagcctcaggacaaagcatcttcactactagggctttttacacaaccaagagtgacttcttagcttaaggcccatgtaccaaaggaggctttgtctctttttcttctttgtctgaaaaccccagagttagtagttattaataaaaacatgccaatttgagacaaaaacaatacaaaggtgagagatatctggagattaagcagtgcttttatttcctattctacaaacatttttgagtgcctgttgtgtaatacgcactgatctggtattcatcagtgaaaataaagatctctgactttgtggaagttacattctagcaagggagcttacatcttgatatatcaatgtaaatcatgattaagtggtaggagaaaagccactgtatttgaaaagagcttattacmagacaccgggcctagttctagggtagagagagatgggactgaaaagtcttacctgaataattgacatttggtctgaaatctga

SEQ ID NO: 16664 - DNA, 1181 bp, Homo sapiens
tcccaggttcaagcaattcttctgcctcagccttctgagtagctgggattacaggtgcgtgccaccacacctggctaattttttgtagttttagtagagacggggtttcaccatgttggccaggctggtctcgaactcctgacctcaggtgatccacccgccttggcctcccaaagtgctgggattacaggcatgagccactgctcccggccttatacttgcacactttttaattctaagaccttgctactcagtgagggatcctgggactaataccatcagcttgacttgaggccctctttgaaagccgactcagaatctgtaatttatcaggatccccaggtaatttgtatgtgcagtctagtttggtagatctgctctggcagactggaagactcttctatctgcctcatgtaaggtgcaggtgacataattaggtaatcaagcaaaagatcacatattttaataagaaagagacactggctattattttgagtggtaaaacaggttattcagtcccagtttaaaatggaaatgacagagaccaagatgaagatttttaatttgagatgtgcctgcgatgcaattacatttgctgaatgaaactgcttcagtaattagatgcaggtttcttctctcttctttttgagatgtaaagaagacacaatagactcatggaacttaaagaactagacgccagctaacaaaacatgctatccaggctctttcgtttcaccatattgctttcttgaaaacataggacagtgccagtttagcactgaaaaaaatcagttctcctaattctaaaaagaggagacagccaggcgtggtgggtcactaaaaatacaaaaaattagctgggcatggtggtgcatgcctgtaatcccagctacttgggaggctgaggcaaaagaatcacttaaacccgggaggtgaargttgcagtgtgctgagatagcgccattgcactctcgcctgggcaacaagagcgaaactccgtctcaagaaaaaaaaaaaagagagagagagagaaactgtaatttcatttcagaagttttatagggtagtatttccaattctttttttcttactccattaaagtgtaattagcagtatgtgaaaatttccactttatcctcaatcagaagcctctccttccaattagcatatattttttctat

SEQ ID NO: 16665 - DNA, 1181 bp, Homo sapiens
tcccaggttcaagcaattcttctgcctcagccttctgagtagctgggattacaggtgcgtgccaccacacctggctaattttttgtagttttagtagagacggggtttcaccatgttggccaggctggtctcgaactcctgacctcaggtgatccacccgccttggcctcccaaagtgctgggattacaggcatgagccactgctcccggccttatacttgcacactttttaattctaagaccttgctactcagtgagggatcctgggactaataccatcagcttgacttgaggccctctttgaaagccgactcagaatctgtaatttatcaggatccccaggtaatttgtatgtgcagtctagtttggtagatctgctctggcagactggaagactcttctatctgcctcatgtaaggtgcaggtgacataattaggtaatcaagcaaaagatcacatattttaataagaaagagacactggctattattttgagtggtaaaacaggttattcagtcccagtttaaaatggaaatgacagagaccaagatgaagatttttaatttgagatgtgcctgcgatgcaattacatttgctgaatgaaactgcttcagtaattagatgcaggtttcttctctcttctttttgagatgtaaagaagacacaatagactcatggaacttaaagaactagacgccagctaacaaaacatgctatccaggctctttcgtttcaccatattgctttcttgaaaacataggacagtgccagtttagcactgaaaaaaatcagttctcctaattctaaaaagaggagacagccaggcgtggtgggtcactaaaaatacaaaaaattagctgggcatggtggtgcatgcctgtaatcccagctacttgggaggctgaggcaaaagaatcacttaaacccgggaggtgaaggttgcagtgtgctgagatagcgccattgcactctcgcctgggcaacaagagcgaaactccgtctcaagaaaaaaaaaaaagagagagagagagaaactgtaatttcatttcagaagttttatagggtastatttccaattctttttttcttactccattaaagtgtaattagcagtatgtgaaaatttccactttatcctcaatcagaagcctctccttccaattagcatatattttttctat

SEQ ID NO: 16666 - DNA, 545 bp, Homo sapiens
ctgtgcctggcctattttaactgttttatgtcttctggtttcgtgtgacaatgaaataagttaatatttcctgcctgcaccaaccacatttaggctctaccttaattgttgatgaggtcttggagcctcccttctgctcccagaggcttttcttgctcatgtctccagccacaatatccygggggcagcagaagggtatgtcacaagggcagacccctggatcttggggagtagaagccctgggcccttctctcctgccttgccttacctggccagggggcctgggatctgcctaccaaaactttttctgtgcgatcccagtggaagaagcagggaaaggaataaaggtgccatccacctccactcggacaacacagccttctacaccagcaagggtgaacccaaccctactgcaatacctcagggttctgtctgcccacattcatcctggacagtcccacgcttgtcttaacaaggaaacctggcctgctactaaactccccagtgctggctctgcagcccagccttgcccctggaggggacct

SEQ ID NO: 16667 - DNA, 545 bp, Homo sapiens
ctgtgcctggcctattttaactgttttatgtcttctggtttcgtgtgacaatgaaataagttaatatttcctgcctgcaccaaccacatttaggctctaccttaattgttgatgaggtcttggagcctcccttctgctcccagaggcttttcttgctcatgtctccagccacaatatcccgsgggcagcagaagggtatgtcacaagggcagacccctggatcttggggagtagaagccctgggcccttctctcctgccttgccttacctggccagggggcctgggatctgcctaccaaaactttttctgtgcgatcccagtggaagaagcagggaaaggaataaaggtgccatccacctccactcggacaacacagccttctacaccagcaagggtgaacccaaccctactgcaatacctcagggttctgtctgcccacattcatcctggacagtcccacgcttgtcttaacaaggaaacctggcctgctactaaactccccagtgctggctctgcagcccagccttgcccctggaggggacct

SEQ ID NO: 16668 - DNA, 596 bp, Homo sapiens
attaattcttttctatacttatttatgcatttatctatctacytatctatatttatatatgaagtcctaattacaaatacaagtacattgtaaaatattaatatccttagacattcctttgttttggaaggcagtaaactcagctttgtctcatcaacaggctgtgctggaatgaacccctggaggatagcatgatgaaagtcatgaaagcagaaagcacatggaatgtttaaaaaatgacatgtaatatatttctatgaaaataagaaatcaatttcatagactgtcaatgccctctaatcttatctaggagaaatagtcactattaataattaagtgtataatcaagcctttgtatgcagaggctgtacacctgagaggtgtagaggaattttgattgcaatataacagtagaaactacataaatgccatttgaaggaatggatttgtgatggttaatattgagtgtcaacatgattggattgaaggatgcaaagtattgttcctgggtgtgtttgtgatggtgttgccaaaggagattaacattgagtcagtgagctgggaaatgcagacccgccctcaatctaggtgggcac

SEQ ID NO: 16669 - DNA, 501 bp, Homo sapiens
gcaacttcttccgcttcctagtttcaagtgattctcctgcctcagcctcctgagtaactaggattacaggtgtgtgccaccaccctggctaattttttgtatttttagtagaaatggggtttcaccatgttggccaggctggtctcaaactccggacctcaagtgatctgctcgccttggcctcccaaagtgctgggattacagacatcagccactgcgcccagcccaaaatgcctattatttcaagctagggaaaggtaactaagatttttaaatccgtaagaaaaagactgtattctgctctgaataagaaaawctcacccactccagtgcaagtgttaattttgtgctccagtaggaagtcaccagctgatttttgtcttcattaaaaaatttttaaatgttgaactgttactagattttatggatgaggatagtagatggagcattatgaactgtttattactgtcacacaaagtaagttacaggaagtaagaaaaa

SEQ ID NO: 16670 - DNA, 684 bp, Homo sapiens
gacatacaaattaaaaaatatcaagtaaaagaatatggaaaaagtaagatcaaaagcatctaccactaatgaaggtcaatgagcttcttcaactcctttcaacttatcttcgatgaatgaaaggatggaagaaagggaggaaagaagggctaatgggagggaggagaggggagactggatgacaaagcaaaacccagctgtaggctgtgcgtggcagccattccaaaaacagaataattcacaaggatttgtaaaagatttcaaaactcaaatacwaagaaaaaagagcagaggttgtgatattaacatcactcaagacagactgcagatgacaaggcattgaaaaaaaaacaaaaatgcccctttattagcttaaatggtgcaatttcacaacaaatatataaagctcttaatatctgtggacctccctctgtccttgatatgtaaaatggacaaaaaataaattgcagagtacctaaatagcataattaataaaggaagtctggtttatagatacagaaatacatacatgcatacattcatacacacaccctgaaaatttaaaaaaacgccttcagctcaagtgccaatgaaagtagataaaaattggacatggttaggcctgtcagggctgtgagcccaagctaaaccatcatatcccctgtgacctgcatgaatacatcc

SEQ ID NO: 16671 - DNA, 557 bp, Homo sapiens
taatggctaaataagcccaaacttatcagttgtgacaacgtaaacaatgaaataaaaatcaggatgaaacataatgactcagaaagttttaaaattaataaaagagaagaaygtagcaatattccaacagataaattagatctcaagatgaaaagtattaaggacagagacagccatttcatattaatacaagtgaaaatgcacgaaggagatataatagttttgacgttgtatgcacctaatacaatacctttgaaatacagccgttcctttgaattacaaggagaaattgacaatcctggagagattttgacacatctttcctgtagcgggctgaatggtggctccaaagacatgtccccatcctaatccttggaatctgtaaatattaccttatttgtaaaaagggtctttgcagatgtaattaatttaagaacactgagatgagatcatcctagattatccaggtggttcctaaatgtcattgcaagtatctttttaagagagaggcagagaattgacacagagggggaggccatgggaaggggaaggtagac

SEQ ID NO: 16672 - DNA, 518 bp, Homo sapiens
aaataagataaggaaagcataagaaaaaaaaacacacacaaaggatcattatacttgtacatgtaaaaaccacaaagaaaatattagtaaattgaatcctataatttattaataatataatataactcgagccactagggttggttcaacaacaacaaaaaatggacaaattgtcaatttgtcaatgctttactaaattagtggggaaaaaaatccccataattttcacagtagatcctgccatttgtccagctcccataaacattcattcatgacacaaacacctagaaaactgaataaaggagaactccytgaactattaaaggatgtaaaccaggaaactgtaggaaccaccatgcttagcggtgccacaaaattaaagtcaaatcacatctcccatatcacagcttagcccaaattcaagaaaagaaatacaaattggaaaggaagaaacaaaactcttgttattttccgaggccataattgctcagtttggaaaatccgaagaataacctgac

SEQ ID NO: 16673 - DNA, 527 bp, Homo sapiens
caggaggatcacttgagcccaggagttcaagaccagcctgggcaacatagggagactccatctctacaaaaaataattatttttaaaaaattagctggacatggtggtgcatgcctgtggtcccagccactcgggaagttgaggcaggaggatcacttgagccaaagagttgaagctacagtgatccatgatgtgccactgcactccagccaggtaacagagcaagaccctgtctctgaaaataaataaataaaattwaaaaaaaaataaactgaggacaaaaattccacatgaaaacccaaggtcccttttggaactaaaatttcatagttttgagcaaatcccatgacactcttatttatccccaaattgacttttctgttccttattaattgacaagtgacaaaattggtaaaatcatatctacactgtcctggaattaaatggcacaaaagagaaatccatcattttggcatagggacaagtttcctggactcagaagttagcaacgaggggcttacatagaa

SEQ ID NO: 16674 - DNA, 531 bp, Homo sapiens
gtttggccaaataacttggtaaacccattcctaatgctgcatctcagcccagggattttatggctataagcagtgaataaacaaggatttatttttctcttgcacactttcagaccccacccccctcccaccccccgcccagggtacgcatctcactgttgaagaagtcttaccaaaatttttacatggcttctaataacagaaatacttcaaattaaataggtttaaataacatttwaaaccaagacatggttttaaatttcacatattcacatgaaaactaaaaaatataagaagagttatacaaatactcttaatacaaatatcaatgctttggtacacattaaaaatacaaaaataatccaccaaaatttaacggaagaccatgatggcaggttgattgatcagtggtttaagctaacctctgcttctatgtataggcctcaatttcttttttgtaactcatatggatttggtgaatttttttattttgttctgttttgttttgtttgagacagggtctcactgtct

SEQ ID NO: 16675 - DNA, 1181 bp, Homo sapiens
tcattgccctcagaagaggcagaatatatattactataattttcaattatgcaacatgaaattgaaatatttataagcaatcataattaaactaagggcccaacataactttttaaactacattaaaaacaaaaaaacctcatgtctataaataatccctttcatccccttccctcaaaaaaagacataaaatgaacacagcatgcctcaaacattttgcacctcttaaatttcacaaagtcctggttaatccatattccagcacagatttccaaagaatcacctaaatttggagacaactcaggatttggaagaagataagtagtaaagatacggatgtgtctcactcagttaagggataaggcttcctggggactaagctgtcctattaagaaaaactgttaagacgcataaaatttgattatatctgtggtagtcaatactggtgttttttaaatactcttgtctctctacattcctggactcctgtggataggtgaatcctgtggcttatttagcccagtgagttgttagccaaatgggaatgtgttttaaggccagtatgtgcaattgtcaatgcaaatgcctatagagatttccctttggaaatgtgttttgtgaaggctgcttcttgagcctggatccctgaatgtctgcatggagcaactgtaccgtctgctcattagcagtggccatatgagaggataagatatatacacacacacacacacacacacacayacacacatctatatacacacacaagcaaaataaatatatatgctaaacattagcatagctaagtatgcctgaatagctaaccagcagttttgggagggggcctagacatagggctatctatttagagtagaatatgcaactgaagaagtagggaagctgtccgttctagtcatgagccaaggatttgggagaaccaatccccttctgcccatcactcatcctccacccttctcagtagactgttaccaaggaaatgaagagatgtggttctgggacacattcctaagaaatttgtcagagacactgcagaggtacaagaaattacatgggtggatataaaaatagcagaatccccagaaataaattccagaaagagactcactagaacagggcagacagggaacaagctacaactttacttgaggagagaaaacatttag

SEQ ID NO: 16676 - DNA, 1181 bp, Homo sapiens
tcattgccctcagaagaggcagaatatatattactataattttcaattatgcaacatgaaattgaaatatttataagcaatcataattaaactaagggcccaacataactttttaaactacattaaaaacaaaaaaacctcatgtctataaataatccctttcatccccttccctcaaaaaaagacataaaatgaacacagcatgcctcaaacattttgcacctcttaaatttcacaaagtcctggttaatccatattccagcacagatttccaaagaatcacctaaatttggagacaactcaggatttggaagaagataagtagtaaagatacggatgtgtctcactcagttaagggataaggcttcctggggactaagctgtcctattaagaaaaactgttaagacgcataaaatttgattatatctgtggtagtcaatactggtgttttttaaatactcttgtctctctacattcctggactcctgtggataggtgaatcctgtggcttatttagcccagtgagttgttagccaaatgggaatgtgttttaaggccagtatgtgcaattgtcaatgcaaatgcctatagagatttccctttggaaatgtgttttgtgaaggctgcttcttgagcctggatccctgaatgtctgcatggagcaactgtaccgtctgctcattagcagtggccatatgagaggataagatatatacacacacacacacacacacacacatacacacatctatatacacacacaagcaaaataaatatatatgctaaacattagcatagctaagtatgcctgaatagctaaccagcagttttgggagggggcctagacatagggctatctattyagagtagaatatgcaactgaagaagtagggaagctgtccgttctagtcatgagccaaggatttgggagaaccaatccccttctgcccatcactcatcctccacccttctcagtagactgttaccaaggaaatgaagagatgtggttctgggacacattcctaagaaatttgtcagagacactgcagaggtacaagaaattacatgggtggatataaaaatagcagaatccccagaaataaattccagaaagagactcactagaacagggcagacagggaacaagctacaactttacttgaggagagaaaacatttag

SEQ ID NO: 16677 - DNA, 556 bp, Homo sapiens
gaaatgaaaggaatctgcacaaataatctatacataaacattctataagacctgcatgtttgcagccatgacgcagaggtgcaaggtactaaagcaagggcttaattcacataaaacatgtacttagcacagcgggctgagcgtggtgaggaggaaaccaacactgtcccttacacaaggtagaagtttgtctctcctccatgaaagtccaaaggcaggcggtatttagaaaggaggcaaatgggttattgaataattattactatttaaaatggttactattataatcatgcaagtatacatatattcataaactttagctgctgtactttttggatgtcttccaaatattatttgtacaaataaagaagaaaaaaatagaaaagaaaaggccttagtgacaacgtatgtttggaaatgctcaccctggaagccaggcactgagttccacacagggccctctggatttttctccagcctatgcagtttctgtccctttcactcacctaygccactcagagctgcgtgggtcctacaaacaagctgacgttgctga

SEQ ID NO: 16678 - DNA, 554 bp, Homo sapiens
tgagaagtaattaaaacaacataatacattcagaggcagcatgttactaagaaagtatcattggaaaagcagatattttctttgaaaatcgtttatgtaactgctttagcaagagagcttgtatctgtcaggacaatctagaatatgctgataaaaaacaacctaaaaatctcaacaaaggtttatttcacgtcccatgtctatcagggaaaactggggccctgctgcattgctgttctcagtcttggaaacagactgacagactatccactaactaaaactgtcactgtggcagagagaaagagaagatagtgaatttatactgtccataaagctccaccaggaagtgatacacactggcaaargcaagtcacatggtgacatctcacttcaataccactgggcgttgcaacttaacaactatttgggaagagaggcagaaatacttggtgtataatgttgatgactaacacaagaggattaagaaatcatacttgagcggcaaaatgtactgccatacccatatggttagtagattataggctatattatgt

SEQ ID NO: 16679 - DNA, 528 bp, Homo sapiens
aattttctgaagatatattcttggtctgtatttttccttcacatcacttaccaatgctgatgacttcatattttcattataacttggttaatatatatctaccatattttatgaagtcatgtgcaaatctttttttctgttcactaccgtgtcaagactagtagtgttgaaataaagaaaggaagaaagacatgaaaatcaggccagctaccagctatgtatgtacattcacaaggaatcaattccatgattttggagggattttagctacacatatgaaattagaagccaaaggmtttcatgcagatattaatattagcacattaagttaagaagtgatgattagcaaaataatttgctaatcattttcttacacagattttatttaagttgaaagttttccctgttgacaaaagtatatattaaaagtaaaaagaaaatttcaagggaaaaacccttggaaaaaaatagggtttagcaatgaattttagagcacttaatttctgctaagcaaatacaaagaaaaag

SEQ ID NO: 16680 - DNA, 526 bp, Homo sapiens
tatttatgttatgtgctatggaccatgctacatactttaatgtattctattgctttttgtcctcaaaaataacatattttaatttcgcagattcattatatgttaattaacacaccaaaatcacaactctaataagcaatataacaaaaataagcacaatatttgtctccctttaaggattaaactattcaaaacatgtgtgccccttagaatgctacaatctaaaatagatgatgtgtgttgtacaaaccttcttaacataagaagaaaattcmgatatttcacttctcttattcataaactatgagtatttttctcaacttctaagagaataaatattgcttattgccaaagagtttgaaggggtcaacagatatgacaatctcatatatttgcaagagtgtattaagaatctaaacagtttagtgaatttctgagtttgataggctcttgcaggtaataagaaagagatatggccagtgtggtggctcacacctgtaatccctgtattttgggaggccgaggc

SEQ ID NO: 16681 - DNA, 628 bp, Homo sapiens
tgagatgaagctgtcaattcaaaatctattctatagtcatagatattttcaatgtttgcctaaaaattgtcttcatataattctttattcattcatatttgaaaaacaactattaataaatattactttgccatacttaagaaagtagtcatttctttggtttctgtcaatatctgtaacactaaaataagctcacctttttggatgaaataattttattaatcattttattttttctgtgtccaaatataatttttatcattttatttcatagcaagtttactaaagattctgtcaatattacagattttctagtttgtatgttttaaagtgacactatatgtatgtattctaatgatttttgcatttgttccttattggggaaaacttattcagataattgaatttttttacacttcattccaaatattttgatagattttccttagtattttgggtacttgaaaattktacttgagatggattcgtttaatttgtgtttctaaatacatgattcaaaacagaatgcagtaaatcacattgctagatcataaaagtaagaagcataaaatatttcgatacattttaatgacattttagttttatttgtagatgatagctataaaaa

SEQ ID NO: 16682 - DNA, 523 bp, Homo sapiens
gctttatgtacacctggattctagtgtcctcctggggccttatgcctaccaggagtctggtgtacccctggggtctagtatccacctggagtctgggygtccacctggagcctaatgttgaggttagactgagtgtcagcctgaggcctgatgtctactagggcataggtattcacctggggcttgttgtttacctggggactaatgtcaaccttgagcctaggtatccacctggggaatagtgtccagttgcagccagatgtccacctatggcctgaagcatggttgttatcctaaggccttgtattagtccattttcacagttataaaaaactacctgatattaggcaacttatgaggaaaagaggtttaactgacccacagttcttcaggcttaatagggagcatgactgggcgggctcaggacacttacaatcatgatgtaaagccaagaggaagtaagccctttttaccatgtgggtaggaggagggagacagaatggggatgtgctacacactttca

SEQ ID NO: 16683 - DNA, 617 bp, Homo sapiens
cctaaaagttgtagtaatctgggtagaagcttaaagtgayctatcctgtcatatagttgtcattaactaggatattaattattcttaaaaggatgcaaaatttttccaagggatgtgcatctgcagacagttttaagggactattgtcaagaactgtgaaggatctgagcttacaagttagcctgcttcagttttatggatgttggcagaagacacataactgtttggtcagagacagaaagacttccattatttgcagtacagcacagagttgcacgagcttcatctttgctctggttcctgttttccctcaagtttactggagatgatgacaaggagttcaagttgatgctacacacagtttgtgtcacagatgaagaactccaagtaaaggaaacttaaatctttaataaatgagcagtaagcacacttgtctgatgttttctgtggaggaaacactatcttcattttacttgaaaataaacaaatctgttctctcatccataaataaacaatatcttgatcttccagggctatccactatataaagatctttaaaaaggaaaacctgtaataaatgtgaaactagtgcctttctatttgcaagatgcacagaa

SEQ ID NO: 16684 - DNA, 966 bp, Homo sapiens
gaaaattatgtatcattcagtttaggtgtaaacatccatctgtccctattatgttataacagtttattattcaaatgcatactgtgaaagaagaacatcaaactgataagtagttagtttaatttttaacaaacaccaaagattaaaagataaacattttagtcttggataagtcatctgtatttgattaaactaaaaaattaaagtgaagaaacttacaagaataagctttgttaaacgttctcatttgtaataaggaatcmccagtgtgccaaacaaatgtttattttacatttaattacttgctaccagtaataaataacaattaaaatttccaaatattttgaacattataaaatttttacatgcatataatattgaaagacatcaatatttatattattcaaaaggaatgataacttctttatgtcaagagaagccatttctgaattaatttagtgaatttaataatttagtttctcaaaattaaattaatggctttgattcatctgtctgttctagattgcattaatcattttattttttacttttaaaatttacattgaaatttaacacaattttctgcaagatctatgagtttttgttgctgttaagcttatgattatatgcccttaattaaaaagacactgacctttctaatcccttgtaattaaaaatgtctcaagatttcagtaactctgtgttcaaaatattaagcatctttgctttttgtttttgtatataatctaatcattcttgatttttttgtcaattcttttgtaatagttctcaaaatgtttacttttttaaaattgtcataatcactagttcaaggccatgtcaccagacacttgtgcaattgctaaaattcttcataggctctactttcctgaagtgccctcttcttccaatacaaattacatagtcctaagagattaaatccttaaaaattcctaacaactctct

SEQ ID NO: 16685 - DNA, 518 bp, Homo sapiens
ggcggccaggcagagacgctcctcacttcctagatgtgacggcggccgggcggagacgctcctcactttccagactgggcagccaggcagaggggctcctcacatcccagacgatgggcggccaggcagagacactcctcacttcccagacggggtggcggccgggcagaggctgcaatctcggcactttgggaggccaaggcaggcggctgctccttgccctcgggccccgcggggcccttccgctcctccagccgctgcctcccgggcggcgctcgccggcgcggcrgcaaagactgagacagctccgctgcccgctgaactccatcctcccggcggtcgggcggcggcggctgcggtcagtcgcggcagcggctccgcttcatatctgcagctggggcccgcgggcgtcagcgccgcgactgtcccggctccgcactgccccgggccgcagcgcagcggcgccaaccaccacccgcggccaccatggccggcaattttttttttttttttttttt

SEQ ID NO: 16686 - DNA, 506 bp, Homo sapiens
ggaggatgacaacacatcttggagagatattggtctgcatcctgcctcgtctacatgcaggcagcagtgagagtaatgagtcactgctgctgtgctctccaccccagaccatggctcacactcagtggcctgagcagcccaggaggctgaggacagccaggtggaccagcagccaaagaggctgcagggagccagcagatgtgaatggctttgtgttcccactgggccggaccttggccactctctggaattcactttaaaactttggtggaaaagtatcaactttgtcaaccactatggacttaagcaagggcctgcaggtggctccaaaatggagggatgggggctagttagagctttggagaaaaggaaattataatgaggacaatcataagaacagccaaacacttggtcagctctgcatcagcctttcaggggctctattacctctgaggctctctgcagccgcaagcgcaagccaagtcttgctcaccycactttacagc

SEQ ID NO: 16687 - DNA, 589 bp, Homo sapiens
  misc_feature (1)...(589): n = A,T,C or G
gtgmtgnnnnnnnnnnnnnnnnnnnnnnnnnnnnnnnnnnnnnnnnnnnnnnnnnnnnnnnnnnnnnnnnnnnnnnnnnnnnnnnnnnnnnnnnnnnnnnnnnnnnacaattaatattaataatgctagagaccaaaaagctcttcatcttttaaatgggtataaatatttaaacctaggttaaaagagtatattttagattggctttggtttaattggctatagtattcctcctttatgtttctgtaagatttaataccaaattgaaatcaagatagtgataaacaatcctttattattaaaaattacatagtatgtcttcaaacttgtgctgaggctcaacaaatgacaagaagctttacgatgtaattcctctttccatggaaacatgtgactttatttcatatgtatttttggaacatcaccactgtttgtgtacttcatcagcaacattccaataatgcattaaattatagaatttctgttttaccattatttttggcaggattagaattaaataataaaatagtataaatgttctatatatgggagttacttcaacaaccaattttacagattgtaaaaaatt

SEQ ID NO: 16688 - DNA, 313 bp, Homo sapiens
tgaaaagttacaaaaaaagttatgaaaaagaagttacgggattttaaaaaaagtcatgggataaaaacaaaaattaaaagcaggcctctgtcagcaaagcctggagaagtagggctggagcctccactgccaccatgaccctaccaccccttcccaggcacccctttacaattasggtagccacacaagacctctgtctaatggggaaagacagaccctttgccgccttgaccagggctgagtccttaaatttctggatgatgatgattgttatttaagagccagaggctggcagaggtggtttgtttggagg

SEQ ID NO: 16689 - DNA, 538 bp, Homo sapiens
tggcctatggaaagttcatttgtacccttttcttcttgggcagtgtaaagagctcttaggattagacaagctgctacagggaagaaatcatgtcttatttataccagtacttagaaccatggctgctcagtatctccagaaataaatatttttctatttggtttcactttctgtatgagggaagtactcacagtgaagttcagatgaacagtatttcctgtgaccagtaaaaatatcacgaaagcccttcaattttaataaggacatttaaaagcctttcttttaggattatgtgattaaatctaaaccataaagacccaayctatacttctggtctagaaaaataaaattagtacaacttctgagttctagcatgttttagactaatggatcttactgcagtaaaacagaaaaaaatactcagaattattaaaaaatacggtgagagtaatttttgtgcacaaaatgaacaattaaaaactgattatacaaatttaaaaaaaaattgaaaggtggcactgaaagtttcctgcctgaa

SEQ ID NO: 16690 - DNA, 529 bp, Homo sapiens
cttgtctaattcatttttgtatttgccctcattttcattcttgtcctcacccccagttatcccagtcccttgtacatagtaggttcttcataaacatttggtgaacaaatatgtctggcagagaaattttcttaaaaagcagctaagatctaaaagactctctgtgtttggtccctaagatagcagctgtttctatctggctccgtttttcttcactgttgagattctgtttgttaytttatgcttttgtggttttcctccttcattcctccaggtttgcttttttagaaatttatttcttgtggagtcttttgtcattgccatattctttttaaaacgtgtactgtttttgtttgttttctcttttcttttctggttatttctcattgtagaaattaccaggtgataagatcccttgtctccaaagtgaatttttgtgttttcttttcctggatagttcttactgatactcaccactctcaggagttgttgttccctgccagatacattgtttttcttttttaaattt

SEQ ID NO: 16691 - DNA, 1031 bp, Homo sapiens
atgatgaacactgttctcccctcccttcaaaactggtgaaatgcttcgaattaaacagattattcataatatataaaaactgccacttttcaagtcagatcattttggaagaatgtcaaaagagaggggtaagacagagattaaaatcactttcaggatggctgtacattttcagggctttaaaggtttactgtgtggccagcctggaggctgtaatgtctcttgtgtgattgaggagctgagaggtgattaaaggacttaagccaaaagggctgcctcccagtgtgttcgaagaagaaaaataccattaatcataataatgatgtgtgtttatagaaggcctttcatctgtgcctctcaaagtgctttaaccaccattaattatacctcccagtgcacctctgaggtagataaaaattattatacccattttacaagtgaataaaggcctacagggcgagtaggagtgaattatttggggtcacacataaaccagtggcaaaggaagcaattcctgtcccgggtcaggactgagattaccctattcttgggtgccctcctctctgaaggatcgggctttgagagagaaccaaagatgcttttgtgatgccacctctaagggctaatggaattgatcactcttagcccaggctcttaaaaacagaaagtggcctgttgagagagagcatgaaggcaggatmttctcattaattggggcattgccccttaggattcatgtggccagtgatcaacaggacgtttcggacccgtctgccccagctgcctgggacgtatgacccagctgcctgggtctctccaaggtgttcatttcaggagagtcactgacatggttcccaaagtcagtctgagcaaacagattacctgcacagcagctcctccctgtgatgagcatgcacatctctctgtggctccccctttgctcttgccttttgttcctgtcactcacaccacaggagcacctagcagaggcactaagcttgtcttggaagcttcgggagaagagcatgagt

SEQ ID NO: 16692 - DNA, 576 bp, Homo sapiens
agccttcccaatatccatgtcctcttgtgtaaaatggaaatgtaaaagaagattggccccataaggcttctgtgaggatcaaagagcctaagaatggaggtaaatggctatacacatggagcagcacctgaatagagacatgatcattgtgttttttttctatgagaaaaggcttgagataacactcacagttcctgatgaggcttccttggcaaccagatatatttactgggaaaatcgakgtactcagatttccagtggccacaaaccagaacaaagcaaggtggtgccccaggccttgttcccttggcctggggcccagacccaaggtcatgcacagctgacagaagaacgagaggcttcagggacccaggctcatctcctgacatgctcaactcactctcacagttgatgtttttggaagtttgctgctcagcactgttgtcaaatacttagcagcccaacttggggcaagacagcagctggctcaccctacctgtggacagaggcagagcgggttctggagtgggcagggggatttgtcagcatctggattgtgactggtccagcatgccc

SEQ ID NO: 16693 - DNA, 602 bp, Homo sapiens
ggcaactgaggtgagacccccatgtcaggtgctagcactgccccagatgctgagtgacacacaagccaactgccagagccacaagcgtgggcccctcccctctgggtgcccccccacagacacaagcagcctcagaaggaaccagctcgctccaattcggggatggcaaggagccagccacatgctgtaggaagcttgggccctgggggtctctgtcccagcaccaccactccagcacagacagccaagtgctcaccaagcactgagcccacccgggcctgccacaggtactgtcggcccatgtcatagatgggaaaaccgaggttcacagaggcaaggccaggcagagggactgcagcacaggacagccaggcttggaaggctgggctaagtttagcgggagggcagragacccctctctcctccctaaccctctcatgggggctggtgcagagcctagacccagccccttaatccgaaggagggtctccttcctcaccagcaccagcaccttgggcagcccctcctggtaggtgggccccagagcccagcaggtgcctgcagctctggcccagcatcttgcagaggagagacgccccttg

SEQ ID NO: 16694 - DNA, 1178 bp, Homo sapiens
ccccaggacaccgtcgaatgaaacggatggaatttagaatcttccaattcaaagtactccttgaatacagactccccagtgtcttctatcgattcagctgtcctttcacctgatactgtcccactgggaacaggaacttccatatgatctaaacaggttcaacataaaccaaaaactggtcgaagtttattaggaggaccagcagctgttagtccattaaccccaagtgttggcattttgccattagaaaccccaagtcccggagacggaccctattgacaaaactgcactggtatgagacaccgtctgtcattgacgtgccatccaccggagccccttcaaaaaagcctgttgccagaatcggccaaaccggaacaccgtctgtcttctcgcagaggggaaagagccgaaaggtaactccagtccttgcaaaaacacaaagttctggtccgccgacaagggcaacacctcaggtattgagccccactatggcatctcccccaaatgcaccgcctcgaagaaattcacgactcttgactagtgacagctccacaaccgaggagaataggagaaaattaaaaatgaagtttccacctaaaatcccaaacagaagaaccaaaagtaaaactaataaaggagcaataactccaccgaacataagtgatagcctggaagtgacaaaattggactcttccgtcatttcagaagggaaaatagccgcaatcgcgcctcagattcaggcttttaatctacaaaaagcagcagcggaaggcttgmtgagccttcttcgtgaaagggggaaaggttatttagctttgtgttcttaccacggcaaagaagctatcagcatcttgagccatctagcttctcaccactgcaataccggttgggtactgtgccaaatcggaagggcctattgtaaactttcagagtccacgcaagctgaaagacaattctcagaggttaggaggattgagaattacagagtcgaaggcatggagatctactctacaacactttggcatcctccgaaagaggttgctctttcagttctgtccaaagacttcacagacatggataaaaattcggccagccagaggcctggtgtgctgcagggaactgtttcggtctgcaacgggaacacgatattgcgattcaattcttccagagaactctcg

SEQ ID NO: 16695 - DNA, 538 bp, Homo sapiens
aatatgctggactgtatgctgggcctttacatatgtcaagtaatttaatgcccacaacaatcctgttttagcctctggactgcacatgtgtatctgagtatttactcaaaatacacacggaactgtcatggtgtgtggtaatattcatgttatttacctgccattaagactagccttcagagccaagctacaaagttaaagcttatctgtaggctatttgagaacatgtgatgtgccaagcacttttctagatgcttttcaaaattatttgtctcaacaaacctgctttgaataaacagacgacagctgacccttgaaccatgctggggtaggggtgccggccctcatgccgtcaaaaatttatgtacaacttttgacttcctaaaaatttatctactaacagcctaytggatgccttactgataacatcagtttgactggatgccttactgataacatcaatagtcgaataacatgtaatttttatgttatatatcttatatactatattcttacaataaagtaagctagagaaagg

SEQ ID NO: 16696 - DNA, 940 bp, Homo sapiens
cgtggtttcaccatgttggccaggctggtctccaactcctgacttcaaatgatccgctcacctcgacctcccaaaatgttgggactgcaggcgtaagccaccacgcccggcctggagcattttgatataatgaattactggggaaaccttttaatataatattagacagcccatttaaaaagaatccagtataattattatattctttatatgactacatttcacagtgaagtaacttagcactctgtatttataatgctttgaaaatacatattarttgctgattttatattccaaacagaaattataggacaccatattatataaacacaagaattcaatattaattttcacactttaaaacaataatcttggccctgagcagtggcttgagcctgtattcccagcactttggaaggtcgaggcaggcggatcacaaggtcagaagattgagaccatcctggctaacacggtgaaaccccgtctctaataaaaatacaaaaaaaaaaaaaagtagccgggcgtagtcgcaggcgcctgtagtcccgctactcgagacgctgaggcaggagaatggcattaacccaggaggctgagctcgcagtgagccgagatggcgccactgcactccagcctggatgacacagcgagactccgtctcaaaaaaaaaaaaaaatcttttcaatttttaaaattgttctcaaactactcatcagagaaatttaacatctccatttacgtttctatgatgttatacagaaatattttatttctttccccagaataatataggcaaaatctctccttctgactatacacacctggtattgttattttatttaagggtttctatctcttcctattctgaatgattactgtctttttgagctttcttgcagtaaccactttaaatagtctctagacaactttctagattcta

SEQ ID NO: 16697 - DNA, 1178 bp, Homo sapiens
tggccacatctattatcttttactatgactagtcatcattccatgcatttgaacattacctcacccatttgcagcctcctatctctgcaattaattatggctaacattctcagcagtccaaacatcttgcaagtgacagcttgaaaaggcctaccagaatgatgttcactctgccacctgactagcttgtcttccatctagacattgcagtatgtagaagagtgcttttagtattataaatttgatccaacacgtgttcaattagatgaaatcttaaatattgcactacatgtgaattgggaaaatgttaatttgcttctgtagttttaagtgtattctcagaggcagatgaagacatattacatcaytgagttcaagaaataaagtaaatagaagaaaaaaggtgttattttagtttggttatgtttatatttgaagttttcttttccagatttaggagaacctactaaatacactgaaaaaaatgtggtagccctaggttaaatatcataccttattttttgtttattaattccagggtagagtagaaaaatatgctctcatataatataaaaatgatatggggaaaagaagtaaaaaattaacttagagacaccattaattaatttcttttataaatgaaacactagatagtttctatttgttttgacaaatagataatatatttagaatcaatgctttatttcttggaaagtggagtgaaaaatttaaatgtagtattcagattgtattataactgtgcactacagatcacatacatttgtcttttctttgtattagacattatttaatggtaagcatcctttcaagggctattttatataagtagtaaggtatctggaatttctgaaataataaaagtgacctaaatcactgtgtttggtaaattcacaatacccaaatagcaggaggggagtgctagaggtagggaggagaatgctcatgttctcattattcccaaacagattcttaaagtcttctcactggacacatggatgcacctctgtaatacccaatgtcttagccacaactgtctgcactttttaatgagatacatttcaacattattccttgtcacctcaatatcagatactttctcatgtaatcttttacttctgaggagttgaattcttgatccataaactgaatccatagct

SEQ ID NO: 16698 - DNA, 1178 bp, Homo sapiens
tggccacatctattatcttttactatgactagtcatcattccatgcatttgaacattacctcacccatttgcagcctcctatctctgcaattaattatggctaacattctcagcagtccaaacatcttgcaagtgacagcttgaaaaggcctaccagaatgatgttcactctgccacctgactagcttgtcttccatctagacattgcagtatgtagaagagtgcttttagtattataaatttgatccaacacgtgttcaattagatgaaatcttaaatattgcactacatgtgaattgggaaaatgttaatttgcttctgtagttttaagtgtattctcagaggcagatgaagacatattacatcactgagttcaagaaataaagtaaatagaagaaaaaaggtgttattttagtttggttrtgtttatatttgaagttttcttttccagatttaggagaacctactaaatacactgaaaaaaatgtggtagccctaggttaaatatcataccttattttttgtttattaattccagggtagagtagaaaaatatgctctcatataatataaaaatgatatggggaaaagaagtaaaaaattaacttagagacaccattaattaatttcttttataaatgaaacactagatagtttctatttgttttgacaaatagataatatatttagaatcaatgctttatttcttggaaagtggagtgaaaaatttaaatgtagtattcagattgtattataactgtgcactacagatcacatacatttgtcttttctttgtattagacattatttaatggtaagcatcctttcaagggctattttatataagtagtaaggtatctggaatttctgaaataataaaagtgacctaaatcactgtgtttggtaaattcacaatacccaaatagcaggaggggagtgctagaggtagggaggagaatgctcatgttctcattattcccaaacagattcttaaagtcttctcactggacacatggatgcacctctgtaatacccaatgtcttagccacaactgtctgcactttttaatgagatacatttcaacattattccttgtcacctcaatatcagatactttctcatgtaatcttttacttctgaggagttgaattcttgatccataaactgaatccatagct

SEQ ID NO: 16699 - DNA, 1178 bp, Homo sapiens
tggccacatctattatcttttactatgactagtcatcattccatgcatttgaacattacctcacccatttgcagcctcctatctctgcaattaattatggctaacattctcagcagtccaaacatcttgcaagtgacagcttgaaaaggcctaccagaatgatgttcactctgccacctgactagcttgtcttccatctagacattgcagtatgtagaagagtgcttttagtattataaatttgatccaacacgtgttcaattagatgaaatcttaaatattgcactacatgtgaattgggaaaatgttaatttgcttctgtagttttaagtgtattctcagaggcagatgaagacatattacatcactgagttcaagaaataaagtaaatagaagaaaaaaggtgttattttagtttggttatgtttatatttgaagttttcttttccagatttaggagaacctactaaatacactgaaaaaaatgtggtagccctrggttaaatatcataccttattttttgtttattaattccagggtagagtagaaaaatatgctctcatataatataaaaatgatatggggaaaagaagtaaaaaattaacttagagacaccattaattaatttcttttataaatgaaacactagatagtttctatttgttttgacaaatagataatatatttagaatcaatgctttatttcttggaaagtggagtgaaaaatttaaatgtagtattcagattgtattataactgtgcactacagatcacatacatttgtcttttctttgtattagacattatttaatggtaagcatcctttcaagggctattttatataagtagtaaggtatctggaatttctgaaataataaaagtgacctaaatcactgtgtttggtaaattcacaatacccaaatagcaggaggggagtgctagaggtagggaggagaatgctcatgttctcattattcccaaacagattcttaaagtcttctcactggacacatggatgcacctctgtaatacccaatgtcttagccacaactgtctgcactttttaatgagatacatttcaacattattccttgtcacctcaatatcagatactttctcatgtaatcttttacttctgaggagttgaattcttgatccataaactgaatccatagct

SEQ ID NO: 16700 - DNA, 1178 bp, Homo sapiens
tggccacatctattatcttttactatgactagtcatcattccatgcatttgaacattacctcacccatttgcagcctcctatctctgcaattaattatggctaacattctcagcagtccaaacatcttgcaagtgacagcttgaaaaggcctaccagaatgatgttcactctgccacctgactagcttgtcttccatctagacattgcagtatgtagaagagtgcttttagtattataaatttgatccaacacgtgttcaattagatgaaatcttaaatattgcactacatgtgaattgggaaaatgttaatttgcttctgtagttttaagtgtattctcagaggcagatgaagacatattacatcactgagttcaagaaataaagtaaatagaagaaaaaaggtgttattttagtttggttatgtttatatttgaagttttcttttccagatttaggagaacctactaaatacactgaaaaaaatgtggtagccctaggttaaatatcataccttattttttgtttattaattccagggtagagtagaaaaatatgctctcatataatataaaaatgatatggggaaaagaartaaaaaattaacttagagacaccattaattaatttcttttataaatgaaacactagatagtttctatttgttttgacaaatagataatatatttagaatcaatgctttatttcttggaaagtggagtgaaaaatttaaatgtagtattcagattgtattataactgtgcactacagatcacatacatttgtcttttctttgtattagacattatttaatggtaagcatcctttcaagggctattttatataagtagtaaggtatctggaatttctgaaataataaaagtgacctaaatcactgtgtttggtaaattcacaatacccaaatagcaggaggggagtgctagaggtagggaggagaatgctcatgttctcattattcccaaacagattcttaaagtcttctcactggacacatggatgcacctctgtaatacccaatgtcttagccacaactgtctgcactttttaatgagatacatttcaacattattccttgtcacctcaatatcagatactttctcatgtaatcttttacttctgaggagttgaattcttgatccataaactgaatccatagct

SEQ ID NO: 16701 - DNA, 573 bp, Homo sapiens
ctcaaatacttttggaaaacccaaggtttactatcttaaggtaaggggagaagtttgcctttaaaatatttgtatgtgtttttgataattattgaaataattgtcaaaagtaaatctattctaaattgtttgcattgtgctctagtgtgcataaaaattgaataacgtgtattaatcctaactttttatttttaatctatttgcatccattaatagtctcatttttttaaccacggggagtatagaacataatataggtactctaacctgagagtaacaaatgaattttaaaaattattaaaacgattagttatttcagctattttctttctaaatacgttaaatcatttattttctgagattttaaaaaatgtatcaagcccattatactcttctacataataacatattttttattatttctaaatctacatacaaattttatacaattggataaaaaaacaagaaacaaaaaaaggtttgaaaaggaaatataggygtttcatttcgcttaaaacatttcaaattaaattttctaattttccactatatattgtggcatttacaactaca

SEQ ID NO: 16702 - DNA, 569 bp, Homo sapiens
taaagaaggtgcaggtcagaaaggatagagtctttgacttattgtcaatgaagacataatttaaagcctgattstacaggtatttactgagcttggcatgtgccaggcaatatgctcagggctggaaacactcgggaaaataaaatactgaaaatgtcacagctgtacattcttgtggggaagacagacctcaaacaagtcaacatatacacagcaactgaaagaaagagttagccagggatgataataataataataataataataataataatagaataaagacctttgctaggttaaaggtcagaaaggcccaggctgatcacaaagatacctgaggcaagagggaaagagaaaagatttcagatcggaaggttcccttttgcctttaattggacaagattcattggagaatgccagaaatctgtaggccccaacattttaggcatagacaaaaatgtcttttctatattatgcgaaagatatgggcatcacagggacacacagtcatgtggacctgattcactgctcctttgctgctactaaatctcaaacacttagcctgcaat

SEQ ID NO: 16703 - DNA, 569 bp, Homo sapiens
taaagaaggtgcaggtcagaaaggatagagtctttgacttattgtcaatgaagacataatttaaagcctgattctacaggtatttactgagcttggcatgtgccaggcaatatgctcagggctggaaacactcgggaaaataaaatactgaaaatgtcacagctgtacattcttgtggggaagacagacctcaaacaagtcaacatatacacagcaactgaaagaaagagttagccagggatgataataataataataataataataataataatagaataaagacctttgctaggttaaaggtcagaaaggcccaggctgrtcacaaagatacctgaggcaagagggaaagagaaaagatttcagatcggaaggttcccttttgcctttaattggacaagattcattggagaatgccagaaatctgtaggccccaacattttaggcatagacaaaaatgtcttttctatattatgcgaaagatatgggcatcacagggacacacagtcatgtggacctgattcactgctcctttgctgctactaaatctcaaacacttagcctgcaat

SEQ ID NO: 16704 - DNA, 523 bp, Homo sapiens
tttgagatggagtctcactctctagcccaggctgaagtgcggtggcacgatcttggctcgctgcaacctccaccttccaggctcaagcaatcctcccacctcagtctccagaggagttgggactacgggcatgggccaccatkcctggctaatttttgtattttttgtagagtcagggttttgccatgttggctaggctggttttgcactcctgagctcaggcaatcctcccgcctcagcctcccaaagtgctgggattacaggcatgagccaccatgcatggccccattacaacaaatttataaggcattgcttgtatttcagtttcatctgacaaatgaggaaatagaagccaaggacattgaaagatttccctaagtcataaccctaataaccctaattctaattcagtcagtatttgtgggttacgtatgtgcatgataggcactgaagataagagcactcggacgcttggccgcagaacacacctgggcagtgaggagaaggcaggcacagccgaact

SEQ ID NO: 16705 - DNA, 523 bp, Homo sapiens
tttgagatggagtctcactctctagcccaggctgaagtgcggtggcacgatcttggctcgctgcaacctccaccttccaggctcaagcaatcctcccacctcagtctccagaggagttgggactacgggcatgggccaccattcctggctaatttttgtattttttgtagagtcagggttttgccatgttggctaggctggttttgcactcctgagctcaggcaatcctcccgcctcagcctcccaaagtgctgggattacaggcatgagccaccatgcatggccccattacaacaaatttataaggcattgcttgtatttcagtttcatctgacaaatgaggaratagaagccaaggacattgaaagatttccctaagtcataaccctaataaccctaattctaattcagtcagtatttgtgggttacgtatgtgcatgataggcactgaagataagagcactcggacgcttggccgcagaacacacctgggcagtgaggagaaggcaggcacagccgaact

SEQ ID NO: 16706 - DNA, 830 bp, Homo sapiens
cagagccttctccacctgctcccatcaggaactggctttgaatgtggtgatgtgaggccttacacacaggtccctcgcatggagctggctggtgaaggctgcaggtgamggcggctggccccggtgtgactgcattgccgtccagcacatctgagggtcctgctcctcaggcttagaaatcttggcatcgccttgactttgtgatcagtttagattctgagctcagccacgtggcgctgacctgcagcatctatgtctatgcagaacttggcagggacagaatttccgtgaaagtcagcatagcacagggtgattaaaagtgtgggtgctagaatctaactgctaagttcaaatctcggctctagcccttactagctgtgtagccaaggacaagttactcaacctttctgcactcacatctctcatctgtacgacagggtaatgacggtgcctcccgcaggatttttgtgggcgttgaaggagttactatgtgtaaaatccttagacaagtacctggctcatggtgactgctcagttagtggcagctgctactatcaatgttgatattgttatttttattctataccatggacctgcctattaattttcacaatcctgagaggtggagaagcttgttcccccaggaggataccagtgggatggagaagtgtcgttcactcattcctgtcccctggccaggtataaagaaggccttgctaatacaagagagatcctggtggacctgggtctggaaccgtctgaggctgactgcattgccgtccagcatgtctgtaccatcgtctccttccgctcggccaatctctgtgcag

SEQ ID NO: 16707 - DNA, 525 bp, Homo sapiens
gattcaagaagatcttagcaaagcccaagcaagataaatttaaaaaaagaaaaaaaaagaacacatgcactaaaacaaaaacacatccaagcacattatagttaaatgactgttggaaactaaagagaaagagaaacccttacaaacagctagaaaggggaaaaaaaaaaaaacttgcagaaaaacagyaataagaattataactgacttcccaaaataaattatggaggccagaagaaaatgaaatgacattcttaaaatactggaggaaaaaagtaccaaactagaactgtgtattgtgtattcttaaaaaaggaagggtaaaaagacattttcagacaaacaaaagttgcgtgaatttactaccatcagtgctgtactacaaggaatgctaaaattgcttagatctgccatctaagatctgtctctaaataagtgccagctccattagaacattctgatcagagattaataacctgggcatcagagacccttcaggtagaaggtgatatccgtaagcttctg

SEQ ID NO: 16708 - DNA, 525 bp, Homo sapiens
gattcaagaagatcttagcaaagcccaagcaagataaatttaaaaaaagaaaaaaaaagaacacatgcactaaaacaaaaacacatccaagcacattatagttaaatgactgttggaaactaaagagaaagagaaacccttacaaacagctagaaaggggaaaaaaaaaaaaacttgcagaaaaacagtaataagaattataactgacttcccaaaataaattatggaggccagaagaaaatgaaatgacattcttaaaatactggaggaaaaaagtaccaaactagaactgtgtattgtgtattcttaaaaaaggaagggtaaaaagacattttcagacaaacaaaagttgcgtgaatttactaccatcagtgctgtactacaaggaatgctaaaattgcttagatctgccatctaagatctgtctctaaataagtgccagctccattagaacattctgatcagagattaataacctgrgcatcagagacccttcaggtagaaggtgatatccgtaagcttctg

SEQ ID NO: 16709 - DNA, 581 bp, Homo sapiens
cgccactgcacttcagcctgggcaacagagcgagactccatctcaaaaaaaaaaaaaaaaagacttcaaaattgtcattgttattaggttcctgctggatcttgctgmataatgcattaataaatacatgcatgtattaccatggtgccactttaacattttaataaatgtaattcatgccattaatttcccttataatcctgtgtattttatgcatttaaaaacattattctgagaaagaatacaaggtttcttgtattcttgattgtccaaggggtacatggtacatgcacacacacatacacgtgcacaaaggttgagagttcctgatctaaaggatacaggaaatggtcaggaacagtcgtcaccttgttcctgtttaccatgttgtattacagatatttatatatctttctttccttactagcctatgaattcttacagagcaggaatgatgtcttttatttcttttggtcttcagtgcatagaacagggcttggcattcattgaatcatcatttatagagtatcttctgtgtataaggatcgagccccattgggtgaggaagaagaatggagaga

SEQ ID NO: 16710 - DNA, 581 bp, Homo sapiens
cgccactgcacttcagcctgggcaacagagcgagactccatctcaaaaaaaaaaaaaaaaagacttcaaaattgtcattgttattaggttcctgctggatcttgctgaataatgcattaataaatacatgcatgtattaccatggtgccactttaacattttaataaatgtaattcaygccattaatttcccttataatcctgtgtattttatgcatttaaaaacattattctgagaaagaatacaaggtttcttgtattcttgattgtccaaggggtacatggtacatgcacacacacatacacgtgcacaaaggttgagagttcctgatctaaaggatacaggaaatggtcaggaacagtcgtcaccttgttcctgtttaccatgttgtattacagatatttatatatctttctttccttactagcctatgaattcttacagagcaggaatgatgtcttttatttcttttggtcttcagtgcatagaacagggcttggcattcattgaatcatcatttatagagtatcttctgtgtataaggatcgagccccattgggtgaggaagaagaatggagaga

SEQ ID NO: 16711 - DNA, 618 bp, Homo sapiens
tttttcaaattggttatgctacaaaaagtcttgagcaaaacggataggcatcctgtatatgacagttttaagccagcctattaaaagcattatatatctatttaaaattgaaaccagtaatatttataaaaattcattatcacagttacagcttcctaaactattgaacaatcctatcctcgacaataaatctaacaatgagaagagatttgagaayagagctattttaatcatgcaaacagcaagctcagtttctgtttcaaattctttattatacatcatggttgcacaatttgaggctggttaaatacaattggttttcaaaatctctttgaatattttctggcttactacatgcaaatgaccatgaaaatatttggcattttaaaattctgaaactctgaataggcacttacatgaaggaaaacattaccattcatagatatccacatgtagaacagatgctccagcacatggtggtacatggacccttttgccagtaaagttggttcctgaccattttatcaaagtgccatagtagtaaaacaggtttaaagaaatgtaatttgggttatttagcttactcataaagtaaggttaactgacaagacttgcact

SEQ ID NO: 16712 - DNA, 651 bp, Homo sapiens
catatgttaaaaacaaatgtagttctcaaaaatattgagatgccatgttttaaatctctgcaggacacaagaggccactcaggttttctaattttatttgaacacaaaatatttaattttttgcatgtagagaataagaggtaatcattagcctgaaaagagaggatttataatcaacattatgcagaaagaaagcaaaattacaaataccagcctactcacatgaaaatttttcatgtttacgctgatatatatctgagtgcttatcatcaaagtaggaagttaaaaaaaaaaaggcagcttaacaaagttccagtgtttcaaagaaarcacttttaaaaatgtatatacatgaacgaacatttcattatatcataaaataaatgctgcgctgtaagataaaggaagactaacatatatggagttttggcctttttccgccccctccagctgcaaccatctttaacctgctgaacttaatctcaagggttacaggagttttttgcttttctttttttctcctgttcagttcacatttcaggctgttcggcagatgcctgtgattctggagattcaaatcgctggtgaaagtttgttctctgtttcctcagtttttcaggagcttttctccataaaattatctcctagtaa

SEQ ID NO: 16713 - DNA, 484 bp, Homo sapiens
ctaggtggcaactgaatccctgccttgyctcctcccacctccttcccagaaaaagtggggagttcccttaggccccgcacccccaggatcagcacctatagggctaccattgcttcccatctagagccttctgtgatcccaaatggccccactcccgcacttgggggtgtgtccccccagctcaaggggcagctcaaccctggaggatggagcctcctgctcctccccacctctcagactcagggaagcaaatgaaggtgaaaataaaggcttcctgctggggtctgaggtctcttctccaggagctgcttcaccagctaaataccaccctctcgatgtttggtaatgacctttttaagtctccactttcctgccttggtatttagagagcaacctggtctctggggaggaaaggcaactgaattcttattcatggcacttcagaaggctggccccaaaaagagaaaagagaaaagcctcacct

SEQ ID NO: 16714 - DNA, 481 bp, Homo sapiens
ttactgtcttcccattgcccagaatcaagcccaagcccttgcgaaggacctccttccccattagttttctttaccaaacccttgggcctcagcagacaccatccctccccaaggcccatccccacttggaccctccagcctcacgtgtccatcggaagttactgaatgccctctcttctcctggatctctgaccctcactgggctgtctcctctctctggaacatcccacccccagtcatccttccagtcttagagcccagcctcatctccaggcaccctcatgcccaggctcacctctactcccaccagcctaggtgcccagccacagtgctttyggagcaccctgtgacctgctaactctgctcatccattatctctgtacacacattctcccacccggaatgaaagccctctgagacagtaaccagggggttcactctgtaaccccctgggcccaggacagcgcctgactatgtagtc

SEQ ID NO: 16715 - DNA, 955 bp, Homo sapiens
ccagcacttgataatatcacatttgtcaattcttcccaatctgatgagtataaaattgcgtatcattgttttcacttgcttcccctagctgttggtgcaactgagcatttttacacacaccttatggccatttggatttcttcttcaacgaatggtctgttggtatctgtgccaattctgggcctctttgtcctaacttccatccgggtccttcctggctctgctgtgttggagaaggacgtaggggggagtgtgttccctcaggcttctgtatcagcggcttccaggaggcaacacattggaaaacaagacaacaagtgtttgctatatatgttgcaaatatattctgtaagcatgccagttgtcttttatttatggcatttttataatataaaaacttttggccgggcgtgggggctcactcctgtaatcccagcactttgggaggccgaggtgggcggatcagctgaggtcgggagttccagaccagcctgaccaacatggagaaaccccgtctctactaaaaatataaaattagccaggcatggtggcacatgcctgtaatcccagctactcaggaggctgaggcaggagaatcgcttgaacccaggaggcggaggttacagtgagcagagattgtgccattgcactccagcctgggcaacagagtaagatcccatctcaaaaaaaaaaaaaaaaaactaccacttttaactttcatgccatacaagttatcaatcagtaatgtttagtaccttgtttgcaaagtcctgcatgcctctctgtaacatgagtttaacaatatttttctcagtatctttctcctattggttctaaatttcggggttttacacttagggctttaatcctttaattcatttggagtttattttcatgtgtagtatgaggcagaaatttagttttatttacccrtaaggaaagtcaatgattccag

SEQ ID NO: 16716 - DNA, 365 bp, Homo sapiens
tgtctcaaaaaaaataaaataaaataaaataaaatacaaaaagaaaaatatccagtggcttcccatgatgtcctaaatgatgagtaagctactcaaagtctagcttcattgcctttgtgagatagttttccttgctcagaaatgtttcccttttcaatctgatctcatctacccttcaaagcttagctcaggtaccccyacctctatgaagccttctgtcctacgttcttctatgcctaccttgtgctacagttagttgtacaaggactcttactgaaaactagcattacagctagtacaaaaaacacatgtcagaattactgaattttaggagctcacaattctctcagttgggatgggagaat

SEQ ID NO: 16717 - DNA, 1554 bp, Homo sapiens
tttaataaaaagatctagcttttctgatgctgaaagaaaaataaacttatctgggtgcaactgacactaggcaaacaggtgttttttgtttgtttgtttttcttaattattcttcctatctgttacatgcaaatgaaacaattggttattttacttccccaatttcctgattcacctgaggacagtgtctgttcattctctatcaataactgacatacacacacagtcacacacaaaggtttattcattcacattaaattatggcaggtgtgccagtcacagttttgcctccaagtttgcattataaaaatttaagctaagcccaaatgagcacctttgccttaaattcctcttgtagttttattgaaacagattgtcctatttgaattaaatcatgagaaagtccaactattctgtttctagccactttacatgagtattttaacagaaattccagtgaatagaatttttattatcaaaaattatgtcaaagtagagttgaacaattctaagcaaaaatcattcatattataatttggtaagagaaagacttccaaattcctcctatgaaatgacttgcttccacagattctaagtttcacatatacttttcattagttaccaagtggtaggaagaactaattccaagtgtacattgtgtaaagtgttaaattttgtgatagaaagagtaacagacggccataaaaaagcagccacgctatagtgcctcttccaagggactcacatggaattatatgaaatatatagttgcctctgtagtgctatgtacagaaataagtaagtctatccctatgaattgcttagtaaaatgatattttacatctatttcaaatgtttctaactctgtcagatctgacatattctaggtcatatcacttaaaagtttgtttaaaataaaacgcatattttgagaagtaaacagcattctagttggcttcccttcacagatgcaagaatttaaaaacaaccacaattcccaactggaattctgagaattccattcacttcgctaaaaaacaaaacaaaacaaaataaaaaagaatatataagaagaaattattctaaacagactactttattgaaaaaccacataaaaaattcaagtccaacaccagcaatgggcacacagaaatgtaaggcatattcatggttcgtgaatgtcaatcttaaggatgactgcatatatataatcatatttacaactccaaaacatacttattgtacaaaaataatatataacagcatcrtttagtaacttttctgtttcaagaaacaaaatactcttccctctaaaagaaatgtatggcttattcgctatctggtagctgagataactgaaagttcacacgtgttctttcttatagattgcattcttaatattacccaaacacacttaaaaataggagatatcaaatcagtaagagatatctaacaaatatttaacttgtttttgttttctttagagatctattgaatttttcttattacttctcataaatataaaataacttgtatttaaatttgaaacccaga

SEQ ID NO: 16718 - DNA, 676 bp, Homo sapiens
gtcaacccaactctcctctccgaaattcccagcagacacacccctgcctcggagatttgggatttgatgtggttagaacacttaaccccatggaagtactcagctgctccctcaccccctttaggtcttcctacaaaagttactgttctgagactttccctaaccaccctgttttaaatggaacatctcccagcacaactccttttcctttctagctttacttttccccatacaatcactatytgatttataatttatcttttttctgtcactagaatggaagcttcatgagcatgaagatatttttattaaatatgctcacttttgtatcaccagtgactagaaaaatgactgacactttaaaaagggctcaacaaatatttgttgaataaatgaataagctaataatctaagaaatgtaaccattaaatgaataaagcctaaaaaaagtctcgtgatctggaacaacagtaataaatagttctttacaagccttggttaccaagagatgatttaaaattcatagttcaaatgaccattttgcaaatgtccctttaggtatctttgaaatacacagttatttggattttaaataatttattggttccagaatgctggtatcagttacgggcacagcaaattaggattttatgtttaaggatagttctaaaagcaa

SEQ ID NO: 16719 - DNA, 676 bp, Homo sapiens
gtcaacccaactctcctctccgaaattcccagcagacacacccctgcctcggagatttgggatttgatgtggttagaacacttaaccccatggaagtactcagctgctccctcaccccctttaggtcttcctacaaaagttactgttctgagactttccctaaccaccctgttttaaatggaacatctcccagcacaactccttttcctttctagctttacttttccccatacaatcactatctgatttataatttatcttttttctgtcactagaatggaagcttcatgagcatgaagatatttttattaaatatgctcacttttgtatcaccagtgactagaaaaatgackgacactttaaaaagggctcaacaaatatttgttgaataaatgaataagctaataatctaagaaatgtaaccattaaatgaataaagcctaaaaaaagtctcgtgatctggaacaacagtaataaatagttctttacaagccttggttaccaagagatgatttaaaattcatagttcaaatgaccattttgcaaatgtccctttaggtatctttgaaatacacagttatttggattttaaataatttattggttccagaatgctggtatcagttacgggcacagcaaattaggattttatgtttaaggatagttctaaaagcaa

SEQ ID NO: 16720 - DNA, 514 bp, Homo sapiens
aattgcatactattcaaatcctgaactaatgcttttttccctctacttttttttctgccacatattttctttcctgaaacaccttgggttctcctaataacctggatttttaaatacgctcaggcctattctggccaaatacctgaacttacaagattcctcttttgtactgtcctgttgctcttcctgcgtttgcagattgatagaataagcactggaggctgagcacggtggctcaygcctgtaatcccagcactttgggagaccgaggcgggtggatcacttgaggtcaggagttcaagacctgcctggccaacaaggcgaaaccccatctctactaaaaatacaaaaaaattagccaggcatggtgccaaaagcctgtaatcccagctactccagaggctgaggtgggagaattgctggaacccaggaggcagaggtcaaggaggctcactgcttccttgaactcaggaggcagtgagccaagatcgcaccgctgcactccatcctgggt

SEQ ID NO: 16721 - DNA, 532 bp, Homo sapiens
taataacattccataatgtgaagcttatttttatgttaatgtataacatttaaacaaaaaggcatctaattccttctgaaaacagatcagctaagaacttctaagaatgcaaatgtgttgtyatccctgacttgatattttacattttcttgcatttattttgtcctagagatccaaaggtctagtacaggaatagctgtaaaagggacaaaaggaataggcttgatgtgactctgataatatatggtttcatttgactctgggaggaaaaacttcaaagtagattattagttgaataaattcagctctaaaattgtccacacacaagctgagaattgacttttgaatcagatccaccagaaaaacaaacaaaaatagaagcattattcggtctagaatttatacaaagtaaattaaaatttaagaaacacgtataagcaaagtcaagtttgtgatttttaactctgtatcttggtatctgttctctgctaacataacaaactgttgttttgaaattgctgttttccaacat

SEQ ID NO: 16722 - DNA, 547 bp, Homo sapiens
ctctttttatccctctctcttcctccatccccctttcccattttgtgggctctatgttctgccaacatagtcacatattcaacatacatggatgctcagagaggagagtctagaattaatttaactgtgtaattcccacactgcctagaatagtgctggtgggtacccaataaatgctgcatggataaattgtgaattcagttatatatatattatatatatatatatatatatacaaatgctgcatggataaatatatatatttaacttaatagcaactgtttattgtgctcttgctgcaatgtaaaactttaatctgaaatctttacaaacttggtatcatttactgcctcccatcagcccagtgaagtggatatctattccttayttttttttaatcaggaaattgaggcttagaaaaattgagtcacttgtccaaccacatacagccattaagtaccagagttgggattcaaaatgagccttttgactgtaaagtcagtgttcttaacctcttgatagaggttatactttatcttacatttca

SEQ ID NO: 16723 - DNA, 547 bp, Homo sapiens
ctctttttatccctctctcttcctccatccccctttcccattttgtgggctctatgttctgccaacatagtcacatattcaacatacatggatgctcagagaggagagtctagaattaatttaactgtgtaattcccacactgcctagaatagtgctggtgggtacccaataaatgctgcatggataaattgtgaattcagttatatatatattatatatatatatatatatatacaaatgctgcatggataaatatatatatttaacttaatagcaactgtttattgtgctcttgctgcaatgtaaaactttaatctgaaatctttacaaacttggtatcatttactgcctcccatcagcccagtgaagtggatatctattccttatttttttttaatcaggaaattgaggcttagaaaaattgagtcacttgtccaaccacatacagccattaagtaccagagttgggattyaaaatgagccttttgactgtaaagtcagtgttcttaacctcttgatagaggttatactttatcttacatttca

SEQ ID NO: 16724 - DNA, 547 bp, Homo sapiens
ctctttttatccctctctcttcctccatccccctttcccattttgtgggctctatgttctgccaacatagtcacatattcaacatacatggatgctcagagaggagagtctagaattaatttaactgtgtaattcccacactgcctagaatagtgctggtgggtacccaataaatgctgcatggataaattgtgaattcagttatatatatattatatatatatatatatatatacaaatgctgcatggataaatatatatatttaacttaatagcaactgtttattgtgctcttgctgcaatgtaaaactttaatctgaaatctttacaaacttggtatcatttactgcctcccatcagcccagtgaagtggatatctattccttatttttttttaatcaggaaattgaggcttagaaaaattgagtcacttgtccaaccacatacagccattaagtaccagagttgggattcmaaatgagccttttgactgtaaagtcagtgttcttaacctcttgatagaggttatactttatcttacatttca

SEQ ID NO: 16725 - DNA, 506 bp, Homo sapiens
acatctgtaatcccagctactcagtaggctgacgcacaacaattgcttgaacctggcagacagaggttgcagtgagctgagatcacagcaccgcactccagcctgggcaactgagcaagactgtctcaaggaaaaagctacaagggttttgtacccttactttgtttcagccctgctcatgatgtttatttttccactattttatgtcttgctttattccacaatggatctgagatagcttacaaaaaacacaaataatagaatatttaaatgggactggacatggtggctcatgcctgtaatcctaacactttgggaggctgaagcaggaggatcgcttgagcccaggagttccagaygagcacaggcaacctagcaagactttgtctctgtaaaattaaaataagtataaaagaaacaacaacaagaagaaaaagaatatttaaatgaaagtaaataagtaaataagacaaagactagcagtctataaattcctacaatattgc

SEQ ID NO: 16726 - DNA, 651 bp, Homo sapiens
ctccttctgcccacctcggcttgcctccccatccctaagtctcccttgtattaattagtcatttcttgctgccctaacaaagtaccacagactggtggcttaaaccaggggtcccccaacccccagggccacaaaccggtaccagtccctgcatggcctgttaggaactgagtcacacaatgagctgcacrcaagtacgctaagcttcatctgtatttgcagccactccccactgcatgaattaccagctgagctctgccacctgtccgatcagcagcagcattagattctcataggagtgcaaaccctatggtaaattgtgcatgcaagggatctaggttgtgcattacttatgagaatctaatgcctgatgatctgtcactgtctctcatcatccccagataggaccatctagttgcaggaaaacaagctcagggctcccactgattctacattatggtgagctgtataattatttcattatgtattacaatgtaataataatagaaataaagtgcacagtaaatgtaatgtgcatgaatcatcccaaaaccatctcaccccctccacgagtccatggaaactctgtcttccacaaaactggtccctggtgtcaaaaaagttggggactgctggcttaaacaacagaaa

SEQ ID NO: 16727 - DNA, 494 bp, Homo sapiens
ggtgttttttcctgtaactctggaatattgtttaaaatttccattgtcattaatrgaacatttgatgaagctttattttatgctaccataactgtctttggaatgaaagtttgaattaacttagcatgctagcaatgtccaccatgggcaggtgaataaaacccctaatgatatcaaagcagtgtaattcccagatccaggccatcttttaaaatagatgctttttctggggcaagtattttactaggtgttctatacagtaactttaaatcctgcaaagtgggtgttattatcccaagcaagagatgaggaaattgaagctcacagagatacaatgatctatttaaggccacacacctggcaagtggtggagtcagaacttaaaatcaagtctgtctgacatagagccagtgctttttccatcatgatgtatcttattctgccattcttcataatgatcaagtaaaggtagacaacaattatgtgcttatctc

SEQ ID NO: 16728 - DNA, 494 bp, Homo sapiens
ggtgttttttcctgtaactctggaatattgtttaaaatttccattgtcattaatggaacatttgatgaagctttattttatgctaccataactgtctttggaatgaaagtttgaattaacttagcatgctagcaatgtccaccaygggcaggtgaataaaacccctaatgatatcaaagcagtgtaattcccagatccaggccatcttttaaaatagatgctttttctggggcaagtattttactaggtgttctatacagtaactttaaatcctgcaaagtgggtgttattatcccaagcaagagatgaggaaattgaagctcacagagatacaatgatctatttaaggccacacacctggcaagtggtggagtcagaacttaaaatcaagtctgtctgacatagagccagtgctttttccatcatgatgtatcttattctgccattcttcataatgatcaagtaaaggtagacaacaattatgtgcttatctc

SEQ ID NO: 16729 - DNA, 558 bp, Homo sapiens
ggcggaggttgcagtgagctgagatcgtgccactgcactgtagcatgggagagaaagtgagactctgtctcaaaaaataagaaatatatatataaacagaagcactactrttttctttcagtacctagtacattgtcttgtacacctcactttccacactgctgacccacagccctttgactgattctttaaatcactggaactcagcactaaccaagcaaagttgaatccaggacattgtatccagataatcaatctaggtgtattcatccatttttgtaaaattcaaattttctttaactcttttctttagttaggctaggcaggcctggcttagtgttttatttttatttttaaaccctcttcaaagagttcttgagtgtcaggataacttacaaacttgtggattttctcctgatcatttttttcagctctcctctctctttcttttttttttggaagggggtaggggggttggagtcttgtactgttgcccaggctggagagcaatggtgcaatctcggctcactgcaacctccgcctcctgggttcaagtga

SEQ ID NO: 16730 - DNA, 558 bp, Homo sapiens
ggcggaggttgcagtgagctgagatcgtgccactgcactgtagcatgggagagaaagtgagactctgtctcaaaaaataagaaatatatatataaacagaagcactactattttctttcagtacctagtacattgtcttgtacacctcactttccacactgctgacccacagccctttgactgattctttaaatcactggaactcagcactaaccaagcaaagttgaatccaggacattgtatccagataatcaatctaggtgtattcatccatttttgtaaaattcaaattttctttaactcttttctttagttaggctaggmaggcctggcttagtgttttatttttatttttaaaccctcttcaaagagttcttgagtgtcaggataacttacaaacttgtggattttctcctgatcatttttttcagctctcctctctctttcttttttttttggaagggggtaggggggttggagtcttgtactgttgcccaggctggagagcaatggtgcaatctcggctcactgcaacctccgcctcctgggttcaagtga

SEQ ID NO: 16731 - DNA, 526 bp, Homo sapiens
attgcatactttataaactatagtatagtgtaatataacttttcacacacagggaaaccaatgaatttgtgtgacttgctttttgcaatattagttttattgccgtggtccggacccacagtatttctgaggtttgcctgtctaccatactgtagagattgaaccgcttttcaaargtgttaagactattttatccctaatatcctccatttctggtttgctttccattctcatacattattatgacactaaattacaaatagttttatcgaagtccaaaactctagtttacaagcaaataaataaagaagaaaaaaatgattacttcctattcccatgctttgtatgatccaggtcaaattatttaggcttccttagtcttatttttaaaagtcatatataaataatgcttcctctcttgtaaattcctgtcttgtctctttgtaggtcactcaggacttgctttatgaatctgggtgctcctgtgttgggtgcatatatatttaggatattcagctcttcttgt

SEQ ID NO: 16732 - DNA, 811 bp, Homo sapiens
tcaattattctaattctaaacagcacatattatgatgtcaccaattagagattttaaaaaaatattttgaaaacaacataattggcttcctttgtattcctttgtattttctttcatgcatttaaaagtattattctcggaagattaagattgctcagtcttggtcaaaaggcacaacaaaagctaagagccctttgactggatgatcagtaagtctccttccaaatgaatccagtttgtagctattttttcctctgatgtgcctattgcccaacttttatctgattcaaatctttccaaaatagataagtagggaataaagaaaagaaccaatttctggtggtgcagaaatatacgagtgaggatgagagaaaggacccaaagcaaaaacaaatcagatgctttgcmaatagcacagtcagtaacatgtttgagttcaggctcataggaaaaggtaagctggagagatccttttaataatttaaatccagtagtaaaaggtcacagataatgggaaataccacacagaggcacagtcagagagatatttggtgttgaggtctaatgaaaggtagctgacaagaaatgggcctagccacacaataaattctcaataacaggccaggtgtagtggctcatacctgtaatttcagcactttgagaggctgaggtgggaggattgcttgagcccaggagtttgagaccagcttgggcaacacagtgagaccccatctctacaaaaaatacaaaaattagctgggtatggtggcacatacctgtagtcccagctactcaggaggctgagatggaa

SEQ ID NO: 16733 - DNA, 529 bp, Homo sapiens
tgggcaaggtagcagtttttgaagtccaagaaccttaaaagtctccttctgaggagaaatttatattgacaaagaccagagaagttataaatattcacagtttgcatagcagtaataagaatgatattcattgttcctgttcttaatttgacatatttctagttggatagaaatttctccaactgattctatgtaagaggaagtgccaaaattaggctatcaaattgcaactcaccttgacaactaaaaagcccatcaatattgagaacacccacaatgatgtctagcacacatgtgaaaggtgtggagagctctggtgcatgagaactttatttttcrtttcaggaacatccaagaagtcatggccatgagcaaactggaaaccatgtgtaaccccactggacctgggagctgaagaatcatgtgtttggctaacggaaccagctgaccaaccagattcagaaaagaaaaattcagacactcgaaacaagcatatttgaggctccagttacagaagaatatgaagcca

SEQ ID NO: 16734 - DNA, 529 bp, Homo sapiens
tgggcaaggtagcagtttttgaagtccaagaaccttaaaagtctccttctgaggagaaatttatattgacaaagaccagagaagttataaatattcacagtttgcatagcagtaataagaatgatattcattgttcctgttcttaatttgacatatttctagttggatagaaatttctccaactgattctatgtaagaggaagtgccaaaattaggctatcaaattgcaactcaccttgacaactaaaaagcccatcaatattgagaacacccacaatgatgtctagcacacatgtgaaaggtgtggagagctctggtgcatgagaactttatttttcatttcaggaacatccaagaagtcatggccatgagcaaactggaaaccaygtgtaaccccactggacctgggagctgaagaatcatgtgtttggctaacggaaccagctgaccaaccagattcagaaaagaaaaattcagacactcgaaacaagcatatttgaggctccagttacagaagaatatgaagcca

SEQ ID NO: 16735 - DNA, 529 bp, Homo sapiens
tgggcaaggtagcagtttttgaagtccaagaaccttaaaagtctccttctgaggagaaatttatattgacaaagaccagagaagttataaatattcacagtttgcatagcagtaataagaatgatattcattgttcctgttcttaatttgacatatttctagttggatagaaatttctccaactgattctatgtaagaggaagtgccaaaattaggctatcaaattgcaactcaccttgacaactaaaaagcccatcaatattgagaacacccacaatgatgtctagcacacatgtgaaaggtgtggagagctctggtgcatgagaactttatttttcatttcaggaacatccaagaagtcatggccatgagcaaactggaaaccatgtgtaaccccactggacctgggagctgaagaatcatgtgtttggctaacggaaccagctgaccaaccagattcagaaaagaaaaattcagacactcgaaacaagcayatttgaggctccagttacagaagaatatgaagcca

SEQ ID NO: 16736 - DNA, 529 bp, Homo sapiens
tgggcaaggtagcagtttttgaagtccaagaaccttaaaagtctccttctgaggagaaatttatattgacaaagaccagagaagttataaatattcacagtttgcatagcagtaataagaatgatattcattgttcctgttcttaatttgacatatttctagttggatagaaatttctccaactgattctatgtaagaggaagtgccaaaattaggctatcaaattgcaactcaccttgacaactaaaaagcccatcaatattgagaacacccacaatgatgtctagcacacatgtgaaaggtgtggagagctctggtgcatgagaactttatttttcatttcaggaacatccaagaagtcatggccatgagcaaactggaaaccatgtgtaaccccactggacctgggagctgaagaatcatgtgtttggctaacggaaccagctgaccaaccagattcagaaaagaaaaattcagacactcgaaacaagcatattygaggctccagttacagaagaatatgaagcca

SEQ ID NO: 16737 - DNA, 1167 bp, Homo sapiens
  misc_feature (1)...(1167): n = A,T,C or G
cctaagaatgtgtccatagctaaattatctggaacttcatcaaggtcttattaacatcatyatcacaatttgtaatatagtctaccattaacagattgactatctctggtttactttaatcctttcagctagccaaaactacaggaaaatcctttttatccttaatcatgtagcaagcaaaagtgtgacctggatggagtagctcagtctagaagaccactgctgatgtaacttttcgccagagcagagtaaaaaacagagaatcttttttttttttgagttaggaaacaataggagatgatgacaacttcctagactgcatcttgacatacctctctactgccttgcttaattctatttttctttttcatttttatttatttatttatttatttatttatttgagatggagtcccactccgtcatccaggctggagtgcagtggcgtgatctcagctcactgcaacctctacctcccgggttcaagtgattctcctgcctcagcctcccaagtagctgggattacaggcatgtgccaccacgcctgactaatttttgtatttttagcagagatgtggtttcaccatgtgggccagactggtcttgaactcctaacctgaggtaatccaccctccttggcctcccaaagtgctgggactacaggcattagccaccgcacccccctnnnnnnnnnnnnnnnnnnnnnnnnnnnnnnnnnnnnnnnnnnnnnnnnnnnnnnnnnnnnnnnnnnnnnnnnnnnnnnnnnnnnnnnnnnnnnnnnnnnnacttttgctgtctttattgtataacacagcaaaacaagtcacctctgagagggtgactgctcttcctatgctctctctcacttgcccctccaagcagctgaacacaactttaggtatgacttagcattatccagtcctataccttgactggcactgtgcccactgcctggagggccttctgccccttagccagctgcatgacccgcatggcttgacgaatgccacttccttcaggaagcctagaaattaatttgcaaagtagattcattttggcccagttccctgatgggcactaccctcttggctctccaggcttccatggcactctgctgttactttccacagcacttatctgccttgcagtgctgtggtttctatatac

SEQ ID NO: 16738 - DNA, 409 bp, Homo sapiens
agtggtgtagctggcactggggtacaaccagaattcagagcaggggtcaataaactgtggcccatgggccagatctagcccgggccctctgtttgtacaattcatgaactaaaaaaatgattttacatttttaaagggttgtttaaaaaaaaaataaaaatgataacgatacatgccagagattacttgtggtcgaaaatgcctaaaacgtttatgatttggccacgtacaggaaaagcgtgtggggccctggtttagagtggagggagggtgcgccccctcagtagggagacctctgaccacatctggggccctttctccatccaggtctccagagccaaacaagmcgtcggtcttgggtggtggtgaggacggtattgaacctgtgtccccaccggagggcatgacg

SEQ ID NO: 16739 - DNA, 528 bp, Homo sapiens
attccactggcatttttcatttttttgtaactaaaaatgtagatctaaatgagaattttctatatatgaagaatttttttwaaaaatcttaatatataaaaaagctattttaatataggttttatgatttatgtttttaaatcttaaaaatgggagttataaaaggcaacctcagggtattccattttgaattacattctgtttgtattttttcccttaatttcttcctgcctgtccttctctctcccctcaagtcttaagtgcattacctacttttggttaggcagttgtcattcactgatagcaaaaggatgttaaagttcggagctgactttgtactgaaatgactttgaaacttcttggaattctcttatacttaccactttgttcttttaggtccctttttaaagctttggtatattgcaagacatgcttgaagctgactaatggaatttttagttgagtgtttgagaaattatttaaagtatattcatgaaggtaacgtgtttatcaacttctggaagtgat

SEQ ID NO: 16740 - DNA, 564 bp, Homo sapiens
gagtttaaatctaggctccagcacttgctagctatgtgagctcccttgggcaagtttccataattctagtaaggagatcctaaaagtgtcaaggcccagggcagaaagtaaaggcatatttataatttctccatgcctcatctataagtcaaggatactaacagtagataycacacagggctactgtgaagattaatgagttaatatgtaaagcactcaggatggtgcctggcatgtagtgagcacccattagtatcatataagtagtagtagcagcaggccaggcgcagtggctcacgcctgtaatcccagcactttgggaggccaaggtgggcggatcacaaggtcaggagattgagaccatcatggccaacatggtgaaaccctgtctctactaaaaatacaaaaaaattatctgggcgcgctggcgcccacatgtagtcccagctactcgggagctaagtcaggagaattgcttgaacctgggaggtggaggttgcagtgagccaagatcccaccactgcactccagcctggtgacagagagatactctgtctcttaaaa

SEQ ID NO: 16741 - DNA, 564 bp, Homo sapiens
atttagagacaatgaatgaaccaacctgatttcccatcattttctttcctatcctcatttctctcgtgattgccttcattctctgtggctctgtggattttagtctttcttctgactatttcaattaaatctctcacttgggctggtctgaggcaaagtctgtcctgtagataggttcttgtctatcatcttgtgtagacataaagctggcccctggactcacttttctcaaagttaattcattaaatgctctcttatttctctgtcctcaagattcacctgagttgtgttttagactctgagcttgtagaagtaaatatgtgaataaaaaggacagaggtgagaatgcactttgtggtctaygcaggttcaaagtcctgccctgccctctgcatctttctttggctgaggtccctttggaatgtcataaatgttctccagttaatgtcagctaagtgagtccatgaggagcagacacagtccctggaaacttcatccacgctggcataaggttgcccatctagagatgaagacacacctgactccaggctagtagggaactct

SEQ ID NO: 16742 - DNA, 588 bp, Homo sapiens
tgtattaaatcaataaattaatatagggagaattgttatcttcatgatatttagggagaactgaaatttttaaatattatatcctcacaatgatgaacatgatrtatttttcaaaatatttatttgtttcttaaaaataatatataaactttccatacaggttctacaagtatattgctatatttattactgaggaacttactcctcattgcttttctaaagagtattttctcataaatgttatttcctaagtttatgtagaaacaaaaccatttttatttttcacttttatgtagtagagttattaaggtctttcattaaatataagaattttgttgagtatttttttaaatttcctatttgcacaatcataatagttgaaaataattacacatttatttattacaatgttcaaaacttataaaattatctttctgaactaacactaactgtacatttaataatgggaatattcaccttatttacaatagaaaaaaagatttcaaatatgatatttgatttaattatttatatatatatttgccacattaaaggagttcctttccattcccagttgtgaaagttttc

SEQ ID NO: 16743 - DNA, 547 bp, Homo sapiens
taagaggctgtacggtgtgcagtgatcttttaaattttgtttcagaactcataatgacctccctactaccctagttacgtgtttggaggtaactcagattaattataaagggagaatacagataacctaataaaacaaatgactattataatgataaacaggaatatcaacaaaagaattcccactgatcctatcatgtatgtttaaatattaaagcttattgaagaataatcccaaacctagaaattagacctacaaataattgataagctggatatccttaaaaatggaaacttctgctctccaaaagacaatgtctacaaatgagaaaataaaccacaaacttggaggaaatattgacaaatgacacatctgaaaaaggactctttttcaaaatatatwaaaaaaactctaaaaactcaacaataagaaaatgaaaaagtctactgaaaatgggtaaaggcccgaaagagataccttactaaagaagatatatagacatcatgtaagcatacatcagaatgactaaaagcaaaaacactgacaa

SEQ ID NO: 16744 - DNA, 518 bp, Homo sapiens
tgttcctagcatcagacatcattaggtgttaaagtttatttaatgagttgtcccacagatataacaaaaacacttgaattgggcttatgtaaaccaaagcccagctttggatataagaattctttacgttacttaaccagtttatttcactgaagccaaacatacttstaggcattttattgaagaatttggatacagtgaggtgaaatcatagcgtggcttgatttttcttgagatagtgggtattttatttttctgttccttaataccatgtctacaataacaaatattatttattttcactttctagaacgaaaaaaccctcctttttaaggttttgaagaatccaggataatataaaatgaattacaatctctcattagatttaaatattcacccttctcctttactaggctatgaagctctcatggaaaaagatagctatgggcctttttttctcttttccttctctttttttttttttttttttttttgcagcttttattttaggtttagca

SEQ ID NO: 16745 - DNA, 514 bp, Homo sapiens
gtttagagttttagtaagatttttatctttctgtatcattgaatatgcaaagattggaagaagaaaatatgtattaggaagtaaggaaagagaaagtagtattactgataatctgttccagattaattccatctaggcatgatctcagtgcagtgtgattgtatattctaagatcgaatatgtgttacttttataaaattcagagtaatataaaaagtatttatttaaaaatgtgatgatagtgctcaaagatgttaaacatagtggtaggtaatgtatagaatgaacattgaactctcttttaggggcacacagtgttatgactactcgtaatagaattttgtgtaccatcttatgcttatracttttagttttactctattattataatggtctcactctgagaaagattaagctgaggtgaatcgtcctagcagatttttgtccagatagcatctatatgcctttcagatagtatctatatgccttttatgatttgctattagataaaaac

SEQ ID NO: 16746 - DNA, 167 bp, Homo sapiens
tccaggaggaattcctgaaagtaagctcaaggatgcatctgctgaaagctcagacaggttggccaatcaacattcacagatgarcaatgggaaatcctgcaatcatgtggactgacccatgaagtcgtccaggcaactattggagacaaaaaaaagaagagaatcac

SEQ ID NO: 16747 - DNA, 555 bp, Homo sapiens
ctttgaaataccctgtgagtcaaaaaagtattcacaaggggaactggaatgtatttggaacaaacttgttataaaaatctcatttctggtagactaaagktgacaacttctttcctgctcctctctctgtgaggaccaattccccttaaaccttgaccaaactactgacttatttggccaacagaaggtgacaaaggtggtatttggggacttcagaagccaggctgagaaaacagaacacttatccaggagaaagccagtcaccaggcaggaaatcccactcccctgagacctcatgatggaaaccacacggccagtccatgactagctacatgcattgacatcccccactgagcctccagcaacaccgactcccaacaactagtgagcctccagcaacatccactcccaaccactagtgagccaccctgcacatcacctcactgtgctttcacacaatccagcttggctgcaactatgtgtgagatgagctgaccaccaagactctctaagccaaaaaacaactaataatgagttgttttaagctgccaagtt

SEQ ID NO: 16748 - DNA, 555 bp, Homo sapiens
ctttgaaataccctgtgagtcaaaaaagtattcacaaggggaactggaatgtatttggaacaaacttgttataaaaatctcatttctggtagactaaagttgacaacttctttcctgctcctctctctgtgaggaccaattccccttaaaccttgaccaaactactgacttatttggccaacagaaggtgacaaaggtggtatttggggacttcagaagccaggctgagaaaacagaacacttatccaggagaaagccagtcaccaggcaggaaatcccactcccctgagacctcatgatggaaaccamacggccagtccatgactagctacatgcattgacatcccccactgagcctccagcaacaccgactcccaacaactagtgagcctccagcaacatccactcccaaccactagtgagccaccctgcacatcacctcactgtgctttcacacaatccagcttggctgcaactatgtgtgagatgagctgaccaccaagactctctaagccaaaaaacaactaataatgagttgttttaagctgccaagtt

SEQ ID NO: 16749 - DNA, 555 bp, Homo sapiens
ctttgaaataccctgtgagtcaaaaaagtattcacaaggggaactggaatgtatttggaacaaacttgttataaaaatctcatttctggtagactaaagttgacaacttctttcctgctcctctctctgtgaggaccaattccccttaaaccttgaccaaactactgacttatttggccaacagaaggtgacaaaggtggtatttggggacttcagaagccaggctgagaaaacagaacacttatccaggagaaagccagtcaccaggcaggaaatcccactcccctgagacctcatgatggaaaccacacggccagtccatgactagctacatgcattgacatcccccactgagcctccagcaacaccgactcccaacaactagtgagcctccagcaacatccactcccaaccactagtgagccaccctgcacaycacctcactgtgctttcacacaatccagcttggctgcaactatgtgtgagatgagctgaccaccaagactctctaagccaaaaaacaactaataatgagttgttttaagctgccaagtt

SEQ ID NO: 16750 - DNA, 555 bp, Homo sapiens
ctttgaaataccctgtgagtcaaaaaagtattcacaaggggaactggaatgtatttggaacaaacttgttataaaaatctcatttctggtagactaaagttgacaacttctttcctgctcctctctctgtgaggaccaattccccttaaaccttgaccaaactactgacttatttggccaacagaaggtgacaaaggtggtatttggggacttcagaagccaggctgagaaaacagaacacttatccaggagaaagccagtcaccaggcaggaaatcccactcccctgagacctcatgatggaaaccacacggccagtccatgactagctacatgcattgacatcccccactgagcctccagcaacaccgactcccaacaactagtgagcctccagcaacatccactcccaaccactagtgagccaccctgcacatcacctcactgtgctttcacacaatccagcttggctgcaactrtgtgtgagatgagctgaccaccaagactctctaagccaaaaaacaactaataatgagttgttttaagctgccaagtt

SEQ ID NO: 16751 - DNA, 555 bp, Homo sapiens
ctttgaaataccctgtgagtcaaaaaagtattcacaaggggaactggaatgtatttggaacaaacttgttataaaaatctcatttctggtagactaaagttgacaacttctttcctgctcctctctctgtgaggaccaattccccttaaaccttgaccaaactactgacttatttggccaacagaaggtgacaaaggtggtatttggggacttcagaagccaggctgagaaaacagaacacttatccaggagaaagccagtcaccaggcaggaaatcccactcccctgagacctcatgatggaaaccacacggccagtccatgactagctacatgcattgacatcccccactgagcctccagcaacaccgactcccaacaactagtgagcctccagcaacatccactcccaaccactagtgagccaccctgcacatcacctcactgtgctttcacacaatccagcttggctgcaactatgtgtgagatgagctgaccaccaagactctctaagccaaaaaacaastaataatgagttgttttaagctgccaagtt

SEQ ID NO: 16752 - DNA, 1207 bp, Homo sapiens
gaataaaccataactcataccactgccacggtggttgtcacacctttattggccaagtaatggagccaattaaaaaagtgacattttggctccattattcaaatgtttctgctgccctgagaacatcattccatcttaagagtctattgtattgactacaatatttgtactcaatcattgtcattttggtaaatttcctccatcttcctggcaggattcatttagaaggaccctgatattttcattcttaaagccaccttttacaatattgagataaaatgtacacattttcctaaagctttcattctaaagattccagattttctagtgaaagatactgtttaaagaaaccaagtagcttatattttccccataaatggcaagtcattgagtcgcagtaaataaatcatatggaatctagtttcataagcaaaactgattttaactcagttcttgaactatgcctgaaaataaagtgtactatttaaagagaacttgtgaaattccaggaatgttacatattagtaaacaattcagaactacatgtgtaaagaggcaattaacttgctgaataaatgaaaaacagattttccttcagttacttttctctacaaagtaactctgggtgatcatacccaaattcagaaaaacactagcagttctgtcttaaatgtactgttctaagtggggtcccactctttaatccttgcctcttacataccctccaacatctggccaaygagcctggactgcacaggcaccgtgatgaagaaaagcaggtggggactaacagaatgatggggctgttgcagagcaacctcaacatggctccagcttccctcccttggtcatcttccctttccaactgaggtgatccttgttaggcctgaggtcttaagaggaaacaattagaacaagaaacttcccttcacttcaaggaactctgataaaatgggcccaaaggagccctcaaagcatgagcctttcccatactagtaattctggaaattccttctaagagaaaaggaggcattgtctccacaaagccaggtcaaaatggccagcacattcttccttttatgaatctctgctatcttctctgctaatctcactgcagcacttcataggctgttattctgacggggaaaactaacaatacttaagggcaatgaaaggtccctgttcaaggaattacaaggaagcagag

SEQ ID NO: 16753 - DNA, 579 bp, Homo sapiens
tcaaatcccttttgtcatgttttatacactctgttttgataacacttttaaaacacctttatttgtttgaacatattcagtgtatcattttgcaattcttttaggtgccaaatttgctctctgttatttctgtggacttatgcatatgatgaccgattttcttttgttggtggtgatttttgattgtgaactaatttatgggaaatgtgtcatgagacctgggtttaagctgcattcctccagagaaaatttgggtttgcctataccagttgcctgggatcagtatggaactcaaaataaattatcctcttgagatttttaagaaaactgattgtttaaatttagtctgcaaacacacttacttgtttctagttatagctcttctaagatttcttgttgactcttttgtggggtattgmttttttttcaaattcgccttttggtgaggctgtaaacatttggatacacaaacttacagaggggtttcctattaaatatttaaccttcagcagagtccattctttgtctctgatcatctacaactatcagttctatcagaattaaagctcaagaacacca

SEQ ID NO: 16754 - DNA, 537 bp, Homo sapiens
ttttatataacaatgtatcataaattattcaacaatattttcagcaaaatgcagtctgttcatcaagaaatattgaggacctcaaacattccaggtttcatgataagaattggtgacagactgcaggatgtggctgcaatggccctggcacatgtgggacttacaatatatgtcatgcttgttctagatgcaagagtgctgcgaatttttatggtactcagaaaactcagaaaaactagttttaggcacgtgtaaataaatgttaagtataagtaagtcagaagggaaaagaggaaccatactttgtagtatcttygtcctactaaaatatctgttgagcacctacgacttaccaggaagaaaatgtttctgctcttatggaaggggcagaaatagaatcatgtacacacatacaaacactatgtgtgtaaaaactatttggttggttggaataaatgcatgacagaaaaataaagcaggtaaggatagagggagtaccagattgagatgagagatactgttattttatataagatg

SEQ ID NO: 16755 - DNA, 537 bp, Homo sapiens
ttttatataacaatgtatcataaattattcaacaatattttcagcaaaatgcagtctgttcatcaagaaatattgaggacctcaaacattccaggtttcatgataagaattggtgacagactgcaggatgtggctgcaatggccctggcacatgtgggacttacaatatatgtcatgcttgttctagatgcaagagtgctgcgaatttttatggtactcagaaaactcagaaaaactagttttaggcacgtgtaaataaatgttaagtataagtaagtcagaagggaaaagaggaaccatactttgtagtatctttgtcctactaaaatatctgttgagcacctacgacttaccaggaagaaaatgtttctgctcttatggaaggggcagaaatagaatcatgtacacacatacaaacactatgtgtgtaaaaactatttggttggttggaataaatgcatgacagaaaaataaagcaggtaaggatasagggagtaccagattgagatgagagatactgttattttatataagatg

SEQ ID NO: 16756 - DNA, 519 bp, Homo sapiens
tgagtgcgttgagactgtttgcttatatacaaagttatccttttttaacccatcataattgtgatgctctattcattatatcattatttataactgctatcttagttattttaaagagtggactttgctaattagctctttttgcatactctgtttccctctgattcctgcttcctttttattccaggcttagtgcagtcttgcttttatttgtattgacctttggcatttcaattttctgtttgctttttaaatcttagctaattagaggatttcaaattcttcacaataaagaagttctcgcacagmacgtgtaattagaatatctgatgacaagaactgggattttaatactccagggttgaaagatcatacctctgagcagcattttcccccaggatgttttgcatttgagcaattaacctcacattcaggacatggcccactattcatctcttaacatctcttagctgggattatttcaaagtctgctcttttattgccttttatcagatgtga

SEQ ID NO: 16757 - DNA, 555 bp, Homo sapiens
gtgtgtataaatattcatgcatatatccatatattatattctacatgtctatattatacatatgatatatatacaatgtatataacccatgtttaaaaaatttacacacacacacacacacacacactcctctagagactcaaactttctggttcattttcttcatctataaaatcagaaagctgaacaattgctagggattttatggctataaacatattatttaataaattgtatcgctttccctctggtaaaaatgaccactgtagactggtatgaggctagaaagaaaaagttgtcatttaagaattctatatttgcaggaatcatttttctacctacctagtggaaacttttgaaagtatttgataagaactaaaaaattcataagaatattaatttattaaatgtcaagatatagatgtaagaggaggcagttaatatgtctagaggaaatacaatcttgaataactgtcagggctgctatagctgaatttgaataatctggaacaaagcatgtatgtacttgccaaaaatactaaaayttaataaatc

SEQ ID NO: 16758 - DNA, 595 bp, Homo sapiens
cctttaaaagacctgactggttggattgtgtctagttaataatgggacttgcatgccaaagaatgagtacagactttattctgaaggtagcttttatgcatggagtggtaaagtcagaaatggaaaagactgggaataggaagactgactgaattaagaaagatattgaagaaagaaactgttagtacccttytctagctaaagaaaaatccttctattatccaaagtgaaaaataaattaataaggaaactattataaaattattatttataataaaaactcaaaactaggcttgaaattcagtgatcaaaggtataaatataagaatagcaaagcaaataaatgcgccttttcattcccacaaagtgattgtgggaacagtcccctcattaccacagtgcaattctaacttcaaaaatattaaatgaaattctgactttaaatgtctaaagagcaatgcaggattttactgaatacttttgcaaaggtggtagagaaccagaaagaaaggtgaggagttatactgcgcaagcagagcaaaatttcctaaaacttctccacagaaacctttcttctatggcaagaagaatcttc

SEQ ID NO: 16759 - DNA, 505 bp, Homo sapiens
acaatactattcctagtccatattaacaaaagctacctaaattgtcctttgttctgataaacacttaagtccttcgcacacacttaaaaggctcttcttcttgcctttcctctgtgaagttatggttctcttttaattaaactctataagtccaacatggtcttcatcattcaggttccttatgacmaatgtttctccatatagttagttacatgataacattatatttgtcacagacattccatttcctctgttccaagttatattataaacaactggaagataaataatctatttttttctcacttaaatacaaaaaaaacgaacaagcaagtgcttactgttttcagctttccactataaaaataattatttcttataaaaatctatttatatcctttgtttatatgctttatttttaagctgtttattaggatacactttattgcaaaaggagttgagagcaactcagattttctcttttataaacaaagatgcaagtaca

SEQ ID NO: 16760 - DNA, 530 bp, Homo sapiens
ttcctcctaccttattttctttttttcaccaaaaatttgttagamttttacttagctctagcagaagacacaaagatgaataatggctaatagtagagaatactccttgaggatctaattgtaatcgttctgcactttatgtatttttatagaaatatctttcaactgcatgcagttcatatagaaatagaatttacatatttaatgttttttatctcattaaaacatatgaccacctcatgttgataatggcaggggtgattggtagagaaaaaatttgttaaagtcatgaaataattgaaccagaaaggaatcaatatagcctgtcccactcatttatagatgaatacaccttagtatacaaaggagtgctgtgaaaaacaagattagcatttgttgaggaggatttttccttcgtactttgcaaattacctcaaagcagaatttaccctaactactccaagcctctgagaatctcacatattcccaaagacatggtgggtctatctgactgatggattggaaataag

SEQ ID NO: 16761 - DNA, 530 bp, Homo sapiens
ttcctcctaccttattttctttttttcaccaaaaatttgttagaattttacttagctctagcagaagacacaaagatgaataatggctaatagtagagaatactccttgaggatctaattgtaatcgttytgcactttatgtatttttatagaaatatctttcaactgcatgcagttcatatagaaatagaatttacatatttaatgttttttatctcattaaaacatatgaccacctcatgttgataatggcaggggtgattggtagagaaaaaatttgttaaagtcatgaaataattgaaccagaaaggaatcaatatagcctgtcccactcatttatagatgaatacaccttagtatacaaaggagtgctgtgaaaaacaagattagcatttgttgaggaggatttttccttcgtactttgcaaattacctcaaagcagaatttaccctaactactccaagcctctgagaatctcacatattcccaaagacatggtgggtctatctgactgatggattggaaataag

SEQ ID NO: 16762 - DNA, 704 bp, Homo sapiens
tgcyaagtattttttccttaacttttatcagcttctaacataccgtttaacatacattgtaaccatcttgtttattgcctttccccttttcctctaccccattggatttatgctccatcaggaccgtgctttttctgtttgggtcactaatctgtcttaagggctcagaacagtgcctgacatggtagctgtgagattgcagggatggcccagatcctgagagggccctgccccaagtatatgtgtccagtcctgggaaagggctctgtcgtgctcacatggctgcccaagtcccaaaccacagcctttcagagagatcgggagctcagaagaccttggccaggtctctcttagcatccaccaccctgcacccagcatacttgtcagtctctcctgagagctgggacctacctgctcccttctgtccccacagcctccagcccaatagttgctcagtgcagctttgaactggaacaatgccctcctttacagctggagaaactgaggccccaagagggtaggggactttggtaattctgcgccagtcaggatttgaacccaagtttcttttctcccagcccagaactttccccagcacagtggagggtgcatatgcagaatgaaggtacatggaaaaagctgaggcctcacagggtgctccaggccctgcttctgctctcaccccaagctcacctaccaacaca

SEQ ID NO: 16763 - DNA, 704 bp, Homo sapiens
tgctaagtattttttccttaacttttatcagcttctaacataccgtttaacatacattgtaaccatcttgtttattgcctttccccttttcctctaccccattggatttatgctccatcaggaccgtgctttttctgtttgggtcactaatctgtcttaagggctcagaacagtgcctgacatggtagctgtgagattgcagggatggcccagatcctgagagggccctgccccaagtatatgtgtccagtcctgggaaagggctctgtcgtgctcacatggctgcccaagtcccaaaccacagcctttcagagagatcgggagctcagaagacctyggccaggtctctcttagcatccaccaccctgcacccagcatacttgtcagtctctcctgagagctgggacctacctgctcccttctgtccccacagcctccagcccaatagttgctcagtgcagctttgaactggaacaatgccctcctttacagctggagaaactgaggccccaagagggtaggggactttggtaattctgcgccagtcaggatttgaacccaagtttcttttctcccagcccagaactttccccagcacagtggagggtgcatatgcagaatgaaggtacatggaaaaagctgaggcctcacagggtgctccaggccctgcttctgctctcaccccaagctcacctaccaacaca

SEQ ID NO: 16764 - DNA, 704 bp, Homo sapiens
tgctaagtattttttccttaacttttatcagcttctaacataccgtttaacatacattgtaaccatcttgtttattgcctttccccttttcctctaccccattggatttatgctccatcaggaccgtgctttttctgtttgggtcactaatctgtcttaagggctcagaacagtgcctgacatggtagctgtgagattgcagggatggcccagatcctgagagggccctgccccaagtatatgtgtccagtcctgggaaagggctctgtcgtgctcacatggctgcccaagtcccaaaccacagcctttcagagagatcgggagctcagaagaccttggccaggtctctcttagcatccaccaccctgcacccagcatacttgtcagtctctcctgagagctgggacctacctgctcccttctgtccccacagcctccagcccaatagttgctcagtgcagctttgaactggaacaatgccctcytttacagctggagaaactgaggccccaagagggtaggggactttggtaattctgcgccagtcaggatttgaacccaagtttcttttctcccagcccagaactttccccagcacagtggagggtgcatatgcagaatgaaggtacatggaaaaagctgaggcctcacagggtgctccaggccctgcttctgctctcaccccaagctcacctaccaacaca

SEQ ID NO: 16765 - DNA, 523 bp, Homo sapiens
tgtgatagagatgagctggtatattacacaagttcacttaattattcaacttacacttaatatatgacatatttatactgcatgttatgtgcaatagggcacataaaagaaatacacacacacacatacatatatatataattgtacagattagaaaattcaaggaatgtaaaataaaatgccatcactggtaagcctctggcctcattgaatatccagtaaaacatccttagatatcagggtatatacagaatgaaacgaaaacaatcaatgtccttgttgcgagttcaagagctaaaatctgaaaaatctcatcaacaaagacatgctgctgaaaatcaagtacttacctgtgaatcagacctagaaaattacttctgtcagagatacctctggtttaggtatttaagctaaaactataattcaacttcacagcttaaatatctttgacacaaattctagtttatttgtatcagttaatccatakagcacagctacattatgtatgagaagagccctgtgg

SEQ ID NO: 16766 - DNA, 540 bp, Homo sapiens
tggagtgcagttgcgctatctcggctcactgcaagctctgcctcccgggttcacgccattctcctgccttagcctcctgagtagctgggactacaggcacccaccaccactcccggctaatttttttatttttggtagagatgaggtttcaccctgttagccaggatggtctcgatctcctgaccttgtgatctgcccacctcggcctcccaaagtgctggaattacaggaatgagccaccatgcccagccgatctcattctttttattgtgcatagtattctatgatgtatatataccacagtttccttaaagattggcaaggtttaggtccaaattgcttcttttcttgataagttctaaacttatctcagacttacttattctttggcctgttgttcgctaactgtggtctccacaccaggaatatcagtattacctgaaaactagaaatgcatattcttgggataacccasatctactgaattagaaattctgagggtaggagccagcaattatgttttaacaaaccctccttatg

SEQ ID NO: 16767 - DNA, 1040 bp, Homo sapiens
tttgttatcattgtattaaataattgaatgagctcattagacagctgactttttgcatcattttcatgttttggatactttttttttttatttttttgagacggagtcttgctctgtcgcccaggctggagtacagtggcaggatctcagctcactgcaacctccatctcccaggttcaagtgattctcctgcttcagcctcccccagcagctggattacaggtgggtgccaccacgcccagctattttttttttttttttttttgkatttttagtaaaaacagggtttcaccgtgttgggcaggctggtctcgaactcctgacctcaaataatctgcctacctctgcctcccaaagtgctgggattacaggcatgagccactgcgctcaactttgtttttctaaattaaaaaatggaagctctgagaaatgctggagtcacagttctgggaagtggcaactccagagttctgtctcctacatagccctattcctctgatggtaacagccctcaaggttctttccttgccagaactgccacttgtgccattgggcgggggggtggcaaggaaggacgccagctaattcttccacacccccaggtgacttcttgacagaacatgcaatacatatgaatgcaattcaaatttaatcaatccattctgtaggattacctcttcaggtatgcaaagataaatgcacaaagatgttagttgcagcattttttttcttttttttttgagacagagtcttgctctgttgcccaagctggagtgcagtggctcaatctccgctcactgcaagctccgcctcctgggttcacgccattctcctgcctcagcctcccgagtagctgggactacaggtatctgccaccacgcccggctaattttttgtatttttagtagagacagggtttcaccgtgttagccaggatggtctcgatctcctgacctcgtgatctgcccgcctcagcctcccaaagtgctgggattacaggcatgagccaccgcgcccggccatagttgcagcattgttaa

SEQ ID NO: 16768 - DNA, 1040 bp, Homo sapiens
tttgttatcattgtattaaataattgaatgagctcattagacagctgactttttgcatcattttcatgttttggatactttttttttttatttttttgagacggagtcttgctctgtcgcccaggctggagtacagtggcaggatctcagctcactgcaacctccatctcccaggttcaagtgattctcctgcttcagcctcccccagcagctggattacaggtgggtgccaccacgcccagctattttttttttttttttttttggatttttagtaraaacagggtttcaccgtgttgggcaggctggtctcgaactcctgacctcaaataatctgcctacctctgcctcccaaagtgctgggattacaggcatgagccactgcgctcaactttgtttttctaaattaaaaaatggaagctctgagaaatgctggagtcacagttctgggaagtggcaactccagagttctgtctcctacatagccctattcctctgatggtaacagccctcaaggttctttccttgccagaactgccacttgtgccattgggcgggggggtggcaaggaaggacgccagctaattcttccacacccccaggtgacttcttgacagaacatgcaatacatatgaatgcaattcaaatttaatcaatccattctgtaggattacctcttcaggtatgcaaagataaatgcacaaagatgttagttgcagcattttttttcttttttttttgagacagagtcttgctctgttgcccaagctggagtgcagtggctcaatctccgctcactgcaagctccgcctcctgggttcacgccattctcctgcctcagcctcccgagtagctgggactacaggtatctgccaccacgcccggctaattttttgtatttttagtagagacagggtttcaccgtgttagccaggatggtctcgatctcctgacctcgtgatctgcccgcctcagcctcccaaagtgctgggattacaggcatgagccaccgcgcccggccatagttgcagcattgttaa

SEQ ID NO: 16769 - DNA, 1481 bp, Homo sapiens
ttagaaaaactatactgagccaaaaatgctggacttcttacatattggacaatgtggtaaactatttttgtaaatgactataaaaaatatgggattctctcggacttctttcctgtattatcttccttttcttcactttctgaagtttctgccataccatttcttccttgctattgtttttactcaactatacaaattaggcattgctctcctacttattttgcarattctacacatgagattttacatttctttttcggagtggtgtacatatataattttaagattcaaatgcattttctctcttcaagatgaccaacatatagtctatttactgtgttcgaggtacaatgtgacagatgtatttaatgtgcaaaaagattactgaatatggaaggagagacatgggatatcagtttaatctaccatttgggcaagttattaaaaccctgatactcacatcaatgacttgtaaaattgggcttaatatgtattcttattggctactatataaagtagctttagaaattttaaaactgcatcaaatctacaatgttaacacctgtaataattttaggggaatattatttttactcaaagaatgaatttttcaccttgtgctataatgtctaaaaagattcatttgacaatctttccttttgctaggaatctattatttaaatttgaaggcacttcctataagagtgcttgagtaatttaaatgagttactttcatatactgtgacaggtctgtaaattgttatattgatctgcaaaagttctatgtattctacaagccattagatcagacagtgcataaatataaatcttgagagtattttaaagagaaacacaaaaagccttttttatatgtttacttctatagccaggattgtttagttgattaattaggtcttcaatatatggacttattttatttatatactccaattttgaaatagtatgttcaatggatatcttctcttatgcagatcaaatcatgtagataaagcagtggtaaagggggaagagcaacaatatttcagctgaatgattttcaattaatcagcccaggaggagatgatatgaattggaaattcagaggttcaaagaatatctgatgagttttgacaggaggcccattatctactaaatatttttagcatctaactcagatattatgaaagcaaatacttatcacctacatcaaataacatgatcttttaataacaaatagagttgatttttataatactttaacacttcataatttttttctatgtaatttattatataggtgacagtgcaactttgaggttgttaggcattattgatattaacttcaagttcaatagcattattggtccagcagtacttttacttgacctatgtcttattaaatgtaatggcatctgctactacccatcacttacatttttaattgcactcttggcagcaggccaagtgagctcaaacatccc

SEQ ID NO: 16770 - DNA, 1481 bp, Homo sapiens
ttagaaaaactatactgagccaaaaatgctggacttcttacatattggacaatgtggtaaactatttttgtaaatgactataaaaaatatgggattctctcggacttctttcctgtattatcttccttttcttcactttctgaagtttctgccataccatttcttccttgctattgtttttactcaactatacaaattaggcattgctctcctacttattttgcagattctacacatgakattttacatttctttttcggagtggtgtacatatataattttaagattcaaatgcattttctctcttcaagatgaccaacatatagtctatttactgtgttcgaggtacaatgtgacagatgtatttaatgtgcaaaaagattactgaatatggaaggagagacatgggatatcagtttaatctaccatttgggcaagttattaaaaccctgatactcacatcaatgacttgtaaaattgggcttaatatgtattcttattggctactatataaagtagctttagaaattttaaaactgcatcaaatctacaatgttaacacctgtaataattttaggggaatattatttttactcaaagaatgaatttttcaccttgtgctataatgtctaaaaagattcatttgacaatctttccttttgctaggaatctattatttaaatttgaaggcacttcctataagagtgcttgagtaatttaaatgagttactttcatatactgtgacaggtctgtaaattgttatattgatctgcaaaagttctatgtattctacaagccattagatcagacagtgcataaatataaatcttgagagtattttaaagagaaacacaaaaagccttttttatatgtttacttctatagccaggattgtttagttgattaattaggtcttcaatatatggacttattttatttatatactccaattttgaaatagtatgttcaatggatatcttctcttatgcagatcaaatcatgtagataaagcagtggtaaagggggaagagcaacaatatttcagctgaatgattttcaattaatcagcccaggaggagatgatatgaattggaaattcagaggttcaaagaatatctgatgagttttgacaggaggcccattatctactaaatatttttagcatctaactcagatattatgaaagcaaatacttatcacctacatcaaataacatgatcttttaataacaaatagagttgatttttataatactttaacacttcataatttttttctatgtaatttattatataggtgacagtgcaactttgaggttgttaggcattattgatattaacttcaagttcaatagcattattggtccagcagtacttttacttgacctatgtcttattaaatgtaatggcatctgctactacccatcacttacatttttaattgcactcttggcagcaggccaagtgagctcaaacatccc

SEQ ID NO: 16771 - DNA, 523 bp, Homo sapiens
tctgtgcagtaaaattctgaatgaatattgtgtttgtcttgccttagaaacagtgaaagtgaaaatgtaggttarctgtggaatttgtcaggttgagaggctgttttggtttagaatgaactatcttaagcaaaggagttaaaattagctgatgctaaggacaagagtgtctgaagagagaactgaaggaagaatgacaaggtggtgggggtgtgggcatggtcgacacctgtaccagcagacatcctaggcgatgacatgacattctaaacagttacatgatctcttgagacccagctggactcctctactttctgtgcaaaagcctctagcagcagctcagcagccacaaaatctgtgttcacggtggccgctattttgtgttgatgatcactcatattcatcttggaagggctgtcagggatgcgggggttgggaaaaaggaagaagcattgctaccaactaccagggcaaaccaaacaggtcaactgctttcaagaactaaatgttatgagaatttaag

SEQ ID NO: 16772 - DNA, 861 bp, Homo sapiens
tgacatttacgcatataggcaatgacattttcaaacatgtaggatctcaagaaatatattaatagtatctatgagcccttcttggtggaggtacatggtgataaatccaacaacaggacatgaatgaaagacttgtaataaaaaaactgatggaaaacatttraaccatttcaatacaaagccaaggctagatagccatccaaaatgtagactctaaagaataattgccaaagagaatataaacattatgaacaatgcatatacttaatctgtctcagtaattggtttccatagacatggaaataacacatctttggatctcactgtttagatgttttttgctttgagtatgtgagtatgtaatccttgtttttttaatcaaagtaaatatctttttgttgctgttgtttatggaaatactacttacttggctccttctcattttactgtgagcctggacttaaggaaactgttcacaagaaatcagagatattatttgtgagtctactctttacctagcagcagtagaatttccaatctaaaggcagagaaaaataagtgaatcaggttaacattcatacctatcttattgacttaaaggaaatttctaaatgcaatgcctggaacctaaaaaaatggcactggaatgcaaaacgtgggactaataaatttaatttgaggcttaagagttttcaaataattcaccaaatttcacagtccagttggtaatgatctgaaggtaaagccagcctcagtcatgattctcatttgaggagtccttcacagagcaagttcccagatcttagcttatttcatcctcaaagcaaacatgtaaagcagagagagaagttattatcacca

SEQ ID NO: 16773 - DNA, 861 bp, Homo sapiens
tgacatttacgcatataggcaatgacattttcaaacatgtaggatctcaagaaatatattaatagtatctatgagcccttcttggtggaggtacatggtgataaatccaacaacaggacatgaatgaaagacttgtaataaaaaaactgatggaaaacatttaaaccatttcaatacaaagccaaggctagatagccatccaaaatgtagactctaaagaataattgccaaagagaatataaacattatgaacaatgcatatacttaatctgtctcagtaattggtttccatagacatggaaataacacatctttggatctcactgtttagatgttttttgctttgagtatgtgagtatgtaatccttgtttttttaatcaaagtaaatatctttttgttgytgttgtttatggaaatactacttacttggctccttctcattttactgtgagcctggacttaaggaaactgttcacaagaaatcagagatattatttgtgagtctactctttacctagcagcagtagaatttccaatctaaaggcagagaaaaataagtgaatcaggttaacattcatacctatcttattgacttaaaggaaatttctaaatgcaatgcctggaacctaaaaaaatggcactggaatgcaaaacgtgggactaataaatttaatttgaggcttaagagttttcaaataattcaccaaatttcacagtccagttggtaatgatctgaaggtaaagccagcctcagtcatgattctcatttgaggagtccttcacagagcaagttcccagatcttagcttatttcatcctcaaagcaaacatgtaaagcagagagagaagttattatcacca

SEQ ID NO: 16774 - DNA, 861 bp, Homo sapiens
tgacatttacgcatataggcaatgacattttcaaacatgtaggatctcaagaaatatattaatagtatctatgagcccttcttggtggaggtacatggtgataaatccaacaacaggacatgaatgaaagacttgtaataaaaaaactgatggaaaacatttaaaccatttcaatacaaagccaaggctagatagccatccaaaatgtagactctaaagaataattgccaaagagaatataaacattatgaacaatgcatatacttaatctgtctcagtaattggtttccatagacatggaaataacacatctttggatctcactgtttagatgttttttgctttgagtatgtgagtatgtaatccttgtttttttaatcaaagtaaatatctttttgttgctgttgtttatggaaatactacttacttrgctccttctcattttactgtgagcctggacttaaggaaactgttcacaagaaatcagagatattatttgtgagtctactctttacctagcagcagtagaatttccaatctaaaggcagagaaaaataagtgaatcaggttaacattcatacctatcttattgacttaaaggaaatttctaaatgcaatgcctggaacctaaaaaaatggcactggaatgcaaaacgtgggactaataaatttaatttgaggcttaagagttttcaaataattcaccaaatttcacagtccagttggtaatgatctgaaggtaaagccagcctcagtcatgattctcatttgaggagtccttcacagagcaagttcccagatcttagcttatttcatcctcaaagcaaacatgtaaagcagagagagaagttattatcacca

SEQ ID NO: 16775 - DNA, 861 bp, Homo sapiens
tgacatttacgcatataggcaatgacattttcaaacatgtaggatctcaagaaatatattaatagtatctatgagcccttcttggtggaggtacatggtgataaatccaacaacaggacatgaatgaaagacttgtaataaaaaaactgatggaaaacatttaaaccatttcaatacaaagccaaggctagatagccatccaaaatgtagactctaaagaataattgccaaagagaatataaacattatgaacaatgcatatacttaatctgtctcagtaattggtttccatagacatggaaataacacatctttggatctcactgtttagatgttttttgctttgagtatgtgagtatgtaatccttgtttttttaatcaaagtaaatatctttttgttgctgttgtttatggaaatactacttacttggctccttctcattttactgtgagcctggacttaaggaaactgttcacaagaaatcagagatattatttgtgagtctactctttacctagcagcagtagaatttccaatctaaaggcagagaaaaataagtgaatcaggttaacattcatacctatcttattgacttaaaggaaatttctaaatgcaatgcctggaacctaaaaaaatggcactggaatgcaaaacgtgggactaataaatttaatttgaggcttaagagttttcaaataattcaccaaatttcacagtccagttggtaatgatctgaaggtaaagccagcctcagtcatgattctcatttgaggagtccttcacagagcaagttcccagatcttagcttatttcatcctcaaarcaaacatgtaaagcagagagagaagttattatcacca

SEQ ID NO: 16776 - DNA, 507 bp, Homo sapiens
tgagcaagtgatctttgccatatttttataccagcaaatttaggtagaaaccarcccatgttcgtggtattcagccatgcccctgaggaatacatggattttctcccatcttgcactctcccagacactcctgaagtaaacgtttatttgggaacttgtagaaatgtttctttaatataaattcttaaaagtaggaatgctggttatatacatacaatggaatattattcagcctttaaaagttaggaaattctgacccctggtacaacagggacgggccttgagggcattatggtaagtgaaataaaccagtcaccaaaggacaaacaacatatgattctacttacatgaggtaatagagtagttaattcacagagacaaagtagaagggtggcttccaggggctgtgggtaaggggaaatgggactggtgttcagtgggtgccgtttccagtttgcaagatggaaaagttctagagatctgtggcacaacaatgcaaacatacgt

SEQ ID NO: 16777 - DNA, 548 bp, Homo sapiens
taaccgttttgaatcatgttttgaaaatatctaataatgttaaatctgcacataccctgtgaccacataattccatctcgccsttgtgtacaagatgacatttataagaaaattcattgcagcactgtttgtaacagtaacaaatcagaaacattttgaatgtttatccacattgaatacaattttatatagtcatatgaaatatgctaatacacagttaaaggaatgtatttgatctatagtatatgtacccataacggtactttgaaaacataatgtttaactaaaaaatcaacatacatatgatctcctttctgtcaaatggtaaaataaataaaataatgttataggttgtttatgtgcctgcatatatgatcaaaatacaaacacatggacaaaacaggaacatacccttctaccgcgattgcctctagggaatgagagaggaccaaaaagatgaagggggtgggcttcaactgtatctgtaatgttttatttatttttaaaatgtcatggccaagttttaatatttgccatatctgggttgc

SEQ ID NO: 16778 - DNA, 518 bp, Homo sapiens
ttttttaaaaatctcccaggtgattctaatacatctggttgagaaccactgggttggctgatggtgatcagaaactgacggacagcaatagttttccttgactaattacataatacagttcaagcaatcctcagttgacatgaattcacacctcaagtgtgttaatatggccagcatttactgtgcacataccctatgccagacacaaatctaaaatatctacrtgtataggctgacttagtctcagagaacctacaatggtctcccacttcacaaatgagaaaaacaggcagataactgcagtaactcgcttgtgtcacggctgcaatgtggtgctgctaggatagggattactatacggcttcttgatactgccatcaaatgtgctatacaacacctgagagtcagtgatgaatggaaagatcaaagaatgctggggaatgcagaacagtttctaatccaaacgcctacagggatcaggaggtaagatacctgagggaggtgggcaggtgtatatg

SEQ ID NO: 16779 - DNA, 560 bp, Homo sapiens
ttttaattcttcattttaaattagttcctcattttactatttcctgatataatctccctttccttatgcattggctctattttattgcccatttgtggtttcatcatgtgtttcttgatgcacggtaaacgtaaccacacagccatataaaattggaggaccattttctgttggctttctattacctttctgagaaaccaatgtttcattgactgttaaaggctgaattttaagctcattatcttagagtaaaatttaaaatagtccttagatgttttttcttatattgttatctagaaatcagcactcagttcatttgatyagttcattgtacaaatactttatattagagttgttcccatgtaagatattttgtatatacagaaaacagcttgtcttgagaagacagagagaaatggatttaatctagatatatcaagagagacataatagctaattactgagatatcatattaaaattattaggttataggggcaactcttaaacctctgaggaatattgtagatctttattgtagacaccattaaagtggaataca

SEQ ID NO: 16780 - DNA, 652 bp, Homo sapiens
tcaagatattgctacttggtccatctatcctttctgtgtgcatattttaaagctaatctcagacaccatgtgatttcacccctgctcactaaatatactccactgtctacaacatatggacatttttcttacataggcacaatgccattatcacacctattaaaattagtaacaattccttgatattatctatattgtgatcacayccagtctatattcacagatttccctaattgtctttaaaacaccaaacagtagattcgtttcctgtttttctcaactctcttttaatcttgacatctagagtagcccattcttactttttgtgtggcattaacttgaagaaaactccttaactgtcccatagaatgttccatattccagatctatgtgttgcttccttgtgaagttgtttaacttggtccactaacctcctattgtaaacttggagttggttctatcagcttagttcagttcaggtttgacttttaggcaaccatacttcatagctgctgctgtgtgttccatactacatcatatcaggaggcacagaatgtcagcttgtctatttttcaatgaagctgtgattgaccaatatgttcaggagatgccagctggatcccactattgtaaagttcccatctgcctttta

SEQ ID NO: 16781 - DNA, 390 bp, Homo sapiens
tgtgtctaattcatctctaacttcacggaataggtatctactaagaaccttacacaatgcaaaaggaaatcaaatcagcaggatacaaatgaaatgcaaggaaagccagggcggagggaggagcaggtttgcagctaggacggacttttcgcaagccckcctggctcctgtctgtctaggcctcagggctccctgcagaagcaccctcacaaccccactgttctttcacccttggtgcgtcccaagggccttggcatcaccccatgctcagctctaagaaatgatccaggaccagaaccccacaggcaatgaagcttgtctccacaggcgacaggaaagcctcggggctggaggatgcatggtctctgcagttacaatcaccctttgccc

SEQ ID NO: 16782 - DNA, 532 bp, Homo sapiens
catttgagctaaatatatatatagatatatggaccaggcatggtagctcatgcctataatcccaacactttaggaggctgaggtagaaggacagcttgagcccaggagttcgagaccagcctgggcaatattgcaagatctcatctctaaaaaattagctagctaggcatagtagcacacaggagctagtactcagctactcaggaggctaaggcaggaggatatcttgagcccaagaggtgaaagttgcagtgatcagcgttcatgccaccgcactccagcccagatgtcaaagtcagaccctgtctcaaacacrcacacacacagacacacacacacacacacacacacacatacatacatacatacatacatacatacatacatacacgatgggggccacttaatgatgtagggctatactcacagatggtaggttaaaaaaaagctgaatccccaactgtatctcctacaggcgactatctatgttgaatatgtatttacatacaagttaaactcgtgcccgagttaa

SEQ ID NO: 16783 - DNA, 589 bp, Homo sapiens
tcagagtttacatgctgtttctttattttaatacaactttttatactaatatttctgatgaatctcttaatattacctaaggcatccctctattgagatatctgatctccagaatcctaaggcaactaatcattgtttctccctcttaatagctagttcaactggttttgctaacaagagtccttgagaggcaattttttggaccctgctttgcccacacaagaggtttattatgacctctgagatgttcattcatgaatgatatttttttctccaacaaaagtggaggactaacactgttgaactttacctgagtcccatgcttacagagaacgcaatggctaagaactgctgctccctctgccccccacacctccaaactttttgtgttctggaaaatgggcaaccagragggaacacctgctctcccatactctgagattaagacttacctccactcttcctcaatggcactcttgttttatgaaactagattttctccctcttattttagacagttatcattaataaatattctccccattagaatgacctgaataaaattacctccttaattatctggctcatt

SEQ ID NO: 16784 - DNA, 505 bp, Homo sapiens
acgaagtcattcaagaagcaggctctgtccaagttgtgagatcctttttctgtctttccctatggcaatgtctatctctgcatggccagaagttttcatcaagaaagcagggagagggtgtggatgagacacatccataggttaagagctaggtgtggcggtgcatcgggcttcctctcccgttccactgrggagtgcgtagtcaccgaccactcccagctgtggaaagcaggcaccgcagtccagatttgtgattgggaagaaggcagggcagatctgatggatctctagcagtttcccctcagtaaccatctctctagtgcctaagaaatggtgcctgatggttcattcattgtagcattatttttaatactagatttattttaaattcagactgtgttatatgttataatacctttattttatactggaagcaagcgtcaatgtaggagagtcttgaaacccagcaccagatagtggttgctaatcccagtcttccatacaa

SEQ ID NO: 16785 - DNA, 564 bp, Homo sapiens
tcccttcatttcccttaagtgatacttttagttaatttattatttatagaaacaatgctaatgactggtttgctgttaataagtatgtgggtaaatctctgttcggggctctcagctctgaaggctgtgagacccctgatttcccacttcacacctctatatttctgtgtgtgtgtctttaattcctctagtgccgctgggttagagtctccccgaccaagctggtctccgcaccgggaggcagaggttgcagtgagtcaagatcgtgccactccactccagcctatgtaacaaacagcaaaactccgtctcaaaaaaaaawaaaataataataataacaataacactggtccagaagccaggacacccatggggcactaactgaggaaaatgagaaagtgggggatttgcacaatcctagttgtacaggactcccacataaaacaacctctactgaagagacttacagtgaaagcttaacaccaaacaagaaacaatttaccaaaagagacagtcgacacaactggcaaaacctgtgcccaagagctagaaatagaaaagtaa

SEQ ID NO: 16786 - DNA, 559 bp, Homo sapiens
cagggaaaccaggaaaactccctgggaaagagaacgactctgctgcaccccatggcaaaagcaggattttagcgggttaccaaaagatggatccacataccagaggggaaacagcaggagcaaaggcacgtgacccaaaggcacagggtgtaccctggcaggagcagcccacacagactactataaatgtctactgaatagcaataatactaacaacaataacgatcattcatcatgagtaatgggtaataaaaataaggagcagtgaaaggaaacctaaaggactcaaataccagggtgaccttttaaactagtggggacacactaaacattttcagcagggaagcggcatggtcagagccatgcctcagttagattcatttggctactatgcatgagttaagtttgcaggcaaagagactgcaggccaaggtctggaagctattgtaacagtccagatcctcacagctgcagttgcagtggtggcygcagtcatccaaaggaatggataggtacagacaaaaatgaacaaatatgcaatttttattagcaattcctg

SEQ ID NO: 16787 - DNA, 589 bp, Homo sapiens
aggtatttaatgacctctcaaccaagcccctcctacattttcaggcttgtttcctgacgtacttagctttgcagcaggctcagcacaggctctgctctttcccacctgccgcctgatcccctgagtgtgtagcgatggcctccactcatttcgcaacccagcccctacccatccaataagatttggctgaggactttgtgcagagtatgtttctctctctaaaccttttacaatcttctttctctaaattccagggtgcatctactattgtgtctttctccacctgtgtcctggagataactrttgcagttatttgtcacactattacagtctccatttcaccaagtagttatttttctaatttaaccataagcatcttgttgactaagtagtagcacttttaactctttgtctatattccaaccgtgtccaagaaccttttctcgaataagcgcagaaaatagacattacttgcctttcatgttattcctcttaggcacaattagccttttcattttcttagcaattctatcattttgcagataagtcctttacattattggtttaaaattatatcttaacatgctca

SEQ ID NO: 16788 - DNA, 532 bp, Homo sapiens
tgtgtctttggtcattaatcatgattgagatacccaattgcagtagtgtaattctttttgatgttaaatgatctaggatgactgtggagacccagttttgactcataaaatataaatctgctcttgggctactggtaaataatttttctgtaataaaagtaaggcccatgaggaaaatgttgtctttctatctgcctttggataaattctgtagactgtgatgattaattatttttgatttctctgggagcaagtttgaggatgaaagtctggatcctggagtttcaagaaagataaaaatcccctagtttttgcaaagatgaacttgtagagccttctgtaactgatttgccagtggaaatttttaagcaagataataaacgttattattgtttaagccagttttaatcaagcattttgttactgcggccaaaggcaatttaacttaacaacatggagaatgtgatactaactagsgctgaatgtgtgcctccagatgtaaaagttatgagattgggtagctgccaagggc

SEQ ID NO: 16789 - DNA, 528 bp, Homo sapiens
taggttatcacttgtttttcagatttagccatatgctaaagtgagcattttattcattgcacattcatgtcacatactaccagaaaagacaagcagaagctgaaaataaaatgtggaggcctagcaaaaccttccacactcatcttaatgcaactattaaatgcttcattaaaaatttttagaaatctagggaaaatatatgactaaatggggtgctaaacttctcgcattaatgaggattgttctgagcaagtggaaacataaggaattctacctataagcaaattcctgtcatacttttaaatttttatgcccaattatttatatgggttatgattttgtacaattacttatcactcagtgcttttsttacacatttaaatgaaacaaacttgtgtggcctctatgatgatgtctgtaaaataattaaataccagacctggagctgagctgcagtagacaaggacatttaatcccaggctacagaaatcataaaagcatctattctcttccaagtggccagccaac

SEQ ID NO: 16790 - DNA, 519 bp, Homo sapiens
gatagagagggtgcaggggctcccctgatgggcacattttcccagctctgcagagcctgcctatccaggagccccaatcctggcctctgctccctgcaggctctgagaacttgggcagcaaatgccaccttcttgatcatccagacatctgattctctagcatggtgtttcacatattatttttgttcctccccatggggacggacacaggaggttgcacagagtacgtgcagaaaaccaccaaactccagtcctcttatcttcacattcagagagagaktccggaccccagagtacagaagtgaattgcccaaggtcacagggctggccagtagccaggtcttctgactaagccacctgccttccatcagcaggaagtgctcatcccatcccaaggagggccagcctgaggggagaaggtggagggtttggggaaatagagactaccgctggaattttctttgtgttcctacccaccaggcttcatttgggatctgctcttcccccagcagactttca

SEQ ID NO: 16791 - DNA, 549 bp, Homo sapiens
agatgcattccagaactccagtggcaggatctgcccttgccgggatcatgcagacttggcattttccagtacctactgttgcttgaggtttcttataatagagcaggatgagcaacacgacttctcgttttgtaatttggcacatatgtatatgttttatacatacatgctatgtgtctatatgtacacayggcaatacatacgtgtatatgtatacgtatatatgtatgtcaacgaatacctaaatatataatcatatgaaacaaactgtttatccctgttccataaacttcatatcaattcaataaataaaatttattcaaaatccaatcatcccaacacattaacatttaatttttccctattttctgtctgtgtttgtcattgaatattaaaagttttgcttttttttactatttcacctcttttctaggtagtccataattttaaaacaatatatatggcaccacttggtcttcacagctttcaagacaggactgtcaaggcaaggacactccttaggggaccctgtcccataaagtcaaatta

SEQ ID NO: 16792 - DNA, 549 bp, Homo sapiens
agatgcattccagaactccagtggcaggatctgcccttgccgggatcatgcagacttggcattttccagtacctactgttgcttgaggtttcttataatagagcaggatgagcaacacgacttctcgttttgtaatttggcacatatgtatatgttttatacatacatgctatgtgtctatatgtacacacggcaatacatacgtgtatatgtatacgtatatatgtatgtcaacgaatacctaaatatataatcatatgaaacaaactgtttatccctgttccataaacttcatatcaattcaataaataaaatttrttcaaaatccaatcatcccaacacattaacatttaatttttccctattttctgtctgtgtttgtcattgaatattaaaagttttgcttttttttactatttcacctcttttctaggtagtccataattttaaaacaatatatatggcaccacttggtcttcacagctttcaagacaggactgtcaaggcaaggacactccttaggggaccctgtcccataaagtcaaatta

SEQ ID NO: 16793 - DNA, 528 bp, Homo sapiens
ttgtcaatctctacattaaatattagcaatgattgatttattgtatggataaaataaatagaaataaaaatggtaactatgtyttcatgtactccaatagatcatgatactttggagataactagtctagagaattaaaggaaagaaagtactgttatttcagacgtacaactactggaagttataataccttaaatctattaatttaaatgaaatcatagagaaggcaagttaacctttttaagattaataatcagtcaacacaatgaaggcaaacttctaaattttaagctaaacgtggaataacttattcaaattgagaggcaaccaacctggagcccaagtagcaactctagaaaaataaagactggctggtcccagaacagacaaaaaagcttcaaatatctaataggatattagggtgggagtatatgtttacctattagttcgaactgtgtgacttgcacatcacaaagacacaatgtgagccagctcaagcaaaaagagaaatgaattaggaggatactg

SEQ ID NO: 16794 - DNA, 321 bp, Homo sapiens
tccatgcttagcacaatgcttggtacatrggacattctcattttattttgtggcttgacaaacaattaagatgtcctcccatcccccatattatgatagaattcaaattttgtaagcaactgttagctgatttttaaattcaatatctgaaattaatttcattttaatgtcaactttattgttatactacatttctgtatttggtcacatatttaaatgtagaatatagtatgtagcattaatgcccaagttggtaacttttaaaatagtttctccatactttaagcactgatatttttgagcctaaatgtgagattttcc

SEQ ID NO: 16795 - DNA, 559 bp, Homo sapiens
tcgcccaggctggagtgcagtggcgggatctcggctcactgcaagctccgcctcccgggttcacgccattctcctgcctcagcctcccaagtagctgggactacaggcgcctgccactacgcccggctaattttttgtatttttagtagagacggggtttcaccgttttagccgggatggtctcgatctcctgacctcstgatccgcccgcctcggcctcccaaagtgctgggattacaggcgtgagccaccgcgcccagccatgatttttaattatttactttcattttagtgatctttagaaaatggaaaggaaggtaacatgcatttaatctgtcatatttatccaagtgaaccctgcatttttaaaatgtatttttagtttttaggaaaggtatctttttggcaactatgtgagatcagagccctgtgactctgattaaatctgcgctaaatttgtctccattttttattgattgtgttatgtagcttctataagcatccaaaagagtcactgatggatgttattccaagttgatgtgtcttctcaaacggtgct

SEQ ID NO: 16796 - DNA, 2078 bp, Homo sapiens
attaaaataataataataataatattgcctcagttttctttccctgttaataatgaatgcttggttgaaatctaatcaacttcttctccaggtttgtttctcccgagcccatcctgaatcttctttcaatattaggtcctcccttggatttttgtgccaggttggtgtcaaaagccagagcactgctctccttaccaccgcctccttcctttaccctgtgatggaggtggttccacctgagaaggtggttggctgaccagacattccttttaaaacaattgctttacttctttcttttctggggttcttgcctatggccagagagaagttttgctaaggcaaactaaaccaattgttagctttcaaaagaacttcaaaacaaaatgaaaaagtacttttgacttgtggtatcataagaatgtcttaactttttttattttttattttttttttttttgagacagagtcttgctctgttgcccaggctggagtgcagtggcatgatctcggctcactgcaagctccgcctcctgggttcacgccattctcctgcctcagcctcccgatgagctgggactacaggcgcccgccaccgcgcccagctacttttatgtatttttagtagaggcggggtttcaccatgttagccaggatggtctcgatctcctgacctcatgatccgcccgccttggcctcccaaagtgctgggattacaggcgtgagccactgtgcccggcctgtcttcgctttttaaaagcaaagttttaaaagtttggaaaatttccaaaatagaaagttggagaagagagtaaaactgtgctcatcctgcactgataattttatttccttccatgagattctgtgagtagaaaaagaggtgccttttgggaatccacgttaatttagattttcacgattttttcttaaattataatttttgtgtactaaatattaggcctgtgagatttgcaaagaaaaaaattctccctggtcgccaactctgcctcatgaatacatggcatttatcccaaaggggatagagctgagaatgttaggaacttaggagaaaccctcttcagtgctagaaagacacatccaaagctcatgccttgccaagaatgagccactagggctgtcatcacaaagggcagcacattgcaacttctaacactactataaatgtccaacttaataccagagagtggtgtgggcagaggatcatctagcttattactacttaagccaaaagaatttaacttgtccggactatttgaaatacccatttattagtaaatttgatgagttgatgatgggtacaactaactctagctgagtcagcctttgtggcttttcatatacttacttacttagggaaatagagtgggaaggtggtacccatgagtaatttgctgcaaaaataatagcattctatcacaaacacaggatttggagaaaaggaaatatacacatatgtatatggagatatatatgacatatatgttaccaataacatatatgatacatataattataattatgtgcatatattatatatgtataatatacatttgtatatgtaacatatacacatctgtattatattttgcttttgctagcttttatctgctggttgtttttattggtttgttcttcattttaatttctttaatttttaatttttacaattttttgtagagacaggtcttgctatgtatggtacctaggctggtctgaaactcgtgacctcaagctgtcctcccaccttggcctcctaaagtgttgggattacagatgtgagccaccaagcctggcctacttacttatttttaggtaatcagttcttttttaattagctcagcagtgagaagaggtcgcaccgatggctcatgcctgtaatcccagcactgtggaaggctgaggcgagcagatcatttgaggtcaggagttcaagaccagcctggccaatacggtgaaaccccatctctactgaaaawacaaaaattagccaggtgtgctggtccatatctgtaatcccagctactcagaaggctgaggcaagagaattgcttgaacccagg

SEQ ID NO: 16797 - DNA, 557 bp, Homo sapiens
ctatttggatcaaccttaagtcagagatagaagtgcaaatcagatgagggttttttttttttttttttttttggagacagagtcttgctgtgttgccccagctgaagtgcagtggcacagtcttggctcactgtaacctctgcctcccgggttcaaataattctcatgcctcagccccccaagtagctgggactacaggtgcccaccaccatgcctggctaattttttgtattttagtagagatggagtttcaccgtgttgcccaggctggtctcaaactcctgacctcagtcagtccatccgcctcagcctcccaaagtgctaggattccaggcgtgagccactgctgctcggccagggtccttaagttcaaatcatggagcagtccacagagcactcttctcaggtgcagagtggaaaggactttgatcgtggactagtatttttagtcacatccacaggcctttgaaagggaaaaaatayattattgataggtcctgttttttgaggaaaaaaaaaaaacaagcattcctaactacctggcaaataatttcttc

SEQ ID NO: 16798 - DNA, 544 bp, Homo sapiens
tattctaaattgttaccttttttataatccaactaatttggttggcctcaagcaatcaatatatgtaggtaactttcattagatctctgtggaaaggatttttggaaacatgcagaattcccacacatcatttgggttagaataagttatgaaactgtgcagacaaccctaaaatttcatctacaaggtttgttgtgggttcaggtgactctgcagatcagttatcttacatatgatggctcagctttctagactttttcgatacctgcttccatgatctcccaggctggggaagagacggctgcagagttgagcactgggaattaaatgctttattccagaagtgacaaacatcacttctcatatttttttgatagaattactcrtatggtccctcctaatttccttgggatgggaaatgtagaagagaagcagatattgatcaatattagtaatgttgatcatatccagtattgatttattctacttactgaaaatgcctttgaaatatgagacactactcatgatatgtgggtgaaactac

SEQ ID NO: 16799 - DNA, 1908 bp, Homo sapiens
atgcctagaacagtatctggcacatagtaaggattcaagaaatatttgttgaattaaataagtgaatttatccagcaaatacaactgccccaggccaccacactccatggatattcccctgaagtgagatttgattgggcatgagctgcagaaacaggatagagtgctggagctggaagagaccttgggatcactgacttctgccctttcacagggctgccggggcacacagggtgtaaacctgccgtgaggcctggggctttcctgtgatcttaaggaggctgccttgttgagggagatgcccagcccagtggctctgcggtgtcttctccaacatcactgggcgggagcacaagggaaattccttaggcagtgagagctacccgagaaaataaacttgggaaacccaggttctgcggatctcttacttctcagggctgcaggtaagtttctgtgtgttgcgattctctgagatgaaatgactgtacatctcatttctcaaacttttttttaagccttttttctggtgaatccttttatgggatttgtctttccagggacacatttgggaaaacgctgcttttttgcctttttactggctgaagcaccttctgaacaggcatggggaagctrcaggggtcagtggcttttgttagctaaagaacccagagatgggacttttcctttccttaaggccagggcttgccagctcctcccatcttttagaggaaccccaaagcatacccttttctacattctgctaccccctggccccccccagacctgaaatggctcccttcagtctctcttttcttcagccccccaacacttgtctcaccaggcccagcttttccttctggatgtcgcttgccgcccgcctatcctcccacctgcctcctgaggcctggtttggaggttctcctccttccaggagcccagcgctgcctctaggagagagaattatcctggaaactcccccttctccctgcctgacagcagcccctgctgaactccacagccgcagctgggagccatttaaatagctgatgcagggtgggctggtggctactgcctgtaatcccacactttgggaggctgaggtgggagcactgcttcagcctaggagttcaaaaccagcctgggcactatagcaaggaccctgtctctaaaaaagaaaaaaaatagctgatctgcatctgaaaggagataagcagtttcctgagcggtatactgtgcagtatccagcttcgtaaactaagggcatacacactgtagacatgtccatgcatatctgcacaaggaaagaaaacgcatggaggtgagggtgttggtggctaactctgggtggtgggatttggggtgatttttttctcctgcgttgcttagctgtgcttttaaattttattttttcacgtatgtttgcaacaacgaaaactcatgataagtgtcaataaatcggcagctctcgtttggttcctcattagctgtgtaacctcaaacaaagtacttaacctctcaggctcctcatctcaaatacatcccacctccctcctcctctgagatgccgcgggattcatctctctcccacagccagattgcaagcagctagagagcaggcaggtgagtgtcttcccccctacagactcccgtttcccccgcatgcccatgtggtgcctggagcgctgcagcattgtgatttttttattattgcaggtgctaaataaatcctcagtgactgagcccggagccaaacacatttatccttgtcatccatccaattctgtgcagctgggatggagcccaaggcgctgaggacaacataaatctgctctttgggccacacccatttcttctccaagcagatgtggtagccgggagccaagtcttgggggctcagcgctgggctga

SEQ ID NO: 16800 - DNA, 540 bp, Homo sapiens
cactctgatgcctctgttccttccttccctgctggtggccttgacaagtgggcgacagtcaagagccttatcctgtccgtctggttctctggggcgccctcaggctgcctcaggtatagtttgtctttggtgtcctatgtgctaggccggaactgggcataccaccaacgtcatgtttaactttctgcggaatgcaggattcttttccaccttacaagtgaggaagcacacatgtaaagaaacaacagtaaccctcagtatccatgggggattggttccaggaccccctgcagatagaaaatccacagatgctcaagtccctgatatatttgcatataacctatacacatcccacatcctccctcttatatccttttttttttttttttttttttgagacagggtctcactctgtcacccttgctagaatgcagtggcacagtcatggctcaccgtagccttgacctcctggactcaagtgattctcccaccttatcccctcgagtagctaggactacargtgcacatcaccatgcccag

SEQ ID NO: 16801 - DNA, 520 bp, Homo sapiens
cccactgacccagctttattcatgagcaccgtagagatcatgacaacaggtaagtagttcaatgttccacatggctgtgcttatgagagatcatgaactatgggatccagtggcttccaagtcattttaattttaatatggaaatttccaaacatactcaaaaatacaaaaatagttgaatgaatctctatgcatatccctcagctccaacagttaccaactcctgatcaatcttagtttttctatactctgcctagtttccctatccactgagtaggaatcaatccagccatcatagcatttcatcttgtaatattttcctctaaagtaggaacacataggtatctctggaactatgtgtgcactatcttcaggacactgctgaaggaggagcaagaactattcctgtggttcttaaaattcaatacaagtaatcacacctttgatccacctgtrgggactgatccctcttgtgggagcaaagatggggccatggtatataaaatataaatataaaact

SEQ ID NO: 16802 - DNA, 548 bp, Homo sapiens
actggtttctcacagtgagaagttgtatgtgtaggccctggcagacctactgcaggaagaaatagaagctggaagcagacagactgctgacgggatcctcccttagcttagcagcatggtataaaatgcagtgaggtctgtgacctagctggttcttggctctatgaagatgatatatgaccaccaaacttcagtcttgcttgtgtgaaaaactctaaagacaagaartctgcatacactcactcacttgtatcatcaactgataatctttgcaccattgtttgctggtttgaaaatgaatcaaggagaatacgttttgaatgaggccaagacattttttttttccaccagtcacggatgtggagcagggtgtgtatcaggcccagctcagggtgccgttatgtgacaatgtgaggattgtgacagcatttggagagggtcctagtgatatctgtatgctatattcaaccacaactaccattcctacaaggtccctgagtggaagagagagatgtacaaagatgcaaagaaaggcaacacattactag

SEQ ID NO: 16803 - DNA, 633 bp, Homo sapiens
aattaggacattatgccaagtgattgaaatttatttgcataggaacattatattacttgtgaataccactaggagaatgaaggggcagtggggctgtttgggttgagaaactgagactcttttgtgtgatggaacaaatacactgttctggaagaagaaggaaactcagatcttttgctggccctaatgttgrgcagctgagtgaccttgggcaagttacttcatctctccaggcccccatctccttgtttttggagtgttgaggttacattattacatcactttgtagagccttctcatttgggactttgtaatccatgagggaaactgtctgcaagccccaaagcccttaatcttgattgaaatatggtcaaaaatagatctggaagtaattttaaaaagcaatttaaaatgttaaatatgatgtattagacttactgaaaaatatgaccagcaactttatgttctcaactttttaccaaactctttgaacactatttgtttttacaagagagaagtcttataataaatgagcagagcatctgaagactaatcacacctctagaattacctggagatgacaattgcaattgttttggtaacaaagaatcctctctgctcttctgccctaaa

SEQ ID NO: 16804 - DNA, 676 bp, Homo sapiens
acacttattgactttccatgatgaacattgctggtgtgtgaaaaatagaattatctaaggtttttaaaacaatggattcttggttgtaatttcccaaggctctaagcaaatcatttagctttttaactgtggacttggtcagtccacgtttatttattttatttatttatttttatttttattgtttaatttatgtaattttattatgtttctctgagaggctttttaattttttttactatgaaaaggttgtaatagaggtgaayacacagcaagtgcacacacagtgaggtgttgctatcacagaaaacactgtgagtgattaaaaaatacatgccacttccatccttcacctagtaacagaagggtctaagccaccttttccttggcccactcctcaaactctctctcctcctctgtatggtgtcttggtactgttaatactcagacaccaggttgttcatgttgctctcgacctcagcgaactccacgtcatgcatgcccttgcctgagtaccagcttaggaaggccttgcacctgaacttggctgtgaactgctccaagatacacctgaacctgaacagctcctggatggccgtgttgttactgatgaaggtaacagacatttttagctcaaggggtgggatgtcacaagcagctctttccacattgtggg

SEQ ID NO: 16805 - DNA, 676 bp, Homo sapiens
acacttattgactttccatgatgaacattgctggtgtgtgaaaaatagaattatctaaggtttttaaaacaatggattcttggttgtaatttcccaaggctctaagcaaatcatttagctttttaactgtggacttggtcagtccacgtttatttattttatttatttatttttatttttattgtttaatttatgtaattttattatgtttctctgagaggctttttaattttttttactatgaaaaggttgtaatagaggtgaatacacagcaagtgcacacacagtgaggtgttgctatcacagaaaacaytgtgagtgattaaaaaatacatgccacttccatccttcacctagtaacagaagggtctaagccaccttttccttggcccactcctcaaactctctctcctcctctgtatggtgtcttggtactgttaatactcagacaccaggttgttcatgttgctctcgacctcagcgaactccacgtcatgcatgcccttgcctgagtaccagcttaggaaggccttgcacctgaacttggctgtgaactgctccaagatacacctgaacctgaacagctcctggatggccgtgttgttactgatgaaggtaacagacatttttagctcaaggggtgggatgtcacaagcagctctttccacattgtggg

SEQ ID NO: 16806 - DNA, 676 bp, Homo sapiens
acacttattgactttccatgatgaacattgctggtgtgtgaaaaatagaattatctaaggtttttaaaacaatggattcttggttgtaatttcccaaggctctaagcaaatcatttagctttttaactgtggacttggtcagtccacgtttatttattttatttatttatttttatttttattgtttaatttatgtaattttattatgtttctctgagaggctttttaattttttttactatgaaaaggttgtaatagaggtgaatacacagcaagtgcacacacagtgaggtgttgctatcacagaaaacactgtgagtgattaaaaaatacatgccacttccayccttcacctagtaacagaagggtctaagccaccttttccttggcccactcctcaaactctctctcctcctctgtatggtgtcttggtactgttaatactcagacaccaggttgttcatgttgctctcgacctcagcgaactccacgtcatgcatgcccttgcctgagtaccagcttaggaaggccttgcacctgaacttggctgtgaactgctccaagatacacctgaacctgaacagctcctggatggccgtgttgttactgatgaaggtaacagacatttttagctcaaggggtgggatgtcacaagcagctctttccacattgtggg

SEQ ID NO: 16807 - DNA, 676 bp, Homo sapiens
acacttattgactttccatgatgaacattgctggtgtgtgaaaaatagaattatctaaggtttttaaaacaatggattcttggttgtaatttcccaaggctctaagcaaatcatttagctttttaactgtggacttggtcagtccacgtttatttattttatttatttatttttatttttattgtttaatttatgtaattttattatgtttctctgagaggctttttaattttttttactatgaaaaggttgtaatagaggtgaatacacagcaagtgcacacacagtgaggtgttgctatcacagaaaacactgtgagtgattaaaaaatacatgccacttccatccttcacctagtaacagaagggtctaagccaccttttccttggcccactcctcaaactctctctcctcctctgtatggtgtcttggtactgttaatactcagacaccaggttgttcatgttgctctcgacctcagcgaactccacgtcatgcatgcccttgcctgagtaccagctyaggaaggccttgcacctgaacttggctgtgaactgctccaagatacacctgaacctgaacagctcctggatggccgtgttgttactgatgaaggtaacagacatttttagctcaaggggtgggatgtcacaagcagctctttccacattgtggg

SEQ ID NO: 16808 - DNA, 676 bp, Homo sapiens
acacttattgactttccatgatgaacattgctggtgtgtgaaaaatagaattatctaaggtttttaaaacaatggattcttggttgtaatttcccaaggctctaagcaaatcatttagctttttaactgtggacttggtcagtccacgtttatttattttatttatttatttttatttttattgtttaatttatgtaattttattatgtttctctgagaggctttttaattttttttactatgaaaaggttgtaatagaggtgaatacacagcaagtgcacacacagtgaggtgttgctatcacagaaaacactgtgagtgattaaaaaatacatgccacttccatccttcacctagtaacagaagggtctaagccaccttttccttggcccactcctcaaactctctctcctcctctgtatggtgtcttggtactgttaatactcagacaccaggttgttcatgttgctctcgacctcagcgaactccacgtcatgcatgcccttgcctgagtaccagcttaggaaggccttgcacctgaacttggctgtgaactgctccaagatacacctgaacctgaacagcycctggatggccgtgttgttactgatgaaggtaacagacatttttagctcaaggggtgggatgtcacaagcagctctttccacattgtggg

SEQ ID NO: 16809 - DNA, 547 bp, Homo sapiens
aattattgtaattaaataaatgtatctgaattgtgtgcaacacaaaagaatgtttgtatctcatacatatttatgttatttcctcaattctttttcttgtgatttccttttggagttagagctaacaatgtagatagtgttcccatttttacatattttattttgatacagggacatactctaagaatgaactgtttggggggttctcaaagcatctataatcccccaaagttactttttytcacttaaaaaatactgtttgtatgactgatttgatcagtatttcctctagtcaacttcttgttttttaatcctgaaatacagattttactttttacttttattctaattttttgattggataaaagctgatttttaacactgtagttttaaaaaactacagttaacttagctggctttgtttcttgccttgcaaaaaatatagattaatgaattttcattttgaagatctgttcagtcatttttgcataccctcagagaaagttttcctttattgctctatttaccatgttttctttcctttctt

SEQ ID NO: 16810 - DNA, 547 bp, Homo sapiens
aattattgtaattaaataaatgtatctgaattgtgtgcaacacaaaagaatgtttgtatctcatacatatttatgttatttcctcaattctttttcttgtgatttccttttggagttagagctaacaatgtagatagtgttcccatttttacatattttattttgatacagggacatactctaagaatgaactgtttggggggttctcaaagcatctataatcccccaaagttactttttctcacktaaaaaatactgtttgtatgactgatttgatcagtatttcctctagtcaacttcttgttttttaatcctgaaatacagattttactttttacttttattctaattttttgattggataaaagctgatttttaacactgtagttttaaaaaactacagttaacttagctggctttgtttcttgccttgcaaaaaatatagattaatgaattttcattttgaagatctgttcagtcatttttgcataccctcagagaaagttttcctttattgctctatttaccatgttttctttcctttctt

SEQ ID NO: 16811 - DNA, 547 bp, Homo sapiens
aattattgtaattaaataaatgtatctgaattgtgtgcaacacaaaagaatgtttgtatctcatacatatttatgttatttcctcaattctttttcttgtgatttccttttggagttagagctaacaatgtagatagtgttcccatttttacatattttattttgatacagggacatactctaagaatgaactgtttggggggttctcaaagcatctataatcccccaaagttactttttctcacttaaaaawtactgtttgtatgactgatttgatcagtatttcctctagtcaacttcttgttttttaatcctgaaatacagattttactttttacttttattctaattttttgattggataaaagctgatttttaacactgtagttttaaaaaactacagttaacttagctggctttgtttcttgccttgcaaaaaatatagattaatgaattttcattttgaagatctgttcagtcatttttgcataccctcagagaaagttttcctttattgctctatttaccatgttttctttcctttctt

SEQ ID NO: 16812 - DNA, 477 bp, Homo sapiens
cttgtgactgagctgcccaggttgtgatggacctcctgagctgttgccccagattgtgtgggacctcgtgagctgactgagctgcccaggttgtgatggacctcctgagctggttgcccyagattgtgatggaccttgtgagctaagctgcccagggttgtgatgggacctcctgagctgggctgcccaggattgtggtgggaccccctgagcttggctgcccgggattgtagtgggaccccctgagctgggctgcctggggttgtggtgggaccccctgagcagcacacagggaactctgtgtggcctctctctttgccagcctcctcctttcctccctctggctcagattccacctagtaaaccccaatgaagaaatgaatgagcacaggtatgggggcgggaaagctgggccaggaagcacagaaggcttccctctgaggaaaaagctggggatatttataagtcaatctaaaa

SEQ ID NO: 16813 - DNA, 642 bp, Homo sapiens
tgcatttatttttgcagtgtttctacatcaaagaaaactattgatttaagcaaaccacacttattacaaatgtgcaacattaaatagatgtattaaaatgcaaaacacataccctgatataattatataattactagcctattaaaccgtaggtaagaaacacataatttcaatgggataatactaacagaaaactttgtcatgggaattagaatgatcaacttttcagagtctgaattatttattaacaaagaataattattaaatggctctttgctgttcttatgtttatagggccatgatgtaaaaaagaagcaatatttaaagtgtcaaaagaagtagcaagctcatctataccaagaattcaggatttttaactctcataatttatgatctagtaaatttaaaaatcaaagaggacaggaagatgtactcstggcttgtgaacatcaagttattaaactatccacgtagtgttagtctctcttcagaggcaatacattaaacttgcttactgatttgttatgcacatttatgctgctaactggaactagtatagttatctctggaaatttcacttaaagtttttactggaaattctgagaaatataatagtaactaattgttctaaatcatcttata

SEQ ID NO: 16814 - DNA, 520 bp, Homo sapiens
tacaaggccaataaattagtttaggtcacctgagaattacccagttaaagtcttttgagaaataattcaatatctaaactgactgccagcaggagaaactgttatattaagtagaaggagcaaaaccatgagctttaaatttaaataaaaccactaacatgcaagaygcatagttcttacataaatagcaatgcatgcacaaataaaccagttgtaaaataagtcacactttacctatgaaataataagttaaaactatagtccatacattcatgcatgcaagaaatgtcatttttattaaatttattttgagccccaattggatagggtgtgggaaacaaaaatctcaggctattttagttctccccccatatttccctggaagaccaggagttccgggacacttatgagatgtccagtcatcaactaggagcatctggtcctcagtactgtgtagtatccatgctggcattcacctacatgtctgctgtgccaactggcttgtggtcatcagtccatg

SEQ ID NO: 16815 - DNA, 662 bp, Homo sapiens
gtttaatggactcacagttccacatgactggggaggcctcacaatcatggcagaaggtgaaggaggggcaaaggcacatcttacacggcagcaggcaagagagtgtgtgcaggagaactgccctttataaaaccatcagatcttgtgaaacacattcactatcaggagaacagcatgaaaaaaacccacccctatgattcaattacctcccactsgttccctcccatgacatgtggggattatgggacctacaattcaagatgagattagagtgcatacacagtcaaatcatatcaaaggtgtttaactctgtgggtcttattttttgggtgcagtgtgactaagaatgtgaggctgaggaaggtaggtgtggttagaaagaggccctgaggacaagggccagtggaaggaaatatggagattgcactgttgtattcaaagggaggaggtgagaggttctggtataccagaaaatgggagcctcccttctgagctctgtatgcagataggacagtgtatgccattaagtgtgtgggtcttctggaaagaaatagtttgggctttgttcgttctcttcctaagtggtctggtggaaagcctacttagaaggggctaccaatttcttctaacgtaagggatgacaaatggcgatgctggttctt

SEQ ID NO: 16816 - DNA, 662 bp, Homo sapiens
gtttaatggactcacagttccacatgactggggaggcctcacaatcatggcagaaggtgaaggaggggcaaaggcacatcttacacggcagcaggcaagagagtgtgtgcaggagaactgccctttataaaaccatcagatcttgtgaaacacattcactatcaggagaacagcatgaaaaaaacccacccctatgattcaattacctcccactcgttccctcccatgacatgtggggattatgggacctacaattcaagatgagattagagtgcatacacagtcaaatcatatcaaaggtgtttaactctgtgggtcttattttttgggtgcagtgtgactaagaatgtgaggctgaggaaggtagktgtggttagaaagaggccctgaggacaagggccagtggaaggaaatatggagattgcactgttgtattcaaagggaggaggtgagaggttctggtataccagaaaatgggagcctcccttctgagctctgtatgcagataggacagtgtatgccattaagtgtgtgggtcttctggaaagaaatagtttgggctttgttcgttctcttcctaagtggtctggtggaaagcctacttagaaggggctaccaatttcttctaacgtaagggatgacaaatggcgatgctggttctt

SEQ ID NO: 16817 - DNA, 662 bp, Homo sapiens
gtttaatggactcacagttccacatgactggggaggcctcacaatcatggcagaaggtgaaggaggggcaaaggcacatcttacacggcagcaggcaagagagtgtgtgcaggagaactgccctttataaaaccatcagatcttgtgaaacacattcactatcaggagaacagcatgaaaaaaacccacccctatgattcaattacctcccactcgttccctcccatgacatgtggggattatgggacctacaattcaagatgagattagagtgcatacacagtcaaatcatatcaaaggtgtttaactctgtgggtcttattttttgggtgcagtgtgactaagaatgtgaggctgaggaaggtaggtgtggttagaaagaggccctgaggacaagggccagtggaaggaaatatggagattgcactgttgtattcaaagggaggaggtgagaggttctggtataccagaaaatgggagcctcccttctgagctctgtaygcagataggacagtgtatgccattaagtgtgtgggtcttctggaaagaaatagtttgggctttgttcgttctcttcctaagtggtctggtggaaagcctacttagaaggggctaccaatttcttctaacgtaagggatgacaaatggcgatgctggttctt

SEQ ID NO: 16818 - DNA, 1029 bp, Homo sapiens
gattttcttgagtgtttcctgatggtctgtttttgaaatatatttctccatctctgtattttgaagatattagtagatataactcaaggcttgaaaaataagattcagttttcagtaaccctactttacaggcaatgctaagtacatcagtcatgtagcacaaaatgtctgactgtccttgatttgggatctgaccagctgttacctagttccactaatttattaggaagttgcaaaatagtaatattctacatatatcattccttcataatctaccaacaataacactgttaggaaggtttctaaaagtcctcattatctattacattaaattatgccataactatcatatattatatttaaccattttatacaatggtttatacagaaaaaaaataaatgcttggttagtgctagttttcaaaataatgaaattattttgtttgttcacaaacatcctccactggcaacaattagttttcctaatattctttttaacatttcattacaaaataacgaagtcgaatatatttgctgggtttcattcattatggttattaaatttaatgatgtttaaattgtcccatcttcagctggtgggagcctctaatgttgcctcctgagcctttctgacacgatcttattattctgtaatctcttccttgctttctagtaggacaaaatgtttcaggctgaaattgtacattccctgcctgagacctacaatcagccatttttccaaggagccctgggtccgtttgatgataaatgatttataatgatcacaatttggatgtcacaggttttcatcactactgaattgtccattgtttctagcttccagtagatggagatarataatatgcatttataaattacagggtttttacctcacttcatcagtcttacatctgattcttctttatcttatgctgagaatgctggttctcaatgacaccactttaattgatcattttcttcttatcacaatcagtcacaaaacagtcacacacggcaaccttaaataac

SEQ ID NO: 16819 - DNA, 1405 bp, Homo sapiens
ggaatccagttggtcaagggatcagcttgcatggaataggcatttcataaacgtgagcagcttttctataccacaggtttttcagtagagatatttttatgtttcctgtggccttccataacacaatgatgtgcaattccttgagagtgacgtatttgtaatatatttctggataaatattcccaaagccatattacagggacctacatgtcttttgtctttgtgttttctctggaaaggggagcatcccctgctctctgacagaagggagaggaataagtctgatttgtgagagcctagaattcactgtacatgtttcttgagyggaagggttatccatttccccaccatgacacttgatcatctttcccttcatttcacaaggggaaggtccacagtgccctcccctagacttcctgcctctgtgtactgaacataattatatggatgggctctgggcatgttttccataggcagaaatggatcctctcatttcctctttgtgccaacagtttggtgactgagctagtccgacagaagtgctctggagtgcagccctgctcttttccatttcatggtgattggtgggaaaagcatagaggtaggagagttaattacctttcctcttgttccaagacacactacctaattcagctttaacaaatttccaacattaggggctgttcacttgctaatattgtggttgttcacttactaatacagtggctaaatattttgagaattttaagtaattgtattttgaatagattctctccttcacttatatcccagaagggaggcagggaaaacctcagtcttgcttcatcatccagacccctggtctttaaaataaaccaatgtaatattctgtagaatattactattgaaagaaagattggcatgtaggctagaagataacatgtggcaggccgggcgcagtggctcatgtctgtaatcccagcactttgggaggccgaggtgggtggatcacgaagtcaagagatcgagaccatcctggccaatgtggtgaaacctgtctctactaagaatacagaaattagctgggtgtggtggtgtgcgcctgtagtcccagctacttgggaggctgaggcaggagaatcgcttaaacccaggaggtggaggttgcagtgagctgagatcacgccactgcactcccgcctggttgacagagcgagactccatctctaaatacataaataaataaataaataaataaataaataaataaataaataaaatatgttgcgtgactgaggcatcttatccggggcaggtactagagctaactctggcccatgagcatgatggtgactggcattttggttgtgcacaccattctaggcagatactgctccttggtgatatgaaaaataatatatatttg

SEQ ID NO: 16820 - DNA, 1405 bp, Homo sapiens
ggaatccagttggtcaagggatcagcttgcatggaataggcatttcataaacgtgagcagcttttctataccacaggtttttcagtagagatatttttatgtttcctgtggccttccataacacaatgatgtgcaattccttgagagtgacgtatttgtaatatatttctggataaatattcccaaagccatattacagggacctacatgtcttttgtctttgtgttttctctggaaaggggagcatcccctgctctctgacagaagggagaggaataagtctgatttgtgagagcctagaattcactgtacatgtttcttgagcggaagggttatccatttcyccaccatgacacttgatcatctttcccttcatttcacaaggggaaggtccacagtgccctcccctagacttcctgcctctgtgtactgaacataattatatggatgggctctgggcatgttttccataggcagaaatggatcctctcatttcctctttgtgccaacagtttggtgactgagctagtccgacagaagtgctctggagtgcagccctgctcttttccatttcatggtgattggtgggaaaagcatagaggtaggagagttaattacctttcctcttgttccaagacacactacctaattcagctttaacaaatttccaacattaggggctgttcacttgctaatattgtggttgttcacttactaatacagtggctaaatattttgagaattttaagtaattgtattttgaatagattctctccttcacttatatcccagaagggaggcagggaaaacctcagtcttgcttcatcatccagacccctggtctttaaaataaaccaatgtaatattctgtagaatattactattgaaagaaagattggcatgtaggctagaagataacatgtggcaggccgggcgcagtggctcatgtctgtaatcccagcactttgggaggccgaggtgggtggatcacgaagtcaagagatcgagaccatcctggccaatgtggtgaaacctgtctctactaagaatacagaaattagctgggtgtggtggtgtgcgcctgtagtcccagctacttgggaggctgaggcaggagaatcgcttaaacccaggaggtggaggttgcagtgagctgagatcacgccactgcactcccgcctggttgacagagcgagactccatctctaaatacataaataaataaataaataaataaataaataaataaataaataaaatatgttgcgtgactgaggcatcttatccggggcaggtactagagctaactctggcccatgagcatgatggtgactggcattttggttgtgcacaccattctaggcagatactgctccttggtgatatgaaaaataatatatatttg

SEQ ID NO: 16821 - DNA, 567 bp, Homo sapiens
ttgacgctattttaaaggtttaattccatagcaaaaattattgatgctaagagtaaaacagtttgagtttccttcgcttgtgtatctatgagactgccctccaggatgccaatgacagtgtattgcagtggtaagccaaccgtgttaccaggggtactgcattcattcttttactcaacaaataccacggactcttgtaatgcagccactgttttaagtattgcattacctagatagagggactaactatgcaattaacaagatagatggcaattaacaaagcagttaacagaacagataaaatatctcccatcaygaagcttatatttcactccactaaaattttgcctgaccatttctgtttctctcgatgtaggaaccttatttattgcacataagacattatttttaataatcattttattggtgttatgcacataataagcaacagattgtcatctcttgattaaatagtaaggaaaataattcatttggcaatgtaagtacttgcaattctggatttttttattgatctaaataaatccttttatcttgttttctcattta

SEQ ID NO: 16822 - DNA, 567 bp, Homo sapiens
ttgacgctattttaaaggtttaattccatagcaaaaattattgatgctaagagtaaaacagtttgagtttccttcgcttgtgtatctatgagactgccctccaggatgccaatgacagtgtattgcagtggtaagccaaccgtgttaccaggggtactgcattcattcttttactcaacaaataccacggactcttgtaatgcagccactgttttaagtattgcattacctagatagagggactaactatgcaattaacaagatagatggcaattaacaaagcagttaacagaacagataaaatatctcccatcatgaagcttatatttcactccactaaaattttgcctgaccatttctgtttctctcgatgtaggaaccttatttattgcacataagacattatttttaataatcattttattggtgttatgcacataataagcaacagattgtcatctcttgattaaatagtaakgaaaataattcatttggcaatgtaagtacttgcaattctggatttttttattgatctaaataaatccttttatcttgttttctcattta

SEQ ID NO: 16823 - DNA, 549 bp, Homo sapiens
tgactccacattgcaaattcttacattagttctgctagactgattacagatattgtaggatgtttgccaggttatagatctcattatttccaacttttattaccttcttttttatttctcatcaaacggaggacctattgcatacattttaggcaaactctttgaagtatatccaatcctgtccttcagaggaagtttctttaggcataacctcacatgtgttgattgcttaacccacaccacttacctttcactatagttacggtctctgtcttgcctgctgtacattgcacatgctcctaatagactctttattaaagattataacaaattatttttgtgcctttctccgaagtttmaactctcaaagtcagatcatggcctcagtcttatcattcttctcctaggatctaatgctatgttctaattctgtattatattgtcaaaagacagttgttgaatgaatatccttcagacattttaaggaatgaatacttgaattccagaacttgcatatggatgatttactcattttcatagtgtgtattc

SEQ ID NO: 16824 - DNA, 1307 bp, Homo sapiens
ctggtaacacacacacttggaagactctactcaaaaaatttagtcgtgttgacaatggaatggagtcccctagatgatgtacataaaattccactcagaggaaaatgtgcgctcttttgtgaatgaatagattagcttttagttttgtatagtagtcttttggaaacttgatcagcataagtagatcctcccaaatgtgttcctctcattttgtggtttgggtagggtgaccaatcctccttgtttgcccagggttttcctagtttttccactagaagttccacattctaagagattcctctgatcatactgagatggttggtagggttatcaactcatcccagcttgtctgaaactgttctatgttttaaaactgaagttcccatatcctggcaatcctctgagacccaggcaaactgggtcagttcatcatcctaattggtcaccagtcactgcctccctatgagactcttatctatgtaatctgctggcctcagaaaaattctctattttatcttttactaaaatatattgtcccaagactcagtgatgtccagagtttttgggaagtaagaattgtgtttctaatgaggccttgtaaatattaaaacatacagcttacaggccattgtggaaatttatttagagaaaagaaattgtgaggattttctcaaatatggaatgctctgaaatttcctttcatcctttcctaaatagggctgaaaaagtaaaccagaggtgtgttactatgtagttccgaatattgataggaagggatccaaaggccacacctttgcaaatgtgatcatagaaattccagggtccctggagcctgcaaaaaagactttggcatcaccaagcaatcccagtcgaagaaggtccccatgcctccctctttggcctgatacctccctgacttgcagctcagtctttattccccatctctcagactgattacatttcaagcgagtgactcaagtgagtttgcctaatagatttccattttgtttctgagaccttttcttcatgcaagaattggttagtgttgggtcagtcgtttatatattaacacgtccgaatattcataaacaggggctgctttagtgttctcaaactttgcttcatgaataattcatatgtttgacagcaactatgttactcaayttatttaaagactacaatcaatatagcatgctgctccaaaacatagcaaccagtcctttaactgtagtgtgctttaaaatttttttcccagttatttcaccatcacattgaaccacaaatatatggtaattactaataattct

SEQ ID NO: 16825 - DNA, 528 bp, Homo sapiens
cttttcttcttgaatctattttaatatctgtaaagtttcattaaagccatgctttcttacatagctagacgctctacccagtgagcactgaggatgtataatctattaaaggctcagtaagctaatgttttattctcaagttctgctttttatttttgctgcttatttgggtgggaaaaaaaagaaccactgcaccttaggaacagagaccaccttaggaagagaaatgtattctgaaaaagtttgatgatatagaaaaaacatgaataaagctaaaagagtagarttacagacagatttatatattcatcaaatggtgaaaatggcaattattatatttttcttttttatttatgtaaataaattaccaaattagaacaatttcaaagcatttatcctcatttcaaaaatatgagaaaacaaaacattgtatttacagtcttcctctgtgtaatggatatgaacacaaatataaaaaagtgtcttatttatggaattccttaatatgtgtcaagtattacgttatta

SEQ ID NO: 16826 - DNA, 541 bp, Homo sapiens
gctgtttttagagagctacagccctcagattcttgtacatcagggtgatgtacaaccctcagattcttgtacatcrgggtagttcaattttaagagcagctagttggcataagagtaaacggtgcccgtgtccatggagtgctgaagatgcagatttcagaactttcatgaatttttaaaattatgtttccatactttggccggtgttgggggaggtctgctcgtcttatttctttgaaaatacacacttattgcagagagttggcggtagatatataaacctagctaacttaaagggcatctgagaaatggcgtttttagctttccagacgtgatagttgagaattaaactagtacccatcagttttctagactagctcagtctgttacacatcattatcctcacagaaattagaattagtcattagctcgcatctccttaaaattaagtggattatactgtgtaggggatttttttcccctctgctttgtataactgctaaagagctttatgaatagctaatgatctactttttaaacc

SEQ ID NO: 16827 - DNA, 541 bp, Homo sapiens
gctgtttttagagagctacagccctcagattcttgtacatcagggtgatgtacaaccctcagattcttgtacatcagggtagttcaattttaagagcagctagttggcataagagtaaacggtgcccgtgtccatggagtgctgaagatgcagatttcagaactttcatgaatttttaaaattatgtttccatactttggccggtgttgggggaggtctgctcrtcttatttctttgaaaatacacacttattgcagagagttggcggtagatatataaacctagctaacttaaagggcatctgagaaatggcgtttttagctttccagacgtgatagttgagaattaaactagtacccatcagttttctagactagctcagtctgttacacatcattatcctcacagaaattagaattagtcattagctcgcatctccttaaaattaagtggattatactgtgtaggggatttttttcccctctgctttgtataactgctaaagagctttatgaatagctaatgatctactttttaaacc

SEQ ID NO: 16828 - DNA, 548 bp, Homo sapiens
cagccctccagaagtccttagccatgcttgtaacataatctcttcatttatctttcaaagctactcctatcttggcaatgtctctcccagcagctgtgtgctttgctctccgtgcttgtagtctcttccatcttcattatggacagtaaatctttgacaaagtgcctggaaactttagcaaaaagctctgtawacatacttaggagaaggggtcaacacatttctagaagcgtaagagctgactatcttggtacacgtgcatgtggcaactaattggtggtatagataaaccagaatgcactgaaataggcagtagcctgtggtttgatccagttcactccagtagaaaggaaagaaaatacaagaaactactttatgtgattagggggagaaaaatccatactttccatatgggaatttctcgtgtgttttcttaatgaactcagagggaagttgagagagtcttttaagctgctaaaactactaatacggtctctttggggatgtgagagtatgaatttcctaatttcatcagaaccattaatgac

SEQ ID NO: 16829 - DNA, 521 bp, Homo sapiens
atttgaagggacggtgtttccaaaagttctgtactgtaaacagttgagtactttccagttatccagaagaaaaatgtgtggtttaatatatatgactatactatatttattatgtattgtttgcatattggtttccttcaaatctcatgttgtaatgtaattcccagtgttggaggtggagtatggtaggaggtgatggaatcatgggagcagatccctcatgaatggcccagcaccatccccgcggtgattgagtgaggtctcattagtgcacacaagatctggccatttaaaagggtctgggacctcccctctctstcgccatgtaatatgctagttcctcttcaccttctatcatgattctaagtttctggagggcctcaccagaagtagatgccaacaccacacttcctatatagcctgcagaaacatgagccaaaataaaccttttgtccttgtaaattacccagcctcaggtatttatttatagcaatcaaaaacagcctgaaacatccagctat

SEQ ID NO: 16830 - DNA, 567 bp, Homo sapiens
gggcatggttgaactcaatggcaactacatacagkatggaaaggaaatggagagagggtcaagatcagaaagtaaggctactacgcagtggtgggtaatatgcagaaacctgtatttgggcaaggggaccttacctggcctcccttgggccttctgttgcatggaatcaagagcagaaatggacatatagccttggcctgttaacccttagagttctcctctttctccactgccctcagtcaccagaagtcttctgaggatactaattgactccatcatgtacaattcctaaaacttgctgaatcatctgcttatgttgtatgtcagtgggagaaagaggccagtcatgcagtgcagatagcttcttcaaaaaggatagtgtatgtgacaggcaattttattgtaaaaacttgcttaataaaacaattcaaacagaatgaataagatagtattatatagtattatcctttgtccacattctcacactgaatttgcaaatcctgtcaggactgtttgttcagtacactctttatgggcttcagcctcttgacttaggggcatatagct

SEQ ID NO: 16831 - DNA, 567 bp, Homo sapiens
gggcatggttgaactcaatggcaactacatacaggatgkaaaggaaatggagagagggtcaagatcagaaagtaaggctactacgcagtggtgggtaatatgcagaaacctgtatttgggcaaggggaccttacctggcctcccttgggccttctgttgcatggaatcaagagcagaaatggacatatagccttggcctgttaacccttagagttctcctctttctccactgccctcagtcaccagaagtcttctgaggatactaattgactccatcatgtacaattcctaaaacttgctgaatcatctgcttatgttgtatgtcagtgggagaaagaggccagtcatgcagtgcagatagcttcttcaaaaaggatagtgtatgtgacaggcaattttattgtaaaaacttgcttaataaaacaattcaaacagaatgaataagatagtattatatagtattatcctttgtccacattctcacactgaatttgcaaatcctgtcaggactgtttgttcagtacactctttatgggcttcagcctcttgacttaggggcatatagct

SEQ ID NO: 16832 - DNA, 567 bp, Homo sapiens
gggcatggttgaactcaatggcaactacatacaggatggaaaggaaatkgagagagggtcaagatcagaaagtaaggctactacgcagtggtgggtaatatgcagaaacctgtatttgggcaaggggaccttacctggcctcccttgggccttctgttgcatggaatcaagagcagaaatggacatatagccttggcctgttaacccttagagttctcctctttctccactgccctcagtcaccagaagtcttctgaggatactaattgactccatcatgtacaattcctaaaacttgctgaatcatctgcttatgttgtatgtcagtgggagaaagaggccagtcatgcagtgcagatagcttcttcaaaaaggatagtgtatgtgacaggcaattttattgtaaaaacttgcttaataaaacaattcaaacagaatgaataagatagtattatatagtattatcctttgtccacattctcacactgaatttgcaaatcctgtcaggactgtttgttcagtacactctttatgggcttcagcctcttgacttaggggcatatagct

SEQ ID NO: 16833 - DNA, 567 bp, Homo sapiens
gggcatggttgaactcaatggcaactacatacaggatggaaaggaaatggagagagggtcaagatcagaaagtaaggctactackcagtggtgggtaatatgcagaaacctgtatttgggcaaggggaccttacctggcctcccttgggccttctgttgcatggaatcaagagcagaaatggacatatagccttggcctgttaacccttagagttctcctctttctccactgccctcagtcaccagaagtcttctgaggatactaattgactccatcatgtacaattcctaaaacttgctgaatcatctgcttatgttgtatgtcagtgggagaaagaggccagtcatgcagtgcagatagcttcttcaaaaaggatagtgtatgtgacaggcaattttattgtaaaaacttgcttaataaaacaattcaaacagaatgaataagatagtattatatagtattatcctttgtccacattctcacactgaatttgcaaatcctgtcaggactgtttgttcagtacactctttatgggcttcagcctcttgacttaggggcatatagct

SEQ ID NO: 16834 - DNA, 567 bp, Homo sapiens
gggcatggttgaactcaatggcaactacatacaggatggaaaggaaatggagagagggtcaagatcagaaagtaaggctactacgcagtggtrggtaatatgcagaaacctgtatttgggcaaggggaccttacctggcctcccttgggccttctgttgcatggaatcaagagcagaaatggacatatagccttggcctgttaacccttagagttctcctctttctccactgccctcagtcaccagaagtcttctgaggatactaattgactccatcatgtacaattcctaaaacttgctgaatcatctgcttatgttgtatgtcagtgggagaaagaggccagtcatgcagtgcagatagcttcttcaaaaaggatagtgtatgtgacaggcaattttattgtaaaaacttgcttaataaaacaattcaaacagaatgaataagatagtattatatagtattatcctttgtccacattctcacactgaatttgcaaatcctgtcaggactgtttgttcagtacactctttatgggcttcagcctcttgacttaggggcatatagct

SEQ ID NO: 16835 - DNA, 538 bp, Homo sapiens
aatttatgttcaagtgctatttcttctytttggtaccaaggaacaagcatttgtttctaacaccagtgtcacaacagtggttccagatatgttttgctgatgtgtcagatatgggtcatgataaaacatttcaggagtgactccaaggtcttgggcaagagcaactgaaaagtcagaacatctcttgactgaggtgtgtgtctgcagagtcagaggacatgttgtgttggttgtatttgaggtattcattaggcatccacatggaatcatccagaaggcactaaaagtatttgtttgaaatgcaagggagagctctgaataaatttagaatcattggcatataaatggcatttaatgcaaggcagttggaaataggttgggaattcctaaaaagtgagttttgacaaagaattcttagcattgctggctcattctgaggctttcggtcctcctctctcgttgttttacaaaatagtacaacactcaaaaaatacttcaaaaataaatttcttctcacaatccaaaaatagcattgttg

SEQ ID NO: 16836 - DNA, 773 bp, Homo sapiens
aaaacagaataaatagtcttctcctttttcagatgagcagattaatattcacaacagtcacatcatatgcttttaatgctatatagcaagaagtgcaattctgatttccagatttttaatcttatattttacaacatcatagttgtaagattttatttctagttsaaatacattttgtattatatttgttagcatttcttacaacagagtaattgtgaattattttttttactatctcagactggtcagttttttcagacttgctcagttacaggtactactgataattctatctgtcatgtaagaggccgagtgttgagattgtaagatcaaaaaattaaattgagtactaccatggaagaattttagcctggagaggtgcctcaagctcataagtgtcttatgtgaacatgaaatgtacacttattgtgctaaatcacaaagatttggggatcgtgcgttgctgtaggacattttttttctagccagcctaattcaatgttttaaaaaatttctgtttcaagtctagaacctagcacatggggaaaagaatgttaaatatatttaaattatatattacattttaaacgtaggattcagtatggaaatatcaatcagaacatcttagaatattatctcatctacattgttgctacttggcctggtcaatgtgttgtgatcaggaaatatttgtatgtgttatgtgccttctatctaatatatatattttttctaatttagtgttaaaaaagtttaaaaagtataattatttt

SEQ ID NO: 16837 - DNA, 484 bp, Homo sapiens
atatttagtaatttaatgtattatatgtgatgaactcctgtacactatattagacctgtttattgttaagaaaaaaagcttttggagaacacaatatcgaaagcagattgttatgcaaaagacagtttgggaggtccctgtatttttctcygtacatttggaaataaatggaccttgtcttaaaattgcaatattagttatttcctccttagtgcatgcagggaattcaaaggtggaactttggcaataattattttataatataactgaaactgttaatacttcaaattattcaatttttaaggagactatagcacttttttacttacatgtccaacatctaaatgtgcaaatttgtcagtagttgttagtgataaattcaaactcttttaatgtagttttctatatatttcaatcttttcaatctcaggacaattatcttctataaaagaaaagctttgaaatttgtttttccaaagatcat

SEQ ID NO: 16838 - DNA, 686 bp, Homo sapiens
ttcaaaggcatttaatgtttgacagggtgtattccagatctcttttatgtatgtaattggattggtaacatacctacagacaaaggttctggaggcaaggacatttttcctggtatttgtagacctttttctctccttgaacagtagcctgttgtactgcatttagtacattggaatttgagcagacatcccctaataattgaactcacactaaaaaattaattttcatatttcaytgagacttctgtttagacctgtatattcaaaggagaaagcaaaatgacttgactcttgtggttatacgttgaacagcatgtgcatgtgtaagagttcagtgttttaactccatgttatttttttaaccttttgttttgaaatggtaattgattcacagaaaaattgtaaaaatagatcagggagttcacatatacccatcacccatcttcttctaatgttaacaacttaaataattattgtacagtgattaaaaaagacatgtgattaacctagtggttattttcttattttaacagctgctgaaatagttcgagaaatcgaaaatatagagaagactaggatgcgtcttgaagctagtaaactcaatgaaagtgtatgttaatgggctatttcagtatatggatagaaatgaagaaagtttaataccctacaaaaattaaagcaagcca

SEQ ID NO: 16839 - DNA, 686 bp, Homo sapiens
ttcaaaggcatttaatgtttgacagggtgtattccagatctcttttatgtatgtaattggattggtaacatacctacagacaaaggttctggaggcaaggacatttttcctggtatttgtagacctttttctctccttgaacagtagcctgttgtactgcatttagtacattggaatttgagcagacatcccctaataattgaactcacactaaaaaattaattttcatatttcactgagacttctgtttagacctgtatattcaaaggagaaagcaaaatgacttgactcttgtggttatacgttgaacagcatgtgcatgtgtaagagttcagtgttttaactccatgttatttttttaaccttttgttttgaaatggtaattgattcacagaaaaattgtaaaaatagatcagggagttcacatatacccatcacccatcttcttctaatgttaacaacttaaataattattgtacagtgattaaaaaagacatgtgattaacctagtggttattttcttattttaacagctgctgaaatagttcragaaatcgaaaatatagagaagactaggatgcgtcttgaagctagtaaactcaatgaaagtgtatgttaatgggctatttcagtatatggatagaaatgaagaaagtttaataccctacaaaaattaaagcaagcca

SEQ ID NO: 16840 - DNA, 547 bp, Homo sapiens
agtatagcaaatgagctgaaattacttttaactttatcaaatatgtgatataaaggtgttaatgtttattaacatggcttcatgttaatagctccatcaaggatcagatgtttatagcagtaagaattctgtatgattattttacatcttttgctttagacatgagaccatcattaacagggaagaaataaactgatgtcaaaaagaaagaatatgtatatactttgcattttccattraaatgctaaatttcgtgcacagaaagaaattcagcatgacatatatagctttatatttccatgactgtcttcatacattttgagttatagtcatatcaagaaacttgacttcccttaaacacaatatccactgcctcatttgccgtacttttatacatgatgttatctctaatgggaacataatcttatttcctgcttctttaattaatacttattttttccaatactcaagtaggtattacctcctgtgggaaacgtttcttgattttcttccgtatctaacatgtattaagtgaccttattcagtg

SEQ ID NO: 16841 - DNA, 550 bp, Homo sapiens
tgcctcagacatcataagccagtaaatgccagctgttttgataattgtttactgttcaagtggttttccttcacacagctgtcaaaacatagttcaagaacattctagcagagatgcatttgttggttagctttgagacttgaccaatatagattgtgtttctggacattatatatgtatatatatatgctccaaattttaaaaataatgatttcagataaaaatattttagaatgccatatgttcatctgttggagatggccaatttgattaaayttcaaagaaacatatttaaatgccaacacctcactatcaaagacactttttgattgggtactgagtttattcaaatcatctttgtagggtacatgttctttggttgggttctatgtacaacgggaaaactgattgaagtccaggaatcacaatctcacatgtcaaatgcctaattcagtgtccatagctcactcccagagccttccaagacgggtgacacctaaactttttttctgcagtttgccagacagagccctcttctctttctctagct

SEQ ID NO: 16842 - DNA, 550 bp, Homo sapiens
tgcctcagacatcataagccagtaaatgccagctgttttgataattgtttactgttcaagtggttttccttcacacagctgtcaaaacatagttcaagaacattctagcagagatgcatttgttggttagctttgagacttgaccaatatagattgtgtttctggacattatatatgtatatatatatgctccaaattttaaaaataatgatttcagataaaaatattttagaatgccatatgttcatctgttggagatggccaatttgattaaatttcaaagaaacatatttaaatgccaacacctcactatcaaagacactttttgattgggtactgagtttattcaaatcatctttgtagggtacatgttctttggttgggttctatgtacaacrggaaaactgattgaagtccaggaatcacaatctcacatgtcaaatgcctaattcagtgtccatagctcactcccagagccttccaagacgggtgacacctaaactttttttctgcagtttgccagacagagccctcttctctttctctagct

SEQ ID NO: 16843 - DNA, 550 bp, Homo sapiens
tgcctcagacatcataagccagtaaatgccagctgttttgataattgtttactgttcaagtggttttccttcacacagctgtcaaaacatagttcaagaacattctagcagagatgcatttgttggttagctttgagacttgaccaatatagattgtgtttctggacattatatatgtatatatatatgctccaaattttaaaaataatgatttcagataaaaatattttagaatgccatatgttcatctgttggagatggccaatttgattaaatttcaaagaaacatatttaaatgccaacacctcactatcaaagacactttttgattgggtactgagtttattcaaatcatctttgtagggtacatgttctttggttgggttctatgtacaacgggaaaactgaytgaagtccaggaatcacaatctcacatgtcaaatgcctaattcagtgtccatagctcactcccagagccttccaagacgggtgacacctaaactttttttctgcagtttgccagacagagccctcttctctttctctagct

SEQ ID NO: 16844 - DNA, 587 bp, Homo sapiens
gcttttgtttaacacggacacagagagatattatttggctcctgctatagaaggaactttctgtccctctctaacttccacatattcatcaatcatcatgtgccccttagtctccctttttcttagcttaagcatctttccttccttcaattattcctcctaaaataagttttaacgttcatgtcttgctggyccacttctctgaagcgctcttgttggtctgtatttcatttttaagttctcttgcacaaaatctacttcagaagcccagctctggtgtgaggactactcttcccctctctagaacagtaatgaatgatattttctctttctcatttcacaaaccatgcttatctccaagtaatccaagaacgcatgaccatcttgtgtagccacatcactcagatgacagctttggagttcattgtcaagtagagaccatggaacttttttatatactctagcactttgatgcagtatttctccctcatcccatatttggtagttggtgttaaagactcacagtcagaagtctatgctggaatgtatcttattggagttcgcctattcctctggtttgtttttat

SEQ ID NO: 16845 - DNA, 587 bp, Homo sapiens
gcttttgtttaacacggacacagagagatattatttggctcctgctatagaaggaactttctgtccctctctaacttccacatattcatcaatcatcatgtgccccttagtctccctttttcttagcttaagcatctttccttccttcaattattcctcctaaaataagttttaacgttcatgtcttgctggcccacttctctgaagcgctcttgttggtctgtatttcatttttaagttctcttgcacaaaatctacttcagaagcccagctctggtgtgaggactactcttcccctctctagaacagtaatgaatgatattttctctttctcatttcacaaaccatgcttatctccaagtaatccaagaacgcatgaccatcttgtgtagccacatcactcagatgacagctttggagttcattgtcaagtagagaccatggaacttttttatatactctagcactttgaygcagtatttctccctcatcccatatttggtagttggtgttaaagactcacagtcagaagtctatgctggaatgtatcttattggagttcgcctattcctctggtttgtttttat

SEQ ID NO: 16846 - DNA, 587 bp, Homo sapiens
gcttttgtttaacacggacacagagagatattatttggctcctgctatagaaggaactttctgtccctctctaacttccacatattcatcaatcatcatgtgccccttagtctccctttttcttagcttaagcatctttccttccttcaattattcctcctaaaataagttttaacgttcatgtcttgctggcccacttctctgaagcgctcttgttggtctgtatttcatttttaagttctcttgcacaaaatctacttcagaagcccagctctggtgtgaggactactcttcccctctctagaacagtaatgaatgatattttctctttctcatttcacaaaccatgcttatctccaagtaatccaagaacgcatgaccatcttgtgtagccacatcactcagatgacagctttggagttcattgtcaagtagagaccatggaacttttttatatactctagcactttgatgcagtatttctccctcatcccrtatttggtagttggtgttaaagactcacagtcagaagtctatgctggaatgtatcttattggagttcgcctattcctctggtttgtttttat

SEQ ID NO: 16847 - DNA, 585 bp, Homo sapiens
tgagcttggtacctttgttgaaaataaaattgggcatatttctgaactgtcaatttataacgttggtctctacgcctaccctatgccagtagtgtattgttttcattattgtagctatgtatcattgatttttttarattgtagtaaatatgcctactataattcttttgccaccccatctcattttttttacttctaatctatgaatttaagacactaatcaatcaagtttattatacctgcatattactaaagttttggagcctcctttaaggaacaaattggatttggtacactggctttgtgacatatggcataggccagtgacctattctctttttttctctctcacaacagaacctcagataatatattagttaaaaacagaagtgttcaggttgaagggcaggaaggtaaaattacacagacccagtctctgctgtatctacatgctctaaaagctattagggcagaagtgacattatttgaaaactgttagcatcaatatatttttagtttatttttctattacattttgtatggttgtagttttctaaaattcactctccagataaactaagtatt

SEQ ID NO: 16848 - DNA, 585 bp, Homo sapiens
tgagcttggtacctttgttgaaaataaaattgggcatatttctgaactgtcaatttataacgttggtctctacgcctaccctatgccagtagtgtattgttttcattattgtagctatgtatcattgatttttttaaattgtagtaaatatgcctactayaattcttttgccaccccatctcattttttttacttctaatctatgaatttaagacactaatcaatcaagtttattatacctgcatattactaaagttttggagcctcctttaaggaacaaattggatttggtacactggctttgtgacatatggcataggccagtgacctattctctttttttctctctcacaacagaacctcagataatatattagttaaaaacagaagtgttcaggttgaagggcaggaaggtaaaattacacagacccagtctctgctgtatctacatgctctaaaagctattagggcagaagtgacattatttgaaaactgttagcatcaatatatttttagtttatttttctattacattttgtatggttgtagttttctaaaattcactctccagataaactaagtatt

SEQ ID NO: 16849 - DNA, 585 bp, Homo sapiens
tgagcttggtacctttgttgaaaataaaattgggcatatttctgaactgtcaatttataacgttggtctctacgcctaccctatgccagtagtgtattgttttcattattgtagctatgtatcattgatttttttaaattgtagtaaatatgcctactataattcttttgccaccccatctcattttttttacttctaatctatgaatttaagacactaatcaatcaagtttattatacctgcatattactaaagttttggagcctcctttaaggaacaaaytggatttggtacactggctttgtgacatatggcataggccagtgacctattctctttttttctctctcacaacagaacctcagataatatattagttaaaaacagaagtgttcaggttgaagggcaggaaggtaaaattacacagacccagtctctgctgtatctacatgctctaaaagctattagggcagaagtgacattatttgaaaactgttagcatcaatatatttttagtttatttttctattacattttgtatggttgtagttttctaaaattcactctccagataaactaagtatt

SEQ ID NO: 16850 - DNA, 585 bp, Homo sapiens
tgagcttggtacctttgttgaaaataaaattgggcatatttctgaactgtcaatttataacgttggtctctacgcctaccctatgccagtagtgtattgttttcattattgtagctatgtatcattgatttttttaaattgtagtaaatatgcctactataattcttttgccaccccatctcattttttttacttctaatctatgaatttaagacactaatcaatcaagtttattatacctgcatattactaaagttttggagcctcctttaaggaacaaattggatttggtacactggctttgtgacatatggcataggccagtgacctattctctytttttctctctcacaacagaacctcagataatatattagttaaaaacagaagtgttcaggttgaagggcaggaaggtaaaattacacagacccagtctctgctgtatctacatgctctaaaagctattagggcagaagtgacattatttgaaaactgttagcatcaatatatttttagtttatttttctattacattttgtatggttgtagttttctaaaattcactctccagataaactaagtatt

SEQ ID NO: 16851 - DNA, 533 bp, Homo sapiens
tgctacttgtgatcaagaaagtgattgtgcttgctaatcaaataacgtatgggttctgtttgaaaacagtaattagctgattcttggagatagcatatcaccagaagtcatgcttactacttgaatggaataccagcttcaaacaagacgactgcattccccattctcagcttagcggcccgaaagcttataaattaggcagctatccaaccctcctgtaccccacaccagcactctaaatattacatttttaattatagctgggagttctcattcttatgtcttaaggtatgttgacagaagctgctgatcatgcattgtcatagcaatccagtaagaaatactgagatttgttttttgtcctacttcccatctgcaaagtcatgtttaatatctaactgtatgcktttatgattaaaaaataaagttgaaatccctgttccccacgtctcttacctctaccaaaaagcagtttcttatcctacttttccttactaaaacagatgaaatttatttttctactagggaactca

SEQ ID NO: 16852 - DNA, 469 bp, Homo sapiens
agtgcagtggtgtgatctcggttcactacaacctccgcctcctgggttcaagcgattctcctgcctcagcctcccaagtagctgggactacaggcgcctgccaccacgcccaactaatttttgtatttttagtagagatggggtttcagcatgttggccaggatggkctcaatctcttgaccttgtgatctgcctgcctcagcctcccaaagtgctgggattacaggtgtgagccactgcgcccagccagcatgggatctctctaagcatgggaccctgaagatgaaattacagggtttgttttgggaaaagaagggtaaggtgacaggaagatatgagagatttgcagtgtgcctaaagagagtcagtttcctactcctgagaaatcgtgaaaagcttaccagggaaggctggagcattctctatatcccaggcacttgctgtgtgctgaggaagtgaataaaaactg

SEQ ID NO: 16853 - DNA, 1523 bp, Homo sapiens
atttaagttattacatgttgctttaaatttacaaaatcctatggtatttagaaaagtctaacagttctttttggaagtaaaccaaaaactctttggcaagaaggaactcccaaggtctgtagcccaaccagccattccagtaagggactactttgacagcagctaaggggtcatgtatcatacaggcttcggcaggaacaagagctccaaaaacaggcattcattactccagggttgtgagttacttgggagcaaaaatattgtcttaggcatatttgttccttatacaacccagatcctaacatagtatgcctggaacatagttgacgctcaataaatggttgttgaataaatagcctgcctagcgaggcagccttttccattaaggggcagcatcattgtttaggaagttcttcacaaatggaacctaaagcagctattttaaagtatttgcctttctcttctagtcccctagcattctccattgtgtgatgttgattcattagatagaaaagggaagcatattaaatttataattaacctttccttttgacatgtaattagctaggatttatgagatgctaaaggctgcaatgcctgagaaagggagcataaatatataaataggagtgtttttattttaccgagcttggaataatagtcatttgttttcattgagacattatatatcggatatattttcattttagattggctaatgatcttctattttctgtccagtcctggactagagatctaattttaacttttctgtattaaaattgagaatcatgtcaggtcaagtcaatgtaaaatattataaagtgtgaattcacttttcatttccattttgttgtgataattttcttattgtgctactattataattcaaaactacgttgtcaatagagtaacatttagatgaaccagatgaatagcaaagaaaactgttttagaatttatattaaactagaccttatcactatttacactaagttttacaatattttgcaagcaaatttttaccaactaatagttttttttccgtaagatggaattaattttaaacttttcttctcttttatttaggaataaatatcttttcacccaaatttaacaggctaccttcaagagaaaaaagtgcttgcagtaaggaaacagattacaaagtatctaatattttacttatttggaaatccatctagctgacatgccaaatgaaatatgagacattcttagccttggaaaactttctcccaaacttaaaaatagctcatattctctttattattaagcacataagacatctaacttcaccctgaactrtcttttaccttatagttttgggcttctaaatcttgtaaaaacctctgtaacatcacttagatcacatattttcttcatgtactatgctttatcatgccattcaattatggagactaaaacgagcagccagagttcttgttcaaagcatcactttctctcagccatgctatggtaaatcactctttttttatttttta

SEQ ID NO: 16854 - DNA, 639 bp, Homo sapiens
aagtaaaaatagcaggktatttattgtagagtttataacgtgtagaagtaaaattatggcaatatgacaacaacagcacaaagtaggagaggaagaaaatggaagtatactgtagcatagttcttaaaatataaagtggtaaaatattttttaaaggtataccgtgaaaacttcaagatgtgtattgtaaaccctagagaaggagttggcaaactacagcctgccagccaaatttggcctgcccatgttttgtaaataaagttttactggaacacagccaagctcatttgttttcatatttgcaggacccacagagctaaaatatttactatctggccctttacagaaaaatttgccatccctgccttagaacaaccactaaaaatatcaatgaaacagagaagtataggtagtaagtcaatactggagaaaaatggaaacattaagctcaattaatccaaaggaaaagagaagaagcagaaaaaaagtaacacttatgctccctgctgcatcccatgcaattgagtgtccacctgagccctcttcccttgtcttctatgactcaaccttaatttccttctccccacctggccgctctttctctgtctccttcccagatcccccttcccctgcctctct

SEQ ID NO: 16855 - DNA, 639 bp, Homo sapiens
aagtaaaaatagcagggtatttattgtagagtttataacgtgtagaagtaaaattatggcaatatgacaacaacagcacaaagtaggagaggaagaaaatggaagtatactgtagcatagttcttaaaatataaagtggtaaaatattttttaaaggtataccgtgawaacttcaagatgtgtattgtaaaccctagagaaggagttggcaaactacagcctgccagccaaatttggcctgcccatgttttgtaaataaagttttactggaacacagccaagctcatttgttttcatatttgcaggacccacagagctaaaatatttactatctggccctttacagaaaaatttgccatccctgccttagaacaaccactaaaaatatcaatgaaacagagaagtataggtagtaagtcaatactggagaaaaatggaaacattaagctcaattaatccaaaggaaaagagaagaagcagaaaaaaagtaacacttatgctccctgctgcatcccatgcaattgagtgtccacctgagccctcttcccttgtcttctatgactcaaccttaatttccttctccccacctggccgctctttctctgtctccttcccagatcccccttcccctgcctctct

SEQ ID NO: 16856 - DNA, 641 bp, Homo sapiens
attggattatagggcagcacacacagaaggcttctccagcagctactgggatgtgcagaactttacaatgtattgaaatccttggaagagagaaggatgttgccaaaggtagaagaaggttaattcagagagaatgtctgggttaaagcataacaacaaaaatacactaaaaatggaaactgaagaaagataatagagggcagaaatgcaataactttgttatctataaataagcagtcataactgacatakgaaactcatttgtgcttgtgtttgtgaaatgtagcacaatgaaaacgcaatatgctggacttatttttccattaatataggtacagcctgataagaaattaagtcctgcattcctactcattccagaacagttagtttttggttttatttttttagctttggaaataaataagatagactttgaagttggctatttttaccaccccctaagtaggatttaaaacttttacatcaaatttgaggaatggttatattttattctttctagtggagtgttttttttttaatctcaaatatttagttctctctgtaagcatatgctaaaggcaaaaaaaaattctgtgtaataattctgatggtgagacaggtgatatcagttgcaaagggca

SEQ ID NO: 16857 - DNA, 556 bp, Homo sapiens
gggcatttgggttggtttcatgtctttgctaytgtaaacagtactgcaataaacataagtgtgcgtgtgtctttgtggtagaatgacttacatgcctttgggtatatacccaataatgggattgctgggtcaaatggtatttctggttctagatccttgaagaatcgccacactatcttccacaatggttgaactaatttatattcccaccaacagtgtaaaagtgtggaatgaacatctttaggaacaacggtggattaaaatgccaacttccggccgggcgcggtggctcacgcctataatcccagcactttgggaggccaaggtcggcagatcacgaggtcaggagatcgagaccatcctggctaacacggttaaactccgtctctactaaaaatacaaaaaaaaattagccgggcgtggtggagggcacctgtagtcccagctactcgggaggctgaggcaggagaatggagtgaacccgggaggtggagcttgcagtgagccaagacggcaccactgcactccagcagggtgacagagcaagactccatct

SEQ ID NO: 16858 - DNA, 844 bp, Homo sapiens
ctgtaacagagaaaaatagatgaaaaggttacttcatgtcagagtctaaaatacaacttccacagcccagatcacacgtgttcatagaagagaaaaggtgtgggggccacagctctagggaagtcttttgctttctaataaacgagggtttcacaagtgaaaaagcaaactataatgaagagaatacatcgctatgcccagagtatcatggatttaaaatagaaaataaattttaaggtagtgtctacaggcagtgatcccagaataaactggctgtataagtaagtgcttacctataaaccataactccaaatctccgcctcaaaatcaccccattcacagagaggggtctctttcttctggcatgacagacaatggcttccccattttagtgtgtacagtgactcctttgtcggtaaccckagaatatggagctgctgctttatctttcatctctaagccaagacttgctcttcctgatctctaattacaaggccccaaaagtacatccatccttcccagtgaccagggcccagacctggcagcttcctaaggagttcgacagagttgatctcacatatattcttggcagtgggattataaattggatatcctttccggaaagcaatttggcaggtttcgagacactttaaaatttgtacatccactgacctaatagttccgtatcagaaaatgtattctaaggaaataatcagtggtacaaagactgattaatgttttaaatacaatcttgtaacacaaaagaaccaaaatgtccaataataggtgtatggttaaatgaccatctgtgtgatataaacattaatagtaatttttaaaaata

SEQ ID NO: 16859 - DNA, 704 bp, Homo sapiens
tctcactatgttacccaggctggtcttgtactgctgacctggaggaatcctcccaccatgacctcccaaagtgctgagattataggcatgagacactgcacctggccatttttcattttttaagaagtctgcagtgaaagtattatgtcatatttcaagttgacacatgaaattaaccatcacatgtcataatatgttatgttttgttgctatttttttaatgagaccagggagtttaggcatactcttatttattcatggccatttgtacttacaaactgtttgtattttttgtccattttcttgttttgttattgatttgtgagaactttgttcctattaaagctattactttgtagtattcgatgaaaatatttgccacgctttgtgatttatgtttttaaattgcagtaaaatctatccarctttttgtatatttttattgcatgtttcagaacatttttcttcaattacatctttcaataccattttattccatttcattttggagggttctttttttcctgaatatcaattaacttatttggtctttctatctcacacatttgcattatattttctctaattcttttctctttgtgtctttttctctcagttgttgctaattcaattgcaagctgtgtttatttcctatgacactaaatattgtaacattatttttgcttgatattattcacatcaga

SEQ ID NO: 16860 - DNA, 704 bp, Homo sapiens
tctcactatgttacccaggctggtcttgtactgctgacctggaggaatcctcccaccatgacctcccaaagtgctgagattataggcatgagacactgcacctggccatttttcattttttaagaagtctgcagtgaaagtattatgtcatatttcaagttgacacatgaaattaaccatcacatgtcataatatgttatgttttgttgctatttttttaatgagaccagggagtttaggcatactcttatttattcatggccatttgtacttacaaactgtttgtattttttgtccattttcttgttttgttattgatttgtgagaactttgttcctattaaagctattactttgtagtattcgatgaaaatatttgccacgctttgtgatttatgtttttaaattgcagtaaaatctatccaactttttgtatatttttattgcatgtttcagaacatttttcttcaattacatctttcartaccattttattccatttcattttggagggttctttttttcctgaatatcaattaacttatttggtctttctatctcacacatttgcattatattttctctaattcttttctctttgtgtctttttctctcagttgttgctaattcaattgcaagctgtgtttatttcctatgacactaaatattgtaacattatttttgcttgatattattcacatcaga

SEQ ID NO: 16861 - DNA, 533 bp, Homo sapiens
atatggaaaatgtcagccccccagtagactctactcctgaggtttttcttgtctctgtacctgtgtaatagatctttccttacctcccagggtaccacactctaacacagtccctttacttcagctactcatgtggaattggtgagctgcagcctctaaacagtatataaaggtaattaggactggttgaagggatggactgctagcataagaaaaggtggtactcagtcccaaaaagaaattatttgagctgcccagctttttagtggatagaaatcctgcgccwtttaattgagtgaataccaggtaaaccattaggtaacttgtttcttcttgggaaattaaggtgtaatgaggtacagggacagaataattataggtagcacagctagaattaaaccacatgtatctgacttatccacagatccatagctgctctgaaacatacgctagaaatcctattctgcttaaaacacagtcactggtgatattttatatgactatctgacagtttctctgaaggtagaggaagc

SEQ ID NO: 16862 - DNA, 533 bp, Homo sapiens
atatggaaaatgtcagccccccagtagactctactcctgaggtttttcttgtctctgtacctgtgtaatagatctttccttacctcccagggtaccacactctaacacagtccctttacttcagctactcatgtggaattggtgagctgcagcctctaaacagtatataaaggtaattaggactggttgaagggatggactgctagcataagaaaaggtggtactcagtcccaaaaagaaattatttgagctgcccagctttttagtggatagaaatcctgcgccttttaattgagtgaataccaggtaaaccattaggtaacttgtttcttcttgggaaattaaggtgtaatgaggtacagggacagaataattataggtagcacagctagaattaaaccacatgtatctgacttatccacagatccatagctgctctsaaacatacgctagaaatcctattctgcttaaaacacagtcactggtgatattttatatgactatctgacagtttctctgaaggtagaggaagc

SEQ ID NO: 16863 - DNA, 543 bp, Homo sapiens
tcttccatctggagacatctttctgttgagagtgatctatgtggattcaaagcttttattaatgtgttttttagattctggatattagccctttgtcygaagagtaggttgcgaaaattttctcccattttgtaggttgcctgttcactctgatggtagtttcttttgccgtgcagaagctctttagtttaattagaccccatttgtcaattttggcttttgttgccattgcttttggtgttttatacatgaagtccttgcccatgcctatgtcctgaatggtaatgcctaggttttcttctagggtttttatggttttaggtctaacgtttaagtctttaatccatcttgaattgatttttgtataggtgtaaggaaggatccagtttcagctttgcgtacatagtggtctagaccagtgtttctccagcaccatttagttataatagggaaatccatttcgcaccaatttgccttgtgtgtgcggcagatgttgccgaagatcagatagttgtagatatgcggtgttatttctgagggctc

SEQ ID NO: 16864 - DNA, 543 bp, Homo sapiens
tcttccatctggagacatctttctgttgagagtgatctatgtggattcaaagcttttattaatgtgttttttagattctggatattagccctttgtccgaagagtaggttgcgaaaattttctcccattttgtaggttgcctgttcactctgatggtagtttcttttgccgtgcagaagctctttagtttaattagaccccatttgtcaattttggcttttgttgccattgcttttggtgttttatacatgaagtccttgcccatgcctatgtcctgaatggtaatgcctaggttttcttctagggtttttatggttttaggtctaacgtttaagtctttaatccatcttgaattgatttttgtataggtgtaaggaaggatccagtttcagctttgcgtacatagtggtctagaccagtgtttctccagcaccatttagttataatagggaaatccatttcgcaccaatttgccttgtgtgtgcggcagatgttgccgaagatcagatagttgtagatatgcggygttatttctgagggctc

SEQ ID NO: 16865 - DNA, 525 bp, Homo sapiens
caaaaggactattatgagggcaatggttaagtaaaattaggaattcagtgcaatggaggagtatgcagtttgtaaaaatgagttgtgtattctgtcttggaaaggcttctgtggtagatattaagttaaaagaaaaaacaagaggcaaaaatctgtaaaactgtatgatccctccatttacttttttgtgtaagaagaggacattgtgtgtgtgtgtgtgtgtgtgtrtgtgtgtgtgtatgtgtgtaagcaaaggcatacaaaagtctggaatgataaggaattctccataatgctaactgggttttttggaaagtgtgataaaggagaggggtaaggaagggcttgctttcactgtattactgcatcttttccactgttactgcatctatttcctcaacaagaatacatcatctatgtaattaaaaagcaaaaggaaatgataagcaggcaaccaaaagtggaaacagcaattctcagagcctcagagtcaagctgggttttatcaccggctccccagagggg

SEQ ID NO: 16866 - DNA, 525 bp, Homo sapiens
caatggtgcagtcatggctcactgcagcctcagcctcttgtgctcaagtgatcctcctacctcagcctcccaagtagctccctgcaaacatgagtatatgtattagtccattttcatactgctatgagactgggtaagttataaagaaaaagaggtttaatggactcacagttccacatggctggggaggcctcacaatcgtggtagaaggcaaagaaggagcagaagtacatcttatgtgacaagaggcaagaaagtgtatgtagaggaactgccctttataaaaccatgagatatcatgagaattattcactctcatgagaacagtacaggaaaaacccgcccccatgactcaattacctcccaccaggtccctcccatgacacatggggattatgagagctacaattcagcatgtgatttgggtggggacacagscaaaccatatcggtgtagtctcatgggaaataccatatcgtaaactgtcttatggaaaaaacaatatcataaactgtggagacatat

SEQ ID NO: 16867 - DNA, 496 bp, Homo sapiens
gatcttgtcattgtggtccattttaaaaagggatttttgcagacgtaactgagttcagagtctcaagatgagatcatcctggattatctgtgtgagtcctaaatccaatagtgtgcactaatacaagaaaggaagaggaaracttgagatctacacaaaggggaaggctatatgaagtagaagttaaagattagaagcagagatcggagatatctgtttaccgtgaaatgtaagcaaatcttctctgggatgagaggggaggatttagtgtcctggaatgtctttggtaagggagatagtctcaatatataattcttatgctgtttctaaatgcctttgttacaaaggaacatgagcgattctagtgagagttgtatcccaataaccctcctccctagatatagatacatccctgtaggaggtataaccccaccatttcatattggtccccacatatgtgatatttctagggcttgtttaataaagacatggcaag

SEQ ID NO: 16868 - DNA, 1174 bp, Homo sapiens
tggaaaacccccactctccatgcttttaaaatgctttttaaaatttctttgcagtgtttttaaatttacttgactaaaatctcgtcaagacagagaccagtgaagagttttggcatgtagtaagtgttcaagaaatcctcctagctagtgaaaaaaacagaaaaacatcactttacatatcataataatctcaccaccttaatccatttatagcatttatctgataccatatcaactgttggctattttgttaatagcacattcagttattattcacttattttcagcactgttttatattagaagctaataaatgcaaaactaattttacatagtggttacatgtttatgcttgatttttgtaactcagaattgataaatgttttttaataatagcctcaaaaatgttctgagaagaaactgatactggattagtttaaaattatgtcggttaattattaaactgaattttaccatttatcagtttaaaatagtttcaagaaggcttaaaataattttgttggaatgctttattttttatgttcagaacacaccaatttcttaggtggtgataattgtttattaagttataaaaatattaagtcagtaactattttatgtttgagggatagatacatgtatatacaatttacctttgaacaacattaggttagggcattgccccccaacagtagaaaacctacatataatttttgactcccctcaaatttaactactcatagcctactattgaatagaarccttaccaataacctaaggattagttaaacatattttctctatagatgatattctatatgcttataataaagtaagctagaggaaaaaatgttattacaaaaatcaaaagtaagagaaatatatttactactcattaagaggaagtggattatcataaaggtcctcttcacgttgagtaggctgaggaggaagaggaagaggaagaggaggggttggtcttgctgtctcagggatggcagaggtgaaagaaaattcacatgtaagtgaacccacacagttcaaatttatgttgtttatgggtcaactgtataaatacacactcacaaacacacacatatatatagttgtgtgtgtgtgtgtatacatatgtatacatacatatatatatatagagagagagattgctgataag

SEQ ID NO: 16869 - DNA, 640 bp, Homo sapiens
ctattcttcctaatattgccagcaattgttgagaacttaygtttcttctcagcaccttgatatgtgcattcatatctccactaaattatcaagctctttttttaaaacagccatgactaatgacccaaaattttaacaggatcttcccgctgcagaagacccagatagtgatataaaagtaaaaattgcaaaggcaaatctaagtatgcattatttaaagattatttgaatcatcagtaaagtacactgaagcatgtaattttccaagacgagttagatataaaaagatttagtcaaaacatccaatccctttattcacttaaaatacataggaaaagtgagaagttttaaggcaaatggaacttgcaactaagtaaaattagcagagatctggtaaaattatatctaaactaaaaactaatagaagtttttgcatttgttcatttgtaattttctgtatttgatgcaggtaaaataattgaaaagaaaagtatcagggcatgaatttttgataaatatgttgtaatgcagtagaattgtaaagaaggatatagagaagtaaaattatttagaaaatgggtaatacattatggtctgtgtgtatcagtaagtataaactaagtagttctgcataattatg

SEQ ID NO: 16870 - DNA, 660 bp, Homo sapiens
agaaggacaagatttaataaccrcatgtaactactggttaccctgtggacaatgtgcatataaaacatttccatcatcatggaaagttctactggacagcactaccttaaactcttgaaggatttttttataaatgtctgctagatacgcggatagtttctcctagtaacatttgaaaattcatctttaacttgaaagtttttataaatgaagactttccccctgaaatataacttgtaatgtggaaatactataagttgatcttacaattcatattgggagaacagaaaactgttgtgttgtacctagattacaaatgaacactaagctggaatacatacatttcacattcttctttctaagcctctaaccctgtgagccttgtattcgtttgataagcagctattgagaacctgccatgtgaagggcttatgtgttagacatacagctcatcttggttgggtgattgttcaaaaacatcagattatcaaaaactcaattgatatttataggttgtgaaaacataccagtgtgactaaaattaaatatttcttatttcaggttatatttccaagaggtagggtacattcttcagaatatattcagttttcagagatcaaatacatttacacttgtacctttcagcataaaagaatgatt

SEQ ID NO: 16871 - DNA, 582 bp, Homo sapiens
tggccatcattccagttgtcagcattgtgcaggacaggtacttgaggtctgtttttgtgaaccagggacccgaggcacmgagcaagtaagtggatagaaacaaatgctgtaagaacaaataattgtatttaaaaatttatgattttcatttatttttcagaggaagcattaatgagtaggtagtaatttctgggtattaaaaaaccatcagagacatttctttttccttataaaagaagtcataacagtgaacatttatagcacttagcttactaagggtttcacgtcctataatccccagcactttagcaggctgagaggggaggactgcttgaggccaggagttcaagaccagcctgggtaacatagcaagaccctgtctctatttagaaaaataataaaaacaaagggtttcacatgtattttagaaattagaccttccgaagttgtgagatttgtaataatgttcattttagagactagaaaactaagcctcatgaaggccatgtgacttgtccaccattgcaccagtgctgagtggcagatctctggtctggaagccacgttcttctcactatacca

SEQ ID NO: 16872 - DNA, 579 bp, Homo sapiens
ggacgtgtgtgcaagtgtgtgtctgtatgtatgtaagttgtatacattgaagttcctgctttataatgtacagttctacagatttttccacactcataaacgttcaccacctcagaaccgttagagaatagtttcattatccccaaaattagtgtgtgtgtcctcttagtcaactactttccagttctctctggtaacyaatgatttgattcctatttatataattttactctttcaataatatcatatgaattaattcttgtaacatgtcaccctttgggtctgacatctttctcttagcaaaataaatgtaaagtttccataatgaatctaaaatcatttcagataaaattgtagattcattttgttaagatccattttcctttttttggtgacgtttggaaatgtacaattgttctagcactatttgttgaatttattgagaaaagacttattctctacttgagacaactttgcatctttgtgaataatcatttgactgtatttgtacgggtttatttttgtgctatctattccatttcattgatctatgtctatcatttaccattactacactgt

SEQ ID NO: 16873 - DNA, 537 bp, Homo sapiens
ctttgcgagtcaaagacagcgtgtcctcgctatagatatttcccttggcataagcttgcctctctttttctccactcaccttagcttgctgagacaggagaccattcagggaagtaggcaaaaatcaaaccttgcattaaggttagttaaggggaagacagaattctggatgtgtattcaagggaagctgagttttttcactgtacaagtcagttagtctgttactgggttctctgtaawactggtatctctccctctcacttatgttgtcttcttcagcgaagaggcacttcagcactgttcccagtcactctttctctccttccttctctctctatctctttcacttccttcttcctccctccctttgtcttaattccatttccaaatacttgatgttttgtttaaaaaatgaagattcagaatacaactaaaaagtctgcaataattagcatcttattactattacagtgtaactattttatagtctgtgtaattatatccctatatcaaaatacttgttgggtcaactcctgc

SEQ ID NO: 16874 - DNA, 550 bp, Homo sapiens
tcattctttgaaaaacaaattctatatttcactggaaaaaaatatatttatcttccagttagctttctaaagggagagctggcaggaagtaaaggagctgaaaattaccaacattccatttttatttaatgcatgttacacagacatagtagtgtttcaatagataggaacaaatgctactattacatacaaaggttaacagtacaaggtatgattaccataagtctgcataacacctagaagaaataaaaactactttctaactctggagcacccatttcaataatagcagcgtttgttggggcggcttgagcgtatgcccctgtggttaaggagcacgcatgtgttcttaaacaccaaatgcattcacagttttaagggagagagagaatggaatttagcagaaatatgtatctaaataatgcatagttacgattccacggtaaaatatacwatcatcaaaaccatttaagaataataacctaaatgcttttgataggaaaggttttgggccatgtttcttgacgtattgtattcaaattagctatgg

SEQ ID NO: 16875 - DNA, 1837 bp, Homo sapiens
tttcatagggtgggatactagaagtgcctacttcatatagagtgtacaaaggatgaatcacaaatgaatatagcacttagtgctgggtaaatgtcagcatggttatgatgaggactgctggtaatacactcattccattcagtaattagcaaaggggctggggcagaaggaagaataaataaggcataactcaaagaccttacagtctggccaaaacaagagtccccttcctatgatgagtgatggggggtgtgcactcctagagaggcacctagaaggaagagagtaaacatttccataaggtggggtcactcaacctggcaaatgaattcagagttttttcaggtggagacgataagagaagcagtgtatatgaacacttaacttatgacaaagwtggcgttctagagcactgggaaaatggtcatctttacagtaaattattccaaaacaattggatattcatataagacaatatattaagctaggacatgatcgaaaacacaaacttgggctatctgaatcaaagagaaggtgtggtcactctacctgcaaccacctacctataatttccctcttaggcatataccccacagaaatgcttgcacagatgttacaagagatggacacaggcatgcatgtagcagcattattcatgaccgccaccagctggcaacaacacaaatgtccaccaactccacgatggatgaatacatcgcagcgtatccctacaatggaagacagcacgcgcagtctttattgccaaagctctatgagaagtctttctatccagtaacatgaagtcctccaatgttgttcttcaagtttgttttgttattcttggcacgtccattttcgcagtaattttagaatcattttgtgaatttcccaaaaacttaagtgaaagaacacaccaaaagatcattctgtgtatcttcatttatataaatggcccctcaaataggaagaactagactaataatgtttagagatacaagttcacagaaataaccacaaagaaaggtgaggatgctgttgccttgaacgtgggatctagaagggaggggaagcagtgactgatgctggctgctggctgtgacttttctcctgacatgaagagaggttgcaagtattcgctctgcgatagttcactaagctgtacatttggtttcatggggttttttttttcctctaaatgtgctttatttgacaataatgtttttaatctgtggatataaaatttaaaagttttgtcctaaaagagacatcataaagtgataagatgacatgtaagacagggaagatatttgtaaaacataaaactgataaatgattattgtgcagaataaataatgaatgcctataaatcgattagcaatatacagtcagggtcaaggatgaaccacatatatgatgataatcccataggattataatggagctggaaaattcctatcacctagcagtgacgccatagccatcttcacgtggcataagacatcgtggtggtgctggtgtaagcaacctaccatgctgcctgttgtataaaagagtagcacatacaattacgtacagtacatggtactggcttatatatttataacaccctgcttttaatcattatttcagaatgcactccttctacacacacacacacacacacatatgtgtatatatacatatatatatatatatacatatatatatatatacatatatatatatatatatatatatatatatatatatatatatatatttaaagttaattgtaaaacagcctcaggcagctccctcaggaggtattccagaagaaggcactgtcatcataggagat

SEQ ID NO: 16876 - DNA, 549 bp, Homo sapiens
tgcttaaggatgcttgagaaagccctgagcctacaaaaaggcgtaagaccgtggcaagaatgaaggagtcaagcaatgtgaaaagctcctgaagcccaaggttctcttccccagttttgagtcatcttaatatagaggactgggcttgaggacattccgtgaaatcttgacttactgtgttctgtgtctcaaagctcaatgtgaagcagatcttacttgcacttctaaaaggaggcatgttgatgcaatggaaaaagatctgatgcagtaagactcagagccctaagattctctctgtcactaactgccactacaagcttttgtgaggatggaaaggtctttgcagggtgcctgtacacagaaagtgtctctgataggaaagaacatgttgttggagcttaccattctagtgcagcttccctaacagcagcaccagtgggaycatctgtccagatgcccggccctgtccttctgaacatcctagattctttgcaccctccaatcaatgtcccatgagttgctttcctgctaaagttagcccaagatgat

SEQ ID NO: 16877 - DNA, 653 bp, Homo sapiens
tttattttaaaatttgttaagtcaagaggtwtatataagctttaagaataaccagtgaaggaataaaaatattacttccaaaccagtggagaggaggaaaaaagagataaggaaaaccagcaattcaagataaggcaaaaaagggagaaaaatagaagcacagaaaaagtgtagtgaaaagggcaaataagctgttaaaaattaaaagacatatctcatattccatacattctagagcttgtcaatttctcctttacaccactcagagaaacttctaaaatacaatctgctcataaattgtattcttttgaggaaagagcatgctgataacaatcagaactgaccacgtaatgaaacttgctatggccaatttgaagcttggagtagaggagaatgaattgtggataaagtcaagaattggctgcaatactctctagctttgtgaacctggacaagcatcttagtttctcatttgtaaaacagagggtaattcttgccttaacctctttgctggatatttgtgacactcataaaagaacaaatatggaaaagtagactatagtttggatataatttgtttggccccaccaagtgtcatgctgaaatctgatccctgaaggcacctcacgggaggaaggtggggcctaacgggt

SEQ ID NO: 16878 - DNA, 580 bp, Homo sapiens
gagaccctgtccccatcccccaccaagaaataataataataatagacaggtcgatgagatgtgacaaaatatcgaccctctgttaaggccaccaaaaatagatcatattaaaaggacgctcagcctggccaacaccttgattttagctcatgccagacttctgacttcagaaactcttaagataataaatttggtttgttttaagcaccacatttgtggtaatttgctacagcagcaatagaaaactgatacaattatattaataattttaaagacggcatattttgccaggtagagtgaatcatcattttgaatgactttgaatccagaagaaaatttatgtaaggaaagggcttaattgaaaactaaaacatgaaagttcttggtggctgtgaaggtttttcctaggactggaaatcccctgggctcccctcacactttgaagtcaacctaattgkagggccatgcctcgatcctttcgggagataggtgtccctgttagagtcttcaggtgtatgttatacttcaggtgtctgcaattaccttacccaggcctataagctccttgagaacagggaac

SEQ ID NO: 16879 - DNA, 678 bp, Homo sapiens
atgggcatgctcctcctctatgaatggacagtagatccgctgcaaggcttctctctgtgctctccctctccacgtcctcggcagggtccaggccatgccacatacccaatcaataaatgcttgttgaaagctcaagtgaatgagaggaaacgaagatggaaccaaggtttgaaagatcaagcagtttccggcctcttcctctgtggggcccattcacagggagcctgtgtcccggtcgcctcccacccgccagcctggctcatcccgagcctcacagatgaatattcatgtgcacagggaggcagtcacaacgcgggggggtggtgcgtcacagaagaactgagccgtgcagaggtcaccaagaagccagtagcaccacctgctgctgccagggcggaagacagcctctgtcccagcccaggcagtgggcgggagtacagagagagggctccagccagccaaggtcttctgaatyagcaggctataagccctcctcagaccaggtggctgctttgtgtgtctggaacagaggaggaagcgccccactgacctggcaggctccaatctccctcctttcaaccctgagcatttcctcccaaggccacttggccaagttgctcctagtgctgcttggaaaaaactggtaatgatggggctcactacaaatggtggctttca

SEQ ID NO: 16880 - DNA, 545 bp, Homo sapiens
tatataatatatataatatagaaattataattgccatgtataatttgaaataataatcaaatcctaatgcaagacttggtatgtgaaagtctggatttttcctttgccaagtaaggttatcacttacttatcaaatcatttttggttttggaagaaccaaaacatttttttctagcctaaaataataaatacatagtatttgaggtgtttactttgcttcttctcattacaaagacagcctttaaaataataaaatatcacctcattggagaggttgatgtatagacatgtagaaaacattgaatagactgcacagaaattactcaagctttttaaatttagcatagttgataaaaarcaatggggtaggagttggaacatgagtgttctagtgctgaatttgctggtcactgaaattgggctaaacatttctaatctttgagcttcaggttctcatttctaaagacagacagtaattccatttgttctccttcattaggaggctagcaggatcaaataaaaggaagcattctaattacacttag

SEQ ID NO: 16881 - DNA, 547 bp, Homo sapiens
aataaaaccaacaacatcctttcaacctgctggagaagggatgatcctcaaaagctggacaactgcctgtacattatttatcccctaatatgtaccggtcaaaactaagcatgtgaggaaaatacctttcccacttcaagaaaagagaagcacaagtgaaactaaatggccacgtttgatttcaattttccacttttcaaactgtctacagattgagtttccaaattttgtaatttttttcagtttaatgttatataattttatagacttcttttctatttattccctacctctcccacatgaatccacaaagacatagaataaagagatttacttattataagtaaaatgaaaaggggtgggctasagtaaggttcaagatattttaataatcatttggaataaatgataactgaattttcattttatgaacttacacagaaaataagaaacacaaaagataaaacaagtaatgacatataatagtgttcatttttctagtttacttttacatttgaccaaaacagagaaaagaacattttttaca

SEQ ID NO: 16882 - DNA, 529 bp, Homo sapiens
agataaaattggctctccatatcccaactgtatgacagtcatgaatttagttctgtgcctggagagtaatggaacttgagagtgatggaatcaatatgcttctgggttgagcagagggatgctttgggaagagtttagatgaaaacgtggcctttaagcctcggtccagagacggacttcagaagatctctaaatccatccaaatctcatacacaattgtggatgcacatrtatgtatttttttttttttttttttggcagagtacacagctttcattacgttcttaagggaattcaaggctcctacaagaattagaacctctaattcagagtactcagaagttacattctaatggttgtttgaaaaatttaagagacggtgtccctagcatttcttacagatgattgtaacaaatgtcaggtggatatttgtgactaatctgaaaaaaggtaacatcaggacctctgtgaacagtcgtcttccttagagtagtgtggggatgactgtcacatagagccttaagaggca

SEQ ID NO: 16883 - DNA, 522 bp, Homo sapiens
gccagaaaacaatactggtggctaagatcaagatagggatgggagaacagagagtatcaaagagactgatagcatttaaatttgggccaccacagcagagccgtgagactatgagatagttttaagtgcatctcatgtgtgtccagaaattatctcacctgaacatagaaaaatatgaatggagagcttctgtgggactcgaatagagaagtatatggccagataaatgaaagcaagtgatagaccttggatctcaagaggatgaacctcaaatagctttgatctgccaggagtgggtataaaaggattgtctcaatggaaaaccatatggcattttcttaaaaggttaaaaatrgaactaccatataatccagcaatcccgcttctgtatatttatccaaaagaattgaaatcaggatcttgaagaaatatctgcactttcatgttcattacaacattattcacaatagccaagatgtgaaaacaactcaaacgtccatcagtagatgaatggataaggca

SEQ ID NO: 16884 - DNA, 516 bp, Homo sapiens
tataaaagtcctctattcatgaattaatgacaatatatttgaaatcaaggtctatgtcttaaaattattttgaattatctccagcagaaactgtagaccaggtagccatgtaatacatggagtagctgatctctaagtatgtagagataatttgattgactaaacatcacttagaaaatttcagaaagaaaataatatgcwataaaactaattacttagcaggcattatgctaagcatcattagggattcaagagcccccatgctgaaagcatgtcaatgattttgctttggaattaaaataaaattcaagtgtctcaatggggtaataatgatatagcaacagttttgagtgttttatgagttaggcattgtactttataaatcttaacttttttcctattgaaacttacttagattcagagagaataagtaacttgcataaggtcacacaggtagtaagggcatagagtgggattttctccaaccacgttttcctatagctacctctcatttgt

SEQ ID NO: 16885 - DNA, 579 bp, Homo sapiens
acataagccatgagagggcaatgtggctgcagactgcagagaatgcaggtggatgacacatctacttagaaaagttgtggtaactgggaaatgggaatataaagaagccagatacaaaaggaaaaagggaaaaggtcagaartaaatttgcaagaaatacgagtataagattttattttttattttttggttttaaattatgggatacatgtgcagcacatgcaggtttgttacataggtaaatgtgtaccatggtggtttgctgcatcacttaggtattaagccccacattcattagctatttatcctgatgctctttcttccttccccctctgacaggccccagtgtgtgttgttccccttcctatgtccatgtgttctcattattcagctcccacttataagtgaggatatgtagcacttggttttctgtccctgtattagtttgctgaggataatggcttccagctccatccctgtccctgcaaaggacatgacctcattcctttttatggctgcatagtattccatggtatatatgtagtatattttctttatccagtctataattgatgggca

SEQ ID NO: 16886 - DNA, 549 bp, Homo sapiens
ctattcrtgtgttttcagtccctaacggaagtgaaagtatattaaactgcaaccatccccttcccagctaaaaaggcagcagcttgggaggtttaagttgtccattcacaagtgaactcattctaattaaagctgtcacctttgagtaaatcaatttactcaaattgatttaagtaaatttctgaataatcagcctggcactcttaacaacttgtcagagaaaagagtttaaataaacaaaaatataaataaattttaaaatattttatacatcagtttttatacaatgtgcatgctacaataaaaaaagtccagaaacataaagaagcagaaaatataagaacaataaaaaccaaaacagcatggtactggtaccaaaacagagatatagaccaatggaacagaacagagccctcagaaataatgccacatatctacaactatctgagctttgacaaacctgacaaaaacaagaaatggggaaaggattcactatttaataaatggtgctgggaaaactggctagccatatgtagaaagctgaaattg

SEQ ID NO: 16887 - DNA, 549 bp, Homo sapiens
ctattcatgtgttttcagtccctaacggaagtgaaagtatattaaactgcaaccatccccttcccagctaaaaaggcagcagcttgggaggtttaagttgtccattcacaagtgaactcattctaattaaagctgtcacctttgagtaaatcaatttactcaaattgatttaagtaaatttctgaataatcagcctggcactcttaacaacttgtcagagaaaagagtttaaataaacaaaaatataaataaattttaaaatattttatacatcagtttttatacaatgtgcatgctacaataaaaaaagtccagaaacataaagaagcagaaaatataagaacaataaaaaccaaaacagcatggtactggtaccaaaacagagatatagaccaatggaacagaacagagccctcagaaataatgccacatatctacaactatctgagctttgacaaacctgacaaaaacaagaaatggggaaaggattcmctatttaataaatggtgctgggaaaactggctagccatatgtagaaagctgaaattg

SEQ ID NO: 16888 - DNA, 563 bp, Homo sapiens
ataaatgcatcgtaaagtctttttccctgactacaaagcaatctgttgtgttagaagcaggactagcaaaacaattgagatgctgacaagagtatcaggcaaagtaagggcttgtttagatcagaatatctaaatcaatattgtgctttaatctaattaacacatactttgatattgccaggtaggatttattagtacaaagcataataattccatcagtcaaacttgtaagtaatgttaaattaagggcaggtgagccttgatagttacatgtacatttctgtggatttgccaagtgctcagaaattcaacagtatgatcatattgaatattaaaagaaaaataatgccagtttgataagatactaaaataatgctgtcctcaaaaactgactggcaaaagtggwctttattttctagtatcactgtgaattaggatgagctcattcttagcctacagatgggagtaacctagccaaaccttggaaatggaccacacttgtctaccaagagattgttagaggaccccaaacctggccagagaagatgaacgagggcaggttc

SEQ ID NO: 16889 - DNA, 550 bp, Homo sapiens
ctatggtcactctgttgtgctatcaaatagtaggtattattcattctttctaacttataagagcaaaacattgtgaaaatattaattgatggagaattaaaataattggttatttttatgtttatgtaatttcatgtatgaagaagatcatacatgcttaagagtatagctaaaaaatatggtgggtctgactggtgtttgcattatgaagtaattttcaactaagaaagatacttctgggctccatacttttaggatcaaagatttctcagtgtaataattacagctagacataatggcaatttagccttacatggattgtccctcagttaaagttaggcgttttgggaagtggaattagctctttcaggtcgttagagaccatttagcaaatcatttttttttttcaataatgraaaagtgtaaatgaaataagtccattagattcacgtcccacctgatgtaactggaaagtgtggcagaagcgtgttaaaaggaatgttggttcccctgagaaatcaagagctagaaacactaatgaatcagatta

SEQ ID NO: 16890 - DNA, 531 bp, Homo sapiens
ctttctaattggtgtttataaaattattaaatcacaggacaatgaatacttttacatgatcataatttctgaatcattttgatgtatactttctccatgtatgtttctttatactgaaatgtatttgccaaattgatcactccataatggagtgattaatggattacattcacgtacattaatgttattttcaaatctctttttcatttaactacactttttagttgtaattgaatgtgctccttcacaatgccttttcttttatgaggagacatcaaattktattcaaacaattatgtgctattaagaaaacaatgaattagcaggaaaattgtggcattagtaaaatttaaattcttcatgtaataaacaatgataacttttctaccatgacattgaaatttaacatttattagagaattatcatttatagttaaaatgaatttcagttatgctcttttattactgctacaatgaagattaaaattttagctatggttctaatgcaaaataataaaaaaatttatgaaa

SEQ ID NO: 16891 - DNA, 1066 bp, Homo sapiens
atatacatgtatacatatagatgcacgcacactcatacacacacatccctttcttccaccacggagagaaacaaaggtgattgcacttgacccactgttctcgcctgggacaaaagaatccatggttcctgagtctgacctctggggtaacatgaccggtgacttrgtacctaagacaggagttaggagatccctgagctcttggcccgggttgtgccacagagctggaatccacctgccagttcaacccctctggaccttgataatggccggactgtccccagcccggcggagctgactgccagcatatcatttataaacccggctcagatctttctctgacacctcccctgccgcttttgttccccgctcggtgcatgcgaagcgcaagaacttttctcgataatagggagggctgggagccgtgtcagagaagatgtactccagccgtgctgaggacaaaagtcgcagatgcccattaaaacagatccagggaacagcttcgctttgggtttggagccgatgctccttgtcaactctaacgtgctatgcaaatggtatgaccgagactcctggctcgctgctactcgcatgctgctgtctgtgacccactcactaggtgaggccccgggggtgagctggttggaaggcaagagccctgcatagagggaggcctgggtctgcacacctctcactctcacatctgcacgcccacacgtgcagctgcagtcaaaacggaaagttctattcctccagcaagaatccttctttctcatggaagttctgtgtggctgcacagattttagcaaatgaaatagcctggccagtttctcacaagaacaggaagcatttgttgagagccctctgcgtgccagatcccctactaggtgctgggttaaggagctttctcagggtcacacagctgccatttggctgagtgtgagttcagattcaggtgtatctgtcctcataattccaaccagtcacacccaatgttggtcttactttattgaggagcttaaaaaaataaacctaatgggattattttgactgcaggttaaatctt

SEQ ID NO: 16892 - DNA, 477 bp, Homo sapiens
ggctgaggtgggaggatcacctgagcccgggagttcaaggctgaagtgagctatgatctaaggctaagatctggggctaagatttctaagtcacataaaatggtctatatgaagatggataatatttgacattttctcaaactacagaaataataataatagcagtaacactactactaatagtggccaacatgcattgtggctcacttcagacctagcattgcagtttcatttgtctaacaccgtatgaggaaggtattttaaaaaatctctttgacagatgtggaaattgaggctaaacaagagtaaggacatacagctcctaagcggcagaattagaatctttatgactccwactgagtttaacctttttcagtttaaaagcctttcatcttcaaaattctgtgaaatgatttaagaagtttataatgcattaatatgtttccaaaaataagtcaatagtagacattttaaacc

SEQ ID NO: 16893 - DNA, 501 bp, Homo sapiens
ttgtattttggtacttgaaaatttttactcaaatttagtattccagtaagcaccaactgacaattctaaacattagttacatattccaactaggcactagctaactaacactcctaatgctttaacataatgtcccttatatcttcttcatctgtatataactgtcataataatacaagttaaataataataaataaataatgacaagtaataactaaacccaataatcaytgaaaatttctgtgactttccttttccatcccatcttccttttccgtgtatgtgaaatgaaagccacttccatccctactatctgtagtataagaaggaatgatgtgacttgagggatctacctgtacttccattttccattttctgcctgtacttctgaccatacttcagaatcatctttaaaaaaccttttttaaagatgattctgaattttttaaatattttttaaagaagattctgaatttctgaaaaaaattctgttgtttcaaa

SEQ ID NO: 16894 - DNA, 551 bp, Homo sapiens
tagtatcccatttatataaaatgttaaaaaatataatctatgcacatttatgcacagaacaatatcacaaaggacgtgttccaagatgtttgacatgatgacattttatttttatttttttgagatggagtctcactctgttgcccaggctagagtgcagtggcrcaatctcagatcactgcaacctccacatcctaggttcaagagattctcctgcctcagcctcccaagtagctgggattacaggcatgtgccaccacacctggctaattttttgtatttttagtagagatggggtttcaccacgttgaccagcctggtcttgaactcctgacctcaagggatctgcccacctcggcctcccaaagtgttgggattataggcgtgagccaccgcgcacagccagacatggtgactttttaatctcttattcttttttatacttccctgtgttgattgagcattccaaggatgtgctatctttataatccagaagaaattaggaatttagaatttaggaaaaaatatacgtatgtaaaaaactggaagaa

SEQ ID NO: 16895 - DNA, 538 bp, Homo sapiens
tttgtagttgatatttatatccataccatatcatctcaccatatatacgattttacataaattatctaacaacctgagtagtaaaacagttcatggaaaatgaactgtagaaaaatgttacatggatgtgggtggtgtgtcttaaagatcacagataatttctaactgagtrgcattacctttattaataataacacatgaaaagttaaggaaacttcagttctggatctgagcactgacttctctgtgaagctaagtgccatttatctctcaattagagcttttaggagaagaaatatctaagatgacagatggcaagatttaacaataataattagaaaatctggatatagtaaatgcaactggagagaaggcagtagacatggaagagagaacaagatgatccaacataaggataacaggcattcctgatacagagaactaaaaacaagacaaaaaggtggtcaaacatatgatttttaaaaatacaggactgtctcctccatgtttcagttgtctctgatccttaatgtcaccg

SEQ ID NO: 16896 - DNA, 538 bp, Homo sapiens
tttgtagttgatatttatatccataccatatcatctcaccatatatacgattttacataaattatctaacaacctgagtagtaaaacagttcatggaaaatgaactgtagaaaaatgttacatggatgtgggtggtgtgtcttaaagatcacagataatttctaactgagtggcattacctttattaataataacacatgaaaagttaaggaaacttcagttctggatctgagcactgacttctctgtgaagctaagtgccatttatctctcaattagagcttttaggagaagaaatatctaagatgacagatggcaagatttaacaataataattagaaaatctggatatagtaaatgcaactggagagaaggcrgtagacatggaagagagaacaagatgatccaacataaggataacaggcattcctgatacagagaactaaaaacaagacaaaaaggtggtcaaacatatgatttttaaaaatacaggactgtctcctccatgtttcagttgtctctgatccttaatgtcaccg

SEQ ID NO: 16897 - DNA, 517 bp, Homo sapiens
cttgtagaatcttgagctgtctctgagtctgacaacttatggagatgatcattattgtaatagtaaacaacttctgtaaaaaaaaagcttcatataatgcttactatacactaggtacaattcctagtgctttaaaaatattaactcattgaattttcattaagaactccattaggcaggtactagtactgtgctgaatattcccatctcccccattcttcacctgyttcagcgccccctggagcctgacctcatcaaccagtcttcttggttctctgactcatcattgagttcagcctgtaggagacaccaacagtatatagaggagagaaaagtcaatattttacttcattagctgcctttctgccagctgcactttgacaatacatacttttctctgccaaagtcctcaattccatagctagcccactcctacagttacaactctcctgagattctattcactaccctctccccttgcctctttagacctaggcaggctaagatgtttttatta

SEQ ID NO: 16898 - DNA, 514 bp, Homo sapiens
tgcaaattccttacatgtcttccctaaaatttaaaattttaagaaagtttagtaaatcatagccttaaaaaatttttcataaagaaatactttaggattcataatttacaacaatggaatcaacttataaaagatcttaagaaatatggtattctaccctatccatctctatttcaggagagttattttacaaatggagattcaaagccaagattcacccacctaacatcacacacacgagtcaataggagaaccaggacaacccagatctgctgacttgtgtaccttcctgccacrctctgctggcatgcatttggagaattaatgtactattaacttcttgactttcacttttgtctgaatcaacttggatgccagctttcacttagtgtgaaccttcataaacatgttttcattctgtacaaatgagtcatatactctgtacaaatgagtcaactgtatcctccttccttttcaatcctttactaaattagttctgaaactccagccgtaa

SEQ ID NO: 16899 - DNA, 652 bp, Homo sapiens
gttcatttttcatttcacggaattctaaaaatgtgccaggtataattaacagctgttaattagattcaactgtgctccttttcctttcttttgattacagcgcccctcttcgcagtaaggagtctgttcatgcagttcaggtggggctaacacgcttgcacctgccctagatgagggaatgggtacaagaaagcccaatcagactattctcttagattaaatacatagagcttgggagataaagggtttatcttatgggcttgggggtaaactaagaattacatagacttgggactactggtagctgttgtgctgctgagtagagagaacctcttcaagaacaaagccatgaagagacaacagagggatggaaaaaagagagacctgaaactctcagatctagtcattcctggaatcagatttacctccttggactttccaggtatatccagcaacatacaattgattcttattgtattagtcagggttctccagggggacagaactaataggatggatgtagatgyatacatgaaagggagtttcttaaggagaattgactcacacgatcacaatgcgaagtccatgataggctgtctccaagctgagaaagaaggaagccagtagtggctcagtccgagtccaaaagtct

SEQ ID NO: 16900 - DNA, 629 bp, Homo sapiens
tgctgatatttaaaaagtaattattagtgttggcaaatgtgaggaaaaaggcattctcatacactgttggtataggaaattagtaaattatttctgaagggtaacttagtgctgtgtatcaaaatttcaaatagcctgacatccctttaactcaacaactccacttctggggctagatttcacaggaaaacataactggtgtraacatacacacacttattaatatataattaacatgcattaattatatattacacataatgaacaataggttaatgaatatataaaatatatgtaataagaaggtgaattgaaagtattaagaaagaaatataaaaagtgtggggaaacagatgttagactctttagcctagttttggatgacagtcatctgcagatatagtttgtgtgagagacatctgaaggtgtcatctcactctgtaaatcatttggagaaacacctgcaatatttcataaagatgaaaatttatttctagtgaacttatatgcttgtcaataaatagtaactttaaaaatttagttgattgtaaatgatcttttctaattagggagtaattatgactgtgtgatttaaaaaggtaattttgaacctgtaactttactgaatt

SEQ ID NO: 16901 - DNA, 473 bp, Homo sapiens
tgtctgtgatttacgagttaggcactacatctccattttcagactgaggggtggcaggcttcacatacagtgggaatggagtaattacaggagggagttgtaggagctttgaagtcagagagggaggtagaggcctttttacctagggcmtcaaaggccattggaattttacttttattctgagataggaatctgttggaaggatttgaacaggtgattgaatatgttaggaactttgaggctgagttgagcttctgagatgattgaatgttggaatgaatctgttgtgtaaaagagaataccaatttggcaggaagagaacatattctgcatccctcactgaattcagtaataaataaaaatgtgtacatgtgattaaaagaaggtgaattgatatgtgtggtgataattttcaaagtagatatgttagaattaaacattattaacataatttaataaggcagtttataaaa

SEQ ID NO: 16902 - DNA, 579 bp, Homo sapiens
cacctgaggtcaggagttcaagaccggcctggccaacatggcaaaacctcgtctctaataaaaatacaaaaattagctgggcatggtggctggcacctgtaatttcagctactcaggaggctgaggcaggagaatcgcttgagcctagaaggtggaggttgcagttaactgagatcgcaccactgcactgcagcctgggagacagagtgagactccatctcaaaaaacaaaaagatattcactgtctatgcatcccaggatctccagaacaattacaataaataaataaataaataaataaataaataaatggctgggggcagtggctcatgcctgtaatcccagcactttgagaggccgaggtaggtggatcacctgaggtcaggagttcgagaccagcctgactaacatggtgaaaccccatctctactaaatacaaaaaattagccaggcatgattgtgcatgcctgtagttccaggtacctaggaggctgaggcaggagaatcatttgaaactgggaggtggargttgcaatgagccaagattatgtcattgtactgcagcctgggcaacaagag

SEQ ID NO: 16903 - DNA, 624 bp, Homo sapiens
ggaggctgaggcaggagaatcacttgaaccagggagtcagaggttgcagtgagccgagatcgtgccactgcactctagcctggtgacagagcaagacttcatctaaaaaaaaaaaaagaaaaaaacagtaaaatacaaaatgtctttttctcctaaccttcttagccttctgctggtacttcaatttctgctggtactgtttggtcattgccctctaaagaatgatggcttcctaaaaagaaaacaaacaacatataaaccaataaaaactcacattgaaagataaaaaataatctagrtgacgatgcaagcacttttaagacataataggccaggtgcagtggctcacacctgtaaacccagcagtttgggaggctgaggagggcggatcacctgagttcaggagttcgagaccagcctgggccaacatggtgaaacctcatatctactaaaatacaagaaatcagccaggcgtggtggcgggggcctgtaatcccacctactcgggaggctgaggcaggagaatcacttgaacccaggagacggaggttgcagtgagctgagatcgcgccgctgcactccagcctgggtgacgagagtgaaactccatctcaggaaaaaaaa

SEQ ID NO: 16904 - DNA, 565 bp, Homo sapiens
attggctaaaagaataattcagataaatgaattaaaaaggtgaagcactcacacccaaccagagcaagggttggcaaactatagcccgcaggcctaatctggccaaatgcctggttttgtatggcttcaagctaagaagagattttacagtttgaaatagttggaaaaaaaattaaaagaataatacttyatgatgtgccgatttgagattcaagttttaatgtccataatgtttatttatgttctatctgtggctgctttcatgctgtaatagcagagtcgaatagatgcaaaaaacaacatatggcccacaaagcctaaaatatttatttatttatttattattattattttttgagacagagtctcgctttgtcacccaggctggagtgcagtggcacaatctcggctcactgcaacctacacctcctgggttcaagtgattctcctacctcagcctcccgagtagctaggattacaggcgcgcgccactgtgcccaactaatttttgtatttttagtagagacggggtttcacaatgttggtcaggctggtctcaaactcc

SEQ ID NO: 16905 - DNA, 541 bp, Homo sapiens
gaggctattgagtgtccaagtggagttcttcaatcatcaatttgaagtgtaactacttagacaattttatttttcctgattgcttgggtgctgatacagaaaaaaaaataagtagctaggttgatccaagkcttgaagtctggaatgtatagcatccatccaatctgcttttcattgcctcctttacaattttaaattcgggaatcagatttccgtgaaaactttcttagtctcatagcatgattattttgatttcctgttcttagtccatgagcacaatgctttactgaacctttatgccacataataaagaatttgatatacttttcttttttgcagtaattctatgacaaatggtggtcatctgctaattcctcaagaaaattaaaacaaacctctgttgaatgcatatgttcttttgtatgttcagaggttgctttttaataactcttttctaatgcttataaagggagatctatgagtgtcagaactgggagtttaaatatgttctttcagagatcatgtaaatctctgttcattt

SEQ ID NO: 16906 - DNA, 587 bp, Homo sapiens
agtgcctcattggtaaataacaaaaagccccatatcttatgagatttctgatacagttgagccgtaaatggtagttagagttgcttaactacaaaggtgtttgggtgttcaaccaaggcagaactcttacactaacagaccctgtttgggcaaacctgagactgtgaaatactkgatggggacatttggatggataaccctgaggatgctggctctgcagactcctctgaaccctcacagattaaaaagatgactacacttccctggtaagagggaaagtaagaggcgggtaagaattgccccccacttcctttcttggctgctaagtcaataactggcaaggtctgcctggggaagtgctggatctgaaaagggagaaaaaagattaccatagaaggagctacaggaatttgctatgttgtattggcaaaatccattggaataccactgggatgttgagggtacatgatcaagggggccagaatgtaaaactagataagcaagaatttattgacttagggttagtttctcaagacacaggatttatcaccctggcaaagcctcaagcgatagatcacagtcattgc

SEQ ID NO: 16907 - DNA, 469 bp, Homo sapiens
tcagtgaaatggagtctcaaaagctattaaaaatctcatggtacagtttatttataccctaagtcttcccttccacaaaattcccctttattgaattttattgttgtataaagagccaaagagtaggatgttaagagattrgaagagcagggagtatagccagcctccaagggaaagacaaatggataaaggacttcttgactgtggtttttgtgtaattgatactttagggagtgttcactacatactattttttccttcttcttcacatacttaggtatattttatggttgtcaactcatgaaaaccctattactgatcaagggtcttccatattggttggtgctcagaaactgaggatgtttataagcccttaaaagtcttattcaagctctccttgtcccttgagctagaaagtagcatttttcaagattgaagggagctacaagcccaaaaaaaaaaaaaaaaa

SEQ ID NO: 16908 - DNA, 498 bp, Homo sapiens
ggaaaaaaacacagacaaatcaacacttgacttattccacaaaatgagtcattgttgcaattatacaattataatattttgtgaaagataacaattattttaataatcttctaggtcgattttcaagatgaaagtcccaagcaagcctcctttcccactctttttgtgtatgtgtgtgtgaaattttaatctctgtttaagtgggtctactttgagtggtctttcttcagaatcaattatcatgggttaaggagttcttccattacctttgatgcctctrtcaggcactccaataactgcttgttcaacaaactaccggaagtccacgacggggactcaatacaagtattttaggctactcttttgtgccttattgacttactggactgggagtcctctacattaagccacattacattctaaacgccactgaagccctagatccattctggggatgggagacaccattacattaagaaatttcttttctgaacgaat

SEQ ID NO: 16909 - DNA, 574 bp, Homo sapiens
actgtcatgtttatctttaagtcctggttaagcaaaagtctataattaaaaatgtagaaacaaacaaaaaaaaagattagcttctgttacacatggatataagaaataccagaatcaagaaactaaataaagcagtcttcccaatgtctaccatgatttgctgattacatgcacgaatttatttcttatcactcatctccctatattatattgccatcaacatcaaataaaaaaaaaagaatcactgctccttaagatgcctttattcgttctcctaaaggtaggagtcagagaatgggggttgggggaggccaagagagagtagcgattaaaaaatttaacaycctacctttatagctagaaaattcagtccactctcattggccaaagcctttgctatcattgttttagagcacccaggtggcccatagagaagaactcctttaggtggctgaatacccattcgaatgaaagactctggatgttttaagggccattccacagcctgttccaacttcagtttgatactttccagtcctcctatatctgaccaggatacctgaaaaatagaaca

SEQ ID NO: 16910 - DNA, 1052 bp, Homo sapiens
ccacagatctctctcgggctcaccctgcgcctgtgggacgtgtatctggtagaaggcgaacaggcgttgatgccgataacaagaatcgcctttaaggttcagcagagtaagtctacgtgtgcccagcggggcctggggagccctggggtcagaccccgactggcccgagggcagcttcctcacactgtcctcatgatcckctgttctggcccagagggaggtctggccaggtgggctgggcaggacactgtgacaccgagcccatcccccacatgacccagatgaaagtcgagagtgtggtgagcacttccctgtccggatcgccccccagccacagtctcctgtgtatatctggacacctggggtggccacaaaaggatccggcaccgcccagtaggagactgaagtggccacgggatatgagctgtgaccattcccaggtaactcccctggcctgatatccaccctgtccctagagcgcctcacgaagacgtccaggtgtggcccgtgggcacgtttttgcaaccggttcgttgatacctgggccagggatgaggacactgtgctcaagcatcttagggcctctatgaagaaactaacaagaaagcagggggacctgccacccccaggtgggctccagtgccatgtcccctcccatgtcaccctctggggtagtcagtagtaggggagtgcccgggacccgcaaccctactacctgggccttcctcttcaccttttcttcctcctcttcctcctggactctaagaaagtacaggaggcccaccggtcctcagggcaggcgctcagtgcgtgtatactggacatgctgtgcacgcaggagggggatgtgggcaagaccctccaacaagccccctcccactttccacggtgtctccctctccccctcgcagggccctccaagttactagacgagcccagacccatttgtgggagaccccgcccctccctgcaagcacccacagcctcagagagcagcagaggcccctcactcctgcacgctcctccaaggttgccaggacaagaagcctgga

SEQ ID NO: 16911 - DNA, 1052 bp, Homo sapiens
ccacagatctctctcgggctcaccctgcgcctgtgggacgtgtatctggtagaaggcgaacaggcgttgatgccgataacaagaatcgcctttaaggttcagcagagtaagtctacgtgtgcccagcggggcctggggagccctggggtcagaccccgactggcccgagggcagcttcctcacactgtcctcatgatcctctgttctggcccagagggaggtcyggccaggtgggctgggcaggacactgtgacaccgagcccatcccccacatgacccagatgaaagtcgagagtgtggtgagcacttccctgtccggatcgccccccagccacagtctcctgtgtatatctggacacctggggtggccacaaaaggatccggcaccgcccagtaggagactgaagtggccacgggatatgagctgtgaccattcccaggtaactcccctggcctgatatccaccctgtccctagagcgcctcacgaagacgtccaggtgtggcccgtgggcacgtttttgcaaccggttcgttgatacctgggccagggatgaggacactgtgctcaagcatcttagggcctctatgaagaaactaacaagaaagcagggggacctgccacccccaggtgggctccagtgccatgtcccctcccatgtcaccctctggggtagtcagtagtaggggagtgcccgggacccgcaaccctactacctgggccttcctcttcaccttttcttcctcctcttcctcctggactctaagaaagtacaggaggcccaccggtcctcagggcaggcgctcagtgcgtgtatactggacatgctgtgcacgcaggagggggatgtgggcaagaccctccaacaagccccctcccactttccacggtgtctccctctccccctcgcagggccctccaagttactagacgagcccagacccatttgtgggagaccccgcccctccctgcaagcacccacagcctcagagagcagcagaggcccctcactcctgcacgctcctccaaggttgccaggacaagaagcctgga

SEQ ID NO: 16912 - DNA, 571 bp, Homo sapiens
cacgaagtgatttacagtgacattttcatcatattagtttttattactggggtgtgaataaaatgtactgtgttcagtttataaaaagatgttataattgttgggagataattctccatggcttctgtgtttctggaaaccttctgagcaaaaggcattgacagtttgattcacagatatttgcataacagacagtcttggaaagataaagatagtgactccctgcaaagagatttggagctgcctcttcctgagatattccagggtaacagagctagagaccgtgccctttattccctgaagatttgcttacattctccagggaggggccaggcacgatggcacacacmtgtaatctcagcactttgggaggccaaggcgggaggatcgcttgaggccaggagtttgagaccaccctgggcaacatagtgagaccgcacctctacttttatttaaaaaaaaaaaaattctgttttttaaacccaggagggctgggcatggtggctcatacctgtaatcccagcattttgggaggccaaggtgggtggatcacctgaggtcaggagttcga

SEQ ID NO: 16913 - DNA, 545 bp, Homo sapiens
acattttagatgtttccattggttggaggcagagacagtgctatgaaatctttggtgaaaaccacaggaaacaagagtcaaagaaaaccatatagtagtataacttctactttattacactataaaacacaatgtaaacacataaatagtaaagaacagcctgataattttttttctttcccactaaatctttttttttttttgagatggagtctcactctgtggcccaggctggagtgcagtggtgtgatctctgctcactgcaacctctgccttccaggttcaagtgattctcctgtctcagcctcccaagtagctgggactacaggcacgtgccaccatgcccagctgattttttgtatttttttagtagagacagggtttcaccatgttggccaagatgrtctctatctcctgacctcgtgatctgcccgccttgacctcccaaagtgctgggataataggcatgagccaccgcacccggccgccccactaaatcttttaaaaacacttttgagcctttatcttctaaatagtaaactatg

SEQ ID NO: 16914 - DNA, 417 bp, Homo sapiens
tcaacataaacattgagaatgtgtgcggaggaaagcgatccatgtggatttctaactaaaacaggagagaatcccggacctagaaattaaactataaattagaagttgtagccagaaccagctataaaatttgcagggcacaatgcaraatgaaaaggcagggccttctgttcaaaaatcgttaagaatttcaagatggcaacaacacaacattaaatcgattgtggagccctcctaaacacacagttgcacaggtcacacacttataaagccagctctggttttgtaagttagaatgtaacaaaatgcttgaatcaagaaatctaatcaaaatgtaaaatgtcatttcaaaattgaatcatgtttcactcttttcccacagattggacttagtattaaaaagatgggatcgttttt

SEQ ID NO: 16915 - DNA, 493 bp, Homo sapiens
tgggcagggttcatcagagacagctctgatgccccatggagcatcagttgggactataggatctacttttattatggctattactggctgataagttgatgcctgctattttctctccacagggaagcttaggcttcctcacagcatggtggctgggttccaagagcaagtgccccaagaaacaggaagwggaagttgtcagtttcttattgcctgaggctggaaagtgataatgcatcattcccaacacattctgtgggtcagggagagtagagtgtaaatgtaaggggacgagatacagacctcacctctcagtagaagcagtatcaaataattttgaagctggaaaccaaaaagtatctgagacgggtctcagtcaatttagaagtttattttgcaaaggttaaggacatgtccagagaaaaggatctcaaatccacaggaacaatctgtggttcatgccattttcctaagaagattttgagggtttcaa

SEQ ID NO: 16916 - DNA, 1059 bp, Homo sapiens
catctgagacaccccccatcccaaacctgctgagccacagaaactccgtgggcccgctcctgctgcaaccagaatggagcccaagaaagctcttgggaaaacctaggcagaggcctagaggcaggtgtgtgacctccactgaagcagcctgaaagcaggaggcttgttggagtgggccagcagcagcacctgcacttctgccttttactaggacaaggtggtgaacgtcctatacccaaatgggtggtgaagaaggcaatcggggtgatgttccaaagtgccattggaaagtgtggatgactagggcaggacccaagaggaatgataagaggtcagccagaaaacccaaagacatcagggaatgaatggcctgtgaaggttttctacagggctctctgaaaagcccataaaatgccccctacaagacctagtaacaagacctagtaattgggttcctgtcataataaaggacattgaatcaagagactattataaatgacaggtttttttaaatttaatttttattttttaacagaggcagggtctcactatgttgcccaggctggccctgaactcctgggctcgagtgatcctcccacttcagcatcccaaagtgctgggattataggcatgagccactgcatctagacaatgacagttttgggktttttttttgttttttttttttgagacggactgaaatgaatgagagtgaatttagattgagattagtctgggctctttcatacatgaaaataattctgttttcctactcacacatgacaataaacctttgagatcttttttagatgctatcaaggagcaaggaagggaaagatcattttgaaagtaatagtgggctgggcgcagtggcttccacctgtaatcccagcactttgggaggccgaggcgggcagatcacgaggtcaagagatcaagaccatcctggctaacatggtgaaaccccatctttactaaaaatacaaaaattagctggacgtggtggcagacacctatagtcccagctactcaggagggctgaggcaggagaatcgcttg

SEQ ID NO: 16917 - DNA, 534 bp, Homo sapiens
gtgagctgagatcgtgccactatactccattctgggtgacagagatagactccatcttgaaaaaaaaaaagagtcattttctgtggggcactgcccggtggctctggccccatggggccattggcccagcttgccattccctgagctccggtggcccattgttggaggagctgttcgcccagggcrggcccttgtggacctttctcaagctccaggcggggtctgaggcccatttgaaggtcaggaggcccgagctggtgacagtggtaaaactgctgaacgagaaggagcaggagctgcaggagaccgagcacttgctgcaccatgagaatgaagatttaaggaaacttgcagagaatgaaataactttgtgtcaaaaagaaataactcagctgaagcatcagaagaaacagatgaaaatgatttgatcctggaagtaactgcaggagttggaggtcaggaggcaatgttgtttacttcagagatatttgataggtatcagcaatatgctgcatttaaaagatgacattttga

SEQ ID NO: 16918 - DNA, 899 bp, Homo sapiens
ggaggctaaagcaggagaatggcgtgaacccgggaggtggagcttgcagtgagctgagattgtgccactgcactccagcctggtgacacagtgagactccagctcaaaaaaaaaaaaaagaaagaaagaaaattattgcttccttataattattttatggagcacataaaattaagcatataatattaagaagtcgagatatctaagttctagtttatatcatgcatgscttaaaaacagttttgtaagactgaattatattaaatagaatcaaaagaataagaataagtaaaggcaagttgtagagcctcaagtaagacttctgtagaagacatgaagccaccatctctcttgtaagctatttgctaatttgtctgtttatttcctactgtgttccaaaaagggaacaactaatattaatagattgatgtatatagcacaatgcaaagcagtcagatcccacctgcaactagaatttctcaaatactctacttgggtatattttggaacctcaactgatttggaggaatacacatgaaaggcataattcccagaatgctagaattacagagcaacttcagaaaaagtttaattactaccttcctaaggtgtcccaatgctgctgtatgtactcctcctgttactttgcacctaaaattttaaaaataaatatttatgcctgtaaaattcctagtatggatcgtacaccactgttgaccttcatactgtgactgcactgtctgctgaaggaaaaggaaatcatatttgtggaatatacagtgtttggttttggtatttagagttcccaggcctgataggattccctttccatacctgagaggaggcacagatggtttgtgatgttggtgtgtaaggctaccgctgggatctctagataa

SEQ ID NO: 16919 - DNA, 1030 bp, Homo sapiens
gcaacctgcgcctcccgggttcaagcagttctcccttctcagcctcccaagtagttgggactacaggcacacaccaccatgcccggctaattttagtatttttggtagaaacagggtttcaccaagttggccaggctggtctcaaagtcctgacctcaagcaatccgcctgcctcagcctcccaaagtgctgggattacaggtgtgagccactgtgcccggctgcaatgttgttttctaatataagaaattaaaagagaaaatatggctaagaaaaagaaaataaatctatgggcaaagttaatgcacatatgagatataattccgtatatctcatatgtttcactaaaaggtttgaatgcaaatttggcttttggcttttagcaacaaaggtaaaaaggaagacagcactaattatagaatctagtgtccataaaaaaaaataagcctgctacacaagtgaaacggagcaattcctaatactaagatgtaagacacatcatcaatttaatcctcattagaggatacagtgtgagaaagtgaataatatccttgaaataaatacagtgaatttctcaaagttctttgatccttcgagactgtgaagtcaagattgttgtttgagggaagtgctctatttgcttttaaccgtatttaaatatttacattaaacctatatctagctgccagataaaactatttttttctaaattcctccgatatccaggtttttgtccaattcatcaacaaacccttctgagcatcagagaggatgccctatactattgccaaaggaatttggatcctctscagggtgaccaaacatcctggttttcctgggacaggggttactgggatgtgaacctttccatgataaaaccaggaaagttcaggcacactggcataagttggtcactgtactatttgtttctgatttgttgccttgcttctcttgtgaaacgttcatggagttaaagaatggaatactttgagtctttgcaaatggaggcatgtagtggtaggtatgctga

SEQ ID NO: 16920 - DNA, 516 bp, Homo sapiens
ctccggtccctgagtggggtcatccctggctgaggcttccttttatttctgggcaagctttgacctcacagctagcatcaggtttcagagataagttgccacaccccttggagagttctttagctttcttagggcaaagggaaagatggatctgtaccctgagagctatttttagatgaccagaaccttggagtagacagccatagtgagatggaagcctgccggtacttttatggtctttatttccaagatgttctcttggagcatcttcctttaagaagcttcctatttgtttgatggcagaagagcttagratttctttaaggtcttgggccagacccttctcttgatgacagtggactttacaaacttctagtcagcaagttttggtattaatgcaagtttttggatgggactggtttggggtttcaaatggcaactgctatagcaggagcatcctctgaagtgtactgtcctttatggtaaagttcagaggacttgaaaaggccatgcaca

SEQ ID NO: 16921 - DNA, 642 bp, Homo sapiens
caggcttgtgatttgaccttgaaagaaagtcatcaagtaaatggcacattggactttgtcagtcacttcactgccttgcagatctatcgagagtgaagctttcctgatttctctgtaccagctgtgacgtttcttttaatgcctgtggcattttgtacttgccaatgatgccgcttcgaggatacgggtcctgttttaccttctctttgcccaggtccttgaaggcaagggaggacttatcttcatctttgtaccctgcccccacccaaggtgcctaagtgctaaaagtgggtggtggttgtttccatgaagttgagtctcctgattctaaagctggtcaccttctcttctgccttagcttctggaaagggcctcctcaygctcatgcctaccaaggtttcagatagatgcccttttaatcccctgaaagattcaaggaagccccagctactggtcctggggcagttagggctgtgttgtgagccagtgccttgttttgtagtaacattcatttggagaggcagttcagtaagggaaatccacgtgtgcacattcacttaacatgaattgtgacaccctgtggggtgggtgagtaaatggttgctagaaagtctgagtacattttgggcaggcaggctgtgg

SEQ ID NO: 16922 - DNA, 535 bp, Homo sapiens
tgggctggttttgcggggactgatgaaaattatgagggtcttctctcacggcttccttcagggtcctacccctgtcgaaccttcgccattaattctgtcatccttttgcctgagataagctatgcgtttccactttcaagyacatatatacggattcaatacactcactgcctttcttttaaaaagctgattcacttcaaagccaatttaattttgcttagtttttgatctccccgcgccccctttcctcagcccctatacacaggtaggtgagggttctaaagccattttacaggcgtgattgaagcggaggccacagagcggcagcgctgggtcccgagtgagactcccatcatgtggctctggggggctgcgcagctttgactgcctggacagacgcccagagctgcaattcctgggcagtgtgggaggcgttcggctaaagctctttgtttctgctgtcatgagcgactcctcggagaagacgtgggagtcaaggatgggggggcggcgtgcacaccgcccgcccacacct

SEQ ID NO: 16923 - DNA, 561 bp, Homo sapiens
ggacactgccattctgggggacactcaggtctgttctcctgccttcccgtcctggaaattggctggtgtgcagttgccctaggacccggggtctcctgggagcccatctccccacaccctcctcccaggagatgaggtctgatatcacaggaaatgagagttactcggcttaaatgctttttccagcctagagttggcatttctgccctggttctgcctctcccacagtaattaactaattaattgccaacaagggggtgatgcaattatgacacaatgagcctggcttttcagcctcccacccaggagcccccamgctctctgaatcaagagaagccagcctgtattattaaataaacagaatttcctcgaactcccgcatggtcactcagctgtgtctaaggccttagcctcaccaccttccttggtcccagaggccaggctggggctgggtcagctttgagagtgaacactggactctggagaaacccaatagctattgaccactgtgtgtccttaagaagtgcctctggcccgggattagtcacggaggctccctga

SEQ ID NO: 16924 - DNA, 597 bp, Homo sapiens
attgatccgaagaaaacatttagaagaaatcaaatccttagatccttacttcaggcagaagttatttctgtctgaaataacttcaaattacctatcacagggtgaaaaaaaggtatggtctctagcaaatggcaacatatatgggagggaggctaattgtttttgttgtttttaatgtttgcrgcgtattggaagggtagggtaaatattacaacagtggtctgttggacttttggttcctgatgctcaggtgtgtaaacttcagctgttcttcacctggttggaaagttgtgttggtggcatggtagtttataagatcaaggctgggcactgtggttcatgcatgtaatcccagcactttgggaggccaaggtgggtggatcacctgaggtcaggagttcgaaactagcctggccaacatggcaaaaccccgtctctactaaaaatacaaaaattagctgagcgtggtggcacacgcctttaatcccaggtactcgggagaattgcttgagcttgggaagtggaggttgcagtgagccaagattgcaccactgcaccccagctggggcaacagagagaaactctgcctcaaaaaaa

SEQ ID NO: 16925 - DNA, 548 bp, Homo sapiens
gaagttttctatagatccttctattggaaaatcattataccatatttttcctcttttctgactatctaaacactgccgttactttgagacagtaattttctaaaaagtaaaagcagaatttctttatgttgctttggaaatttttcwggtaacttttgtatatctaagggtgtttggtgaacactatgtaaaggagacagttgtattttctccataattaattctgcttcaaaattcttatgtaactatctaaatgttataattttacagtagcatctcaactaacataaagtcacaatttaaaaagtcatctctctagcatcgtcaagtaaagcaaataaaacaagaccacagaccagtaacaaggataccagacaataaatacaattagttttagatattttactcaaagtagtctcttgacttcggattaaagccctattttgtggcattttggacataattctcatttttcaagcaatcaaagtactaaaaaaagcaaaaagtgtgcgtgtgtgtatgtgtgtgtgtgttatgttgtaatctgg

SEQ ID NO: 16926 - DNA, 679 bp, Homo sapiens
tggatgacctttgactgtatcaacgtagattataatcgagaatataaattacagctgagggggaaaagtggttactcctggtagatcaatctggatgcaatcaggaggacagaaatcacaaaataacttagagtctagtataaggaattattaagctrtgataggagagtaactaaaaatatgaagtgacctctaaaggacagcctggggctgagagaggacccaaagaagacaagcttagaaggagatgccctcctcatggctgggggtaggacctttttggagaaagtggtttcagcccactaaataatagttctctgtgttgttgaggttccgcggacaaggcaacaattctctggaatgcagacaagattgatgggtgagtgcacagaaagagttgggtgccgctgtgggcacaggcctggaatacacagtacccatgtcatgaagcaaggtgatgtgaagttcctaaggtgatgtgaaggccccagcccgggatgtgaagttcctgagggtctgtgcactctggaagcacagctggggcagaactccaccagttgtctccacacacatgcgctctgatggaccacacagaaaaaaacaaatgcaacacctagatccaggaagagaggccccttctggaatagtccttctgctaccttgggacaaagcatcatga

SEQ ID NO: 16927 - DNA, 679 bp, Homo sapiens
tggatgacctttgactgtatcaacgtagattataatcgagaatataaattacagctgagggggaaaagtggttactcctggtagatcaatctggatgcaatcaggaggacagaaatcacaaaataacttagagtctagtataaggaattattaagctatgataggagagtaactaaaaatatgaagtgacctctaaaggacagcctggggctgagagaggacccaaagaagacaagcttagaaggagatgccctcctcatggctgggggtaggacctttttggagaaagtggtttcagcccactaaataatagttctctgtgttgttgaggttccgcggacaaggcaacaattctctggaatgcagacaagattgatgggtgagtgcacaraaagagttgggtgccgctgtgggcacaggcctggaatacacagtacccatgtcatgaagcaaggtgatgtgaagttcctaaggtgatgtgaaggccccagcccgggatgtgaagttcctgagggtctgtgcactctggaagcacagctggggcagaactccaccagttgtctccacacacatgcgctctgatggaccacacagaaaaaaacaaatgcaacacctagatccaggaagagaggccccttctggaatagtccttctgctaccttgggacaaagcatcatga

SEQ ID NO: 16928 - DNA, 679 bp, Homo sapiens
tggatgacctttgactgtatcaacgtagattataatcgagaatataaattacagctgagggggaaaagtggttactcctggtagatcaatctggatgcaatcaggaggacagaaatcacaaaataacttagagtctagtataaggaattattaagctatgataggagagtaactaaaaatatgaagtgacctctaaaggacagcctggggctgagagaggacccaaagaagacaagcttagaaggagatgccctcctcatggctgggggtaggacctttttggagaaagtggtttcagcccactaaataatagttctctgtgttgttgaggttccgcggacaaggcaacaattctctggaatgcagacaagattgatgggtgagtgcacagaaagagttgggtgccgctgtgggcacaggcctggaatacacagtacccatgtcatgaagcaaggtgatgtgaagttcctaaggtgatgtgaaggccccagcccgggatgtgaagttcctgagggtctgtgcactctggaagcacagctggggcagaactccaccagttgtctccacacacatgygctctgatggaccacacagaaaaaaacaaatgcaacacctagatccaggaagagaggccccttctggaatagtccttctgctaccttgggacaaagcatcatga

SEQ ID NO: 16929 - DNA, 612 bp, Homo sapiens
acacctgtaatcccagcactttgggaggccaaggcaggtggatcacttgagatcaggagttcgagaccagcctggccaacatggtgaaaccccatctttactaaaaatacaaaaattaggtgggcgtggtggtacgcctgtaatcccagcaacttgggagactaaggcaggagaatcgcttgttggacccaggaggcggaggttgcagtgagctgagatcacgccactgcactctagcctaggtaacagagcaagactccatctcagaaaaacaaacaaacaaaaagacctacttggtaaggttaatttcaaatttattcttgacaacttcacaataaaactatcaaaaaagctaccaaaggcaacgtaagaataycaattaagaaacactacttagaactataaaacagatgtcatgcaaactacaaaggagccactcatcgtgataaaaataacaagaggtaaaaaactaaaatgtgtgttgtcttttcatttaaaagttaccaaaaataaacctaaaactgctctaaaaaataaagtttttcttttaagttaccaagataaaagagaaattctttctcaattaactgtaggaagatatagcaagaactt

SEQ ID NO: 16930 - DNA, 1282 bp, Homo sapiens
ccctctacctcctcaacttttctctcattcgcagcctgccttcacttctagtttcacttacctacctaaaggcgctctacaagatcgctgaaactccatctataagtgccgatgactctacatttggccattctctcaaactccagaatagtccttccagttgtccctctttccccagccatttctgtgcttgtcttttctgtgtgtgtgtctacctttccacattcgtgtcttacccagctcatccagaacagttcctctggtttctgctctgtcctgccatctgtgtctggactttgctttgtatatcttctccttcgttgtccagaatgatctagttttgcctctgccctcgtcatttctgtgattgtagctgtgctctgtattttctcccttacaggacagaagttccaacttccttctattttcctccatatcgctcacaccctctttcaatactggctcctgtttctgttctctaacccactggttttcaagtgaggttcccagaccagcattagcaccagctggaaacttgttaaaactacaaatccttgagccccaccccagacttactgaatcggaaactctagggatggggctaagccatctcaatatgataagcctccccaacgattttgattcctgagtttgagaatcactgcgctccaccccagcagttctcagctttccttgacatctgaatctcctgagaaggtttttaaaatactcatgtctgggcaccacccaaaaacaattaactcaatttctctgggggtgggcccaattagggatatagttgtagaagctctgcaggtaattctaatgtagaatcagggttgcttctcgcctgccaaaatgtttcctttttgcagccttgacttgatccctctgtctgtaaagctctgcctccgctccacaggtcttgttttctcttcattgccatcaactaagaaaagccttscctggccatcttaactctaagcatcctccccccgccagacactttctgtcactttatcctgtattattgtcttacttgtactaatctctaatatttgaaaaatcattcatttacttactggctctactagaaaatgaactgcaggggaccaatgactgttcctttcaaggctgcatcctagctccctagaacaatgccagcacatgtagcagctcgggatatatttgttgcatgaaagaacaaacaacacacacacaaacaccccaacaccacatgctgtttattccaaaccctgtgctttcaatgctctagttttct

SEQ ID NO: 16931 - DNA, 538 bp, Homo sapiens
aattgagacacaaagatgaaataacttacccraagtcatataggtgactcataagtggcagggccaggctttcaccccaacttgtctgattactaagctcttgttctaatccactgaactatatagcctgaaaatctgcatgtttaataaatcatgatcattactcaaaggcaaggcatattgaatgacagccagtgagttgactttatggtatatactatcaattagtattttaactttaataaagtaaatctataaattatgattattagtgataatagcagtagtcacgttaggtatggagagtagaactgacagacaaaacaaaatttggtcaatgatttggtcaagaaagaagtggtccaattcatagttgaaatttattatcgagtaatgtagtaattttttcaaaatatcactttttggtatgaatttcatgcttgcaaaatttagaacagccacctcaggcttagtgaaatcaatatactgatttttttccagcaccttctgtttgattctgttggatacttaaatatag

SEQ ID NO: 16932 - DNA, 508 bp, Homo sapiens
cagagtaaataatcccagtttgttttatcattccttagataatgtaattctctgatccttcgaccatggttatttttttcttaattaactctaagttgctcattgtcattatacatggttcccagagttgtacccagcattttagatgatatttggtcagatggagagtgtggtgggtgtgaatcaaatgctgttttttttttaaccaaatacttcattgacagttttaacttctattatgcttaatatgagcctgaagtatcaacttctctcccatatattttatacataagatgttaaactgtgtcttcctaacctagtttttgtgtaacggattttttttttagcttaaatataaagcttttattttatttttttttaggcgtgctcagattaaatataaggcttttaaatttccttttgttagtttttatttacrcatttaatattatgtttctgagttatttggtcatctttgtatttggtaggcatatctactacgtcttca

SEQ ID NO: 16933 - DNA, 481 bp, Homo sapiens
ggtaagtagaagttttaaatttaatataactaaaattactaaccatatagtttaatttttgtgtgtcttgaagatgagacaagcagcattagagattacctggacgagacctatttggctatgctacttattccctagttctatatcactaccaatgcctatggtagcagaagaaattgagacaaattcttagagtttgaacatagatggaaatcttaagactgactacaagargctgcagtttaggcaaatgttttccctgagctaactggagaaacttcagaacaactcacagttttagtatctgtttttgttttgttttatttggggagggcaagggttgaatgaggtagatgggcttttgttgcttaacaatgatcataatttactttattcttagaagaaatgtgtgtttaatggaaaagggaagtattaataatggaatatgctactctttagtaataagaagaaattaacaaaa

SEQ ID NO: 16934 - DNA, 481 bp, Homo sapiens
ggtaagtagaagttttaaatttaatataactaaaattactaaccatatagtttaatttttgtgtgtcttgaagatgagacaagcagcattagagattacctggacgagacctatttggctatgctacttattccctagttctatatcactaccaatgcctatggtagcagaagaaattgagacaaattcttagagtttgaacatagatggaaatcttaagactgactacaagaggctgcagtttaggcaaatrttttccctgagctaactggagaaacttcagaacaactcacagttttagtatctgtttttgttttgttttatttggggagggcaagggttgaatgaggtagatgggcttttgttgcttaacaatgatcataatttactttattcttagaagaaatgtgtgtttaatggaaaagggaagtattaataatggaatatgctactctttagtaataagaagaaattaacaaaa

SEQ ID NO: 16935 - DNA, 481 bp, Homo sapiens
ggtaagtagaagttttaaatttaatataactaaaattactaaccatatagtttaatttttgtgtgtcttgaagatgagacaagcagcattagagattacctggacgagacctatttggctatgctacttattccctagttctatatcactaccaatgcctatggtagcagaagaaattgagacaaattcttagagtttgaacatagatggaaatcttaagactgactacaagaggctgcagtttaggcaaatgttttccctgagctaactgsagaaacttcagaacaactcacagttttagtatctgtttttgttttgttttatttggggagggcaagggttgaatgaggtagatgggcttttgttgcttaacaatgatcataatttactttattcttagaagaaatgtgtgtttaatggaaaagggaagtattaataatggaatatgctactctttagtaataagaagaaattaacaaaa

SEQ ID NO: 16936 - DNA, 969 bp, Homo sapiens
tcaaactcctcaacctcaagtgayccgcccaccttggcctctcaaagtgctgggataacaagagagccactaagcccagccctaaatgcattctttatttctctgccattttgcatagacttgagatcaactgtttagctttttcatgtcccaaagggttcatgtagactgtatactccctcttgtatgtaatttattttaaaaataataactagagtagttcaaccatatctgtattctgatacacattctgagaaatgtccagctatgcctaacctttgttcatcgtgtagccctctcctgagtcctgattttcaaaaatatttttcccaacttattgctgactgaatttacttaccagactttgtgtggcgtcttttcaaaatcacttggaaaatctgtttatccctgtcttccctgattatttatttaattctctttaagaactctagcgaatttgtctgacatggttaccctctttcaaagggaaagactctcctccgaaatgttatatttgcttaaaacagtataaatccactttccctacttccctacacatacactcatgtagaatttattttagatttcattcattccacaaagtccaaggaaaattccacagacactacattaaatttaccgtgagtctaagcaagccattatcttctatgaggctctcttttctcatctataaaatgggcataatatacttgccctttgccaaatagaacaagccatctccttgttcatgactgtgtataaaacactctcagagaagctcaaagtcctttacaagtattaggccatgaatctttctcaagtgaactgttaattatgtgtcattatagtttgttgaatagatgcaaaacctgaagcacaggaaaataattccagttaatagttaacttagaaatccatgcaaggtaatgaaacaatatgtataaaaacccctgtgactcatgtttgcct

SEQ ID NO: 16937 - DNA, 969 bp, Homo sapiens
tcaaactcctcaacctcaagtgatccgcccaccttggcctctcaaagtgctgggataacaagagagccactaagcccagccctaaatgcattctttatttctctgccattttgcatagacttgagatcaactgtttagctttttcatgtcccaaagggttcatgtagactgtatactccctcttgtatgtaatttattttaaaaataataactagagtagttcaaccatatctgtattctgatacacattctgagaaatgtccagctrtgcctaacctttgttcatcgtgtagccctctcctgagtcctgattttcaaaaatatttttcccaacttattgctgactgaatttacttaccagactttgtgtggcgtcttttcaaaatcacttggaaaatctgtttatccctgtcttccctgattatttatttaattctctttaagaactctagcgaatttgtctgacatggttaccctctttcaaagggaaagactctcctccgaaatgttatatttgcttaaaacagtataaatccactttccctacttccctacacatacactcatgtagaatttattttagatttcattcattccacaaagtccaaggaaaattccacagacactacattaaatttaccgtgagtctaagcaagccattatcttctatgaggctctcttttctcatctataaaatgggcataatatacttgccctttgccaaatagaacaagccatctccttgttcatgactgtgtataaaacactctcagagaagctcaaagtcctttacaagtattaggccatgaatctttctcaagtgaactgttaattatgtgtcattatagtttgttgaatagatgcaaaacctgaagcacaggaaaataattccagttaatagttaacttagaaatccatgcaaggtaatgaaacaatatgtataaaaacccctgtgactcatgtttgcct

SEQ ID NO: 16938 - DNA, 969 bp, Homo sapiens
tcaaactcctcaacctcaagtgatccgcccaccttggcctctcaaagtgctgggataacaagagagccactaagcccagccctaaatgcattctttatttctctgccattttgcatagacttgagatcaactgtttagctttttcatgtcccaaagggttcatgtagactgtatactccctcttgtatgtaatttattttaaaaataataactagagtagttcaaccatatctgtattctgatacacattctgagaaatgtccagctatgcctaacctttgttcatcgtgtagccctctcctgagtcctgattttcaaaaatatttttcccaacttattgctgactgaatttacttaccagactttgtgtggsgtcttttcaaaatcacttggaaaatctgtttatccctgtcttccctgattatttatttaattctctttaagaactctagcgaatttgtctgacatggttaccctctttcaaagggaaagactctcctccgaaatgttatatttgcttaaaacagtataaatccactttccctacttccctacacatacactcatgtagaatttattttagatttcattcattccacaaagtccaaggaaaattccacagacactacattaaatttaccgtgagtctaagcaagccattatcttctatgaggctctcttttctcatctataaaatgggcataatatacttgccctttgccaaatagaacaagccatctccttgttcatgactgtgtataaaacactctcagagaagctcaaagtcctttacaagtattaggccatgaatctttctcaagtgaactgttaattatgtgtcattatagtttgttgaatagatgcaaaacctgaagcacaggaaaataattccagttaatagttaacttagaaatccatgcaaggtaatgaaacaatatgtataaaaacccctgtgactcatgtttgcct

SEQ ID NO: 16939 - DNA, 969 bp, Homo sapiens
tcaaactcctcaacctcaagtgatccgcccaccttggcctctcaaagtgctgggataacaagagagccactaagcccagccctaaatgcattctttatttctctgccattttgcatagacttgagatcaactgtttagctttttcatgtcccaaagggttcatgtagactgtatactccctcttgtatgtaatttattttaaaaataataactagagtagttcaaccatatctgtattctgatacacattctgagaaatgtccagctatgcctaacctttgttcatcgtgtagccctctcctgagtcctgattttcaaaaatatttttcccaacttattgctgactgaatttacttaccagactttgtgtggcgtcttttcaaaatcacttggaaaatctgtttatccctgtcttccctgattatttatttaattctctttaagaactctagcgaatttgtctgacatggttaccctctttcaaagggaaagactctcctccgaaatgttatatttgcttaaaacagtataaatccactttccctacttccctacacatacactcatgtagaatttattttagatttcattcattccacaaagtccaaggaaaattccacagacactacattaaatttaccgtgagtctaagcaagccattatcttctatgaggctctcttttctcatctataaaatgggcataatatacttgccctttgccaaatagaacaagccatctccttgttcatgactgtgtataaaacactctcagagaagctcaaagtcctttacaagyattaggccatgaatctttctcaagtgaactgttaattatgtgtcattatagtttgttgaatagatgcaaaacctgaagcacaggaaaataattccagttaatagttaacttagaaatccatgcaaggtaatgaaacaatatgtataaaaacccctgtgactcatgtttgcct

SEQ ID NO: 16940 - DNA, 579 bp, Homo sapiens
catgaaaaacatttcagtttttttcatcctgccttctgaagatttcttgttggatttcagagacatgcaaacttgaatgaactcacttggtaacaggagcgaatgcacagtgagagctcactctctcctaggtgctattccaagtgctttacagacattatttaatttagtggtggcaagaacccatgaactacttgtatttcttaagtcagttttatcaagacataatttaaatgcagtaaaattcactctttagacgtacaagatgatgagtttttacaaatgtatatagagtcatatagccacaccacaaccaaaatatcaaatatttccatcactccacaaygtgcccttatgcacctttatatagtcaatcctgtcactgccccctaccccacccccttgccatgaacctccaaataactactgatctgttttatggctgtttctagaatgtcataaatggaattgtatagtatgtagccttttgttctggcttcttccactcagcctaatgcttttgagattcatccatgttgtgaattacttactttcacaatcccactttatatatgagga

SEQ ID NO: 16941 - DNA, 580 bp, Homo sapiens
gtcttgaaatgtagaaagagttatgaaaatgtaagacttactaagttcacttatcgaacattttttgaccacctactatgtgctatgccttggactaggctagagatacaacagtaaacatcttgactaacggagattatgctgctatcttgaaattttgcctgttcccaaaagcccccagcatattaattttgttaaatatatattcccttattatatatataaaacatatayatcctcattttatatatatatatatacatataaatatgtgtcaactactgtgttgagagctcattatgtatatgtttctttatttaaccctcaaaataattctgtgaggctccagaattcctttttccaagtgagaaaatgaggctcagagcattgagtgaacttgcaggtaaatgattgagatggaatttggaaccaaagcttaagctttaaactgctttattcagtggcctttggttatctcatattcactagaaattggaaagatctgtcaggaggcctgccatgatgcagaagtcctggatgccctgcaaatgtctatgtgaatggtacccccagactggtg

SEQ ID NO: 16942 - DNA, 585 bp, Homo sapiens
aaaatggatacttgctggttaaatctgacacatgtgtttttcctttttcatatgcttttcagcttataattacaaattgtataaaaatcaataattctgcaaggatatttgcttttgctttatttacacacacatacacacacacacacacatttgtgcccttcctgcaattctctgaagatgcgttctgaacacttgaccccaattcaattatgtgcaacatacatttctgtatttagggcccaaaacttgtagattgaaaagtgaagactgccttgcatcatttaaaaaaaaaaatgtgaggctgggtgcagtggctcacgcttgtaatcccagcactttgggaagccgaggcgggtggatcaygatattaggagagcgagaccatcctggctaacatggtgaaaccccgtctctgtgaaaaatacacaaaattagccaagcatggtggcaggcacctgtagtcccagctactcgtgaggctgaggcaggagaatggcgtgaacctgggaggcggagcttgcagtgagctaagatcacgccactgcactccagcctgggtgacagagcaagactctgtctcaa

SEQ ID NO: 16943 - DNA, 488 bp, Homo sapiens
ctctgtgtgtcaacactgacaaaagtaaaatctgtcaaaatgttagatttttctttcagtttttaggcagttacaaatttgctatgtgcaactttagatattggtaattttatatttcaccgatagttctacaacatataaactatcaacaaatcgtccatttaacagcacataggctgcacaagaaaagatcactttcttttctataaatcaaattaatttctaaatccaagacctgtcattctatgctagtggaaaactccagttcttcctgagtctgtgacccctttgcaaaattttatcaagataatacaatgccagggcactgggtgggatttattttattctcagtatcatcacgtctcaacttgatatagatgtgagatttatttctgcataccccttcagtattagcacatttctttgatttytttgctgtaataaaaataatctgtaaggcctcctaccttagtttccatctgctatgc

SEQ ID NO: 16944 - DNA, 542 bp, Homo sapiens
aaatcctcattgagaaggtgatatttgagtacctgacagaggtgaggaaataaattctgagaatacctgggggaaaagcattccctggaaagggaaaagcaagttaaaaagccccaaggtaggaacatgcctagcttgttcaaaatgaaatgaggctaagttggagtgatgatcaagaggagactcataggatatgtggtcagcagtaactaggacataatctgacctacaacctaccaagatctctttggccactcactggagaagaggcttaagggaggcaaggacggaagcagaaagacagagatgatggtgggtagcagtggaggtggtgtgaagtggcaggattctggatacgttttgtaagtaaaggtgactagacttttctgatggataaagtgtatgagagaaaaagaagagtcattactatatatgtaaatctaagcaaacatttactttttaaagcaayttaaagtttgttacttgaatatataaaatatatcatggagttaaaaatatatagaaatttattatatttggta

SEQ ID NO: 16945 - DNA, 539 bp, Homo sapiens
gcctttcacaaatcaaaatctcttttaaattgaaagtgcctttcttcctctccccctccttccctcctttcctcccaccctcaatcccttcccttctttctctccctttttttctcaccttctcaacttctatctttcttaagataagaggttcgtgtgatgctcctatttatgtggctttctttaaaaatgagaagaggaggagccaggctacaccaaggaaatactcaaccccatgcttctgcaggtgtcaacctagaaggcaccaatccaggtggaagaggttctctctcctgccctactgtctttgccaggggtggtgttgagagccatttctgcagataccccgcaccccggccgcccattctcagtgatacagtcagacataagcatctgggggtgaaaacgcacccaacacagagcygggtttctggagtcaccttctggggttggactttgcctttgggagaggccctgaatgtctccaagcattcccacatgtcatgggaattatgggggctaaaattcaagatgagatt

SEQ ID NO: 16946 - DNA, 553 bp, Homo sapiens
cacacctgcgtgtgttttgtgctctggctgggatgtcagtttccccggccttccaaagaatggggcagggcattttcgaaggctgattcagtgaagatggagagtcgtgggctaaatgattcctagagcccacagtgtttcaggggagcttgcagggtaactttttattctttttttctgaaccattgcaggcttctgaaccattgcaggcatccctatgtgcacggcctgctgtttccactcccactgtgcacagaggcaaagatgtcttgtttgaggcagtcttcggttgcaaggaataacaatccaccaaagctggctctgtgtgtgtatgtgtcccaagtggaataaacatggaacctcataaatccygtcactctgctgtttaccgttcatggttttccagtcctgactttttgatgatggccttcagtgcttgtgatctggctcttccctaagttccaacctcatctcccaccaccctccctcttgctgtctccaccccacccacgctggcctttaggctgatcctcaaacatgccaggctggctcc

SEQ ID NO: 16947 - DNA, 513 bp, Homo sapiens
gatgacactgcatcatttaacaaaggttaaatcatgttcattagactctgtttaagaagacatggccatgtgtcatgttttagaaagactgccattacaaatgattcaaataagaagtttgagtacatgaatgagccagtcagctatccagaagatgagcttagaaagaacagctcatccccaagtgcggctttactgcattgccatttttaattttaaaaacctacgtaaattttagccgggcgcagtggctcatgcctgtaatcccagcactttgggaggctgaggcgggtggatcacctgaggttaggagtttgagaccagccttaccaacatggacaaacccctaaaaatacaaaaattactaaaaatacaaaaattagccgggcttggtggygcacgcctgtaatcccagctacttaggaggctgaggcaggataattgcttgaacctaggaggcggaggttgcggtgagccgagttcaccccatcgcactccagcctggatgacaag

SEQ ID NO: 16948 - DNA, 856 bp, Homo sapiens
ccccacagaggacccctgcccaccgagggttccgtcccactgctttttgggtaaaagtggccagccttgattatgtttgaataaactatatctcatggtttagactatttgggtttaattgtaaaatatacacagaacacagcccctccaccccgaccctgccctcaggttcgaaaagtcaagtacattttgttcccctctccccgcaccataaaaacaacaaagaacacctcaagcttttttaagggctattatttctttcgctccccagtgggggaaaaaaatggattccactgtcctgtgtacaaaaacaaggaggatgctcatacaagaatgtggctagcagcrttttctgtgtttcctctttctctcacaggtgtagacactgccttttctgagtcttcatcatcccccagcatctcctgggcacctgctgggactcatccccgccccagccactggagagacagagatgagcctggtcgaggaaatcgacttggttaaggctggcgtgggaccacatgccaagtccctgactcccagtcagaaccccaaaacccaatttgaggtgatccgatgagaaaatctcgctcatgctctagccctcttcttcaaggtcaaaactgccttctggtggactgaggatcggtgactttgtttccctctatgtccagccagggctggaggaagcttgttgtcagcaggccccttcccagaagacaccacatccacacctgtcactgcccacagtgactggaccctcagcctcaagttccccggtggtaaaacccctgtagatctcccaaccctccaggctcctgtaagcccagccctttaatttctttatttccctttc

SEQ ID NO: 16949 - DNA, 661 bp, Homo sapiens
cagcggtgcccaccgcagtggtcttctcatcctctgggcwccagctccaggctcctgctgtcctgccccgccctgcccttagatggcctttcttcttcccaccagtgcctctgcaagaggcgcctgaccagctcagcccccacagacctccccttcctgatctgcagcatttacattctgtcccacttagcgcagcatttgcttacattctctcatgtactgtgcactaatagcttcctgtttttaatatcctttttctgatttgagtgtaagctccttagaagctggggccatgccttgcactttgcttacagcaccttcccaatcatgccctttcccaaactccagcctattgctgtgagggaggagaagggacacacagtacaaaaggattcattcaagcacttgccccatgaggggttttgcccactttgggtgaagaactaaagttagtcaactggctggccttccttttagaaatcattttccctacctacccctcccccagaacagtcactaaggtggcatgctttcccccaacctctgccagccaccccttgtagggaattggtctctcaagtccccatggagactggcagagccttctcaaagggaagcaggctggatgcctccccctggacttggtgtacattctcacagg

SEQ ID NO: 16950 - DNA, 586 bp, Homo sapiens
ttagcacaagcaagcagagggggcagcctgcctgggcctgtgaggggagactgcatccccatgggcaatgtgacctctgggcccagattagcaagaaaggcagaaccccttcctctctctgcacagaactgtgaaggagaacaggagggccaaggagctgtgtgtttgggactgtgggggaasactgcactgcagccatttccagacagcacagaggcttagtgttgagccacaaggtaggcatctcctacagttctgggctacattgcagcttagtaataaacagctgtgtctgaccaaactgaatatccagagcatctggatggaaacatgacagggaaataaatcacattaatgtatgctgaggccatggtactgggacaccccctatctgccctgcagagagctcagtgtgtttcaccaggggtccaatgactcctctgccacctttgtcagggctggtgcttgcacccaccattggaggaccagagggcaggcctgcctggtccagctctacccagctttaccgtcacctccctgaggatgagcatggagcccaggccactgtgctttcacagaccagtcc

SEQ ID NO: 16951 - DNA, 1119 bp, Homo sapiens
tttaatcaggttccccttttctgtggttcccactgggatgagccactagtgtcttgccttaaatattcaaaggccttcctgagtagtttgcatgtgttcatatactgggacaatgtcctgctaatacagaacaatagatctgtcatgtatttctcctgcaagtagatgtgagtctaaagttactgagtataaggtttaagggctgttttcccctcagtgactgtctttacttaagtctgaacaaatgggagtaaggaaacgtacatagacactaaagtgtagtgaacttgattatttgaattggaaactcaagtgggataaagaattctgattgctaaataatcataaagctgcccagcattttcagtcacagttcatctgatatggaagacacagtacagatwatcacatggctgaaaacatttgcaaaacatactcgacaaatatttagggacagtaacctatatccatgcccttgtacttctgcagaatattcaggtggatataactttttaaaaaatcatagttgagaaattataagatatattttgtgtccattgaacatacctgggaggatggtaagctaacttttagccttcagaggatgaaaaacacaaaaggatggtcattataataatctgtaaatgtctgtaacagatctgtgttattcatttaaaatctctctgctcatgactttgatatttggagaaactgaagaaagggaaatacaaattaattccttttgtcgctctgtttttttttttttttttccagaaaggcaaaaccaaacaagcaaataaacaaaaaactagcaaacaaaactcattatttctaggaaagaagtgcattttgaaagtaattaaggattgtacgtgatgttttctactatctaaacagagtaagcctgtcttgggttacatttaattccctaatatctgatattaaaaactgacactgaaaatctttgaatagcattaattatttgtgtgatatattataaacctaagaacaatatttaaatggtatataatagacataatataataaatggtaaacttcacaattctttcagacttttgaagatgcttgcataatactacctgctaattttcttctatc

SEQ ID NO: 16952 - DNA, 537 bp, Homo sapiens
acttctcatggccagaacagcaagagagagagggacgaggtgccacacacttctaaacaaccagatctcgcgagaattcactattaggagaacagcaccagtgagatggtgctaaaccattcctgacaaatcccaccccacgatccaattacctcccaccrgaccccatctccaacacctccaacactggggatcacacgttgagatgaaatttgggtggggacatagattcaaaccatagcatttggtaacttcttctgtgagaacagccactctaacctatactctttatccctggacatgtgcaacttcagaccaatcaaaccataagcacatccaaccaatcagaacccccgaaagccctgatgcccaccaccaggtcacttagaaggttgtttatgcaatcatcagagtgcagtaagcagattgtagagcactgatgtggcgctctgtcaacaacacatcttagtgcttatcagcactttcaagcatgtccggctttcttttgctgtgttattagtagtccatcttttcccc

SEQ ID NO: 16953 - DNA, 379 bp, Homo sapiens
ggttttttatcatccgcactgattgccattcttatagaaaactgggacggattacaaacgagctarcagatattccactgtgggtccatgaagggatttctctgtgaaggagtgtgcacgttaagatttaacagaagccataggcttccactggagcgggcgggattcacacaaggtacacaacactttgtcaggcttgttagatgctgtgatgaggaagaaccaaggatctaagcccctcactctgtatgaaagatgccctgaacaagcacacgtttttgagaccaactcatcggaattgtcaaatccaggggaagagctccaaggtcctactcagatctggccagcccatggatctcctggtttcctaaagtgtcgc

SEQ ID NO: 16954 - DNA, 542 bp, Homo sapiens
atattccgagatatataggaagtaaaacactatttgagctccactgtagcatttcccgtggagctttaaaatgtcttttaattatttgtacatttccattgaactgcaaatgattctgctcttctgagtaccacgctttgtctgcttgaaaaataaagacaccaaamgactgcagatgaaggactgtagttaaaggatggaatgttgtcatgaacactttgagaatggtgacagttggtattttcccaaagtaaactcaaaggttcaaattattaaaaaggctgaggtggccaaatttgtctactgtactacaagatcttctaacaagatcaagactaaatcctggccaggaaaacattgactttagtatttgtgttggttctgggttttcagtgttgaaatcttccttgccctattccctctcttttcccaatgcctctagaactatctgagatatgggactggtgtggtgaaaacaattattttgttagcctttgtcagaaacatgaggggaagaaaatgtacataaaattaacataaag

SEQ ID NO: 16955 - DNA, 513 bp, Homo sapiens
ccagtgtggtgattcctcagggatctagaactagaaataccatttgacccagccatcccattactgggtatatacccaaaggactataaatcatgctgctataaagacacatgcacacatatgtttatcgcagcactattcacaatagcaaagacttggaaccaacccaaatgtccaacaacgatagactagattaagaaaatgtggcacatatacaccatggaatagtatgcagccataaaaaatgatgagttcrtatcctttgtagggacatggatgaagctggaaaccatcattctcagcaaactatcgcaaggacaaaaaccaaacatcgcatgttctcactcataggtgggaattgaataatgagaacacttggacacaggaagggggacttcacacactcgggcctgttgtgggtttggggggggagggatagccaaaaaaatttatgtatgtgttatagtaggaaatttctaaaggatccaagaggcaaatttaatataattcatc

SEQ ID NO: 16956 - DNA, 513 bp, Homo sapiens
ccagtgtggtgattcctcagggatctagaactagaaataccatttgacccagccatcccattactgggtatatacccaaaggactataaatcatgctgctataaagacacatgcacacatatgtttatcgcagcactattcacaatagcaaagacttggaaccaacccaaatgtccaacaacgatagactagattaagaaaatgtggcacatatacaccatggaatagtatgcagccataaaaaatgatgagttcgtatcctttgtagggacatggatgaagctggaaaccatcattctcagcaaactatcgcaaggacaaaaaccaaacatcgcatgttctcactcataggtgggaattgaataatgagaacacttggacacaggaagggggacttcacacactcgggcctgttgtgggtttggggggggagggatagcmaaaaaaatttatgtatgtgttatagtaggaaatttctaaaggatccaagaggcaaatttaatataattcatc

SEQ ID NO: 16957 - DNA, 718 bp, Homo sapiens
tgtttgttaaaatccaggatacagtccattttggtttatgttctgtgggtacctaaatgttctgctgtattctgctgctaggggktggagcctgtttttttcttcttttttttatctccaggtacaatttgccctatgagacacctgatatagtaagtagcccatcaggtatccagcagtaaaaactaaattagtggaaggaagtcctgtcccaactggtttgacatattgtggctgaatttttaggttttagtgaaaataataatgatggcttgatcttcaaagttgttttttttttttttttaccatttcccaaatagctggggattattgtggtgtaaccacttaaaactctgatgaaatgtggaaagaatttctttttctaattgatactttgtgagtgcaactactttgcattgtgcagagagaaaaaaatatattccaggcattcgccaaatcaaaagtgcatgaacaagtccctaaatttcttcctgtcctcagatttccaccataaagtttcagaccaaataaaaaattgttttttcactaattttctttgaggaaatgtaagagaaaaaaaagaaagaaacaagtgttttgaagggtagaattttggcaattatatgagattgtaaaatccgaatgtggattagcttcaactcatcaaagattcaagaacagctacagttctaagaatgagccaaaaaaaaatgggtat

SEQ ID NO: 16958 - DNA, 728 bp, Homo sapiens
cattatttgagaaggcatactgtgcttgtttgaatatgaggtatgagtcaattttctagcatctccaaaacaaaaaaaaaattcacttgagacgtcatagaagaggtactaagccatttaaagacaatgacctcaaaaaaaaaaaaaaragaagaaaaagaaaaaactccataaaataaaaacaaacacaaaacctctgattagaaaggggacaggcatcataagactctttcttttattgctcctccataaaaccaaggaatataatagtaaattgccattcaaggacagcaagaaaatactgtctaagaacctttctgatgactttggtggatacagtgatttaacttagatgataaaaaaaaaattagattacattcgagcaacatttcatgaaaaaaaattcatttcctagcctaataaatatttattgggcaactacaatggacagaatgtcacagcagcactggcaggaaatgtccgtttaccaagaatgtttacttgctttctctcttgagggcctcttttataactcccctctgctcaaacctgcatctgcaccgcactcatccttactctaaggtgatgaccttgtttctttctttccagagaaaatagaagcagtcaaaaggcattttcccatttctttaccccagcatccacgcatgcacaccatatacattgccacgcttcctcctatgttgtgctattgctgagccagcctcggc

SEQ ID NO: 16959 - DNA, 728 bp, Homo sapiens
cattatttgagaaggcatactgtgcttgtttgaatatgaggtatgagtcaattttctagcatctccaaaacaaaaaaaaaattcacttgagacgtcatagaagaggtactaagccatttaaagacaatgacctcaaaaaaaaaaaaaaaaraagaaaaagaaaaaactccataaaataaaaacaaacacaaaacctctgattagaaaggggacaggcatcataagactctttcttttattgctcctccataaaaccaaggaatataatagtaaattgccattcaaggacagcaagaaaatactgtctaagaacctttctgatgactttggtggatacagtgatttaacttagatgataaaaaaaaaattagattacattcgagcaacatttcatgaaaaaaaattcatttcctagcctaataaatatttattgggcaactacaatggacagaatgtcacagcagcactggcaggaaatgtccgtttaccaagaatgtttacttgctttctctcttgagggcctcttttataactcccctctgctcaaacctgcatctgcaccgcactcatccttactctaaggtgatgaccttgtttctttctttccagagaaaatagaagcagtcaaaaggcattttcccatttctttaccccagcatccacgcatgcacaccatatacattgccacgcttcctcctatgttgtgctattgctgagccagcctcggc

SEQ ID NO: 16960 - DNA, 560 bp, Homo sapiens
tgccttgagttgagatctcaaggcactaagcttattgttttcgtttcagaatctcttcagcacagtcaaaagaagccatctcaccccacaaacttggaatcaccgtgatgccatagcagtcaagtgccacagccacttgctttcccaatgcctttccctcctgttaccttctgttccagtgatatttgagtaaccatgatgccaccacatgctacagattagcagggtcccacttctctctagtaagaaagccattcgtgtactcgccagcccaacytcagaatctcacttggatgagctgcttcgttgggccacttctcataacacatactgtattcatcagggctggaaaacaaaatgcacatttggctgagactttgaagagaaattaatgaagaaggacaattggctgaagtttgggcagggtggagagcacccagaaggatactgaggcacgcagggactcacagcagtaggaagcccttaccatgcttaatccttgggcctgaagggcaaagggagctctctctggagcctggcgagaaccagaggtagcaaag

SEQ ID NO: 16961 - DNA, 560 bp, Homo sapiens
tgccttgagttgagatctcaaggcactaagcttattgttttcgtttcagaatctcttcagcacagtcaaaagaagccatctcaccccacaaacttggaatcaccgtgatgccatagcagtcaagtgccacagccacttgctttcccaatgcctttccctcctgttaccttctgttccagtgatatttgagtaaccatgatgccaccacatgctacagattagcagggtcccacttctctctagtaagaaagccattcgtgtactcgccagcccaacttcagaatctcacttggatgagctgcttcgttgggccacttctcataacacatactgtattcatcagggctggaaaacaaaatgcacatttggctgagactttgaagagaaattaatgaagaaggacaattggctgaagtttgggcagggtggagagcacccagaaggataytgaggcacgcagggactcacagcagtaggaagcccttaccatgcttaatccttgggcctgaagggcaaagggagctctctctggagcctggcgagaaccagaggtagcaaag

SEQ ID NO: 16962 - DNA, 514 bp, Homo sapiens
caatgacctaacctaaaatttaaatgggaatgggaaggaagccacccactccacaccaagctagtgaccacagagagtcaatracagacttgatatttttaagcacttgctttttccggtaccactaaaaatagctctaagttgagctccagagcacactgggttgagaacatacagaaatccccctttatccgcggtttagctttctgaggtttcagttacccacagtcaactgcagtctgaaaatattaaatggaaaattccaaaaattaaccgtccgtaagttttaaatttcatgccattttgagcagcatgatgaaacctcattgtatgaatcagcccttagtccagtgtacccgccctgtctaccctcctcgcccattagtcacttagtcatttagggtattagctccagaaaacgtagtggatataaggttgagtgctatttgaggttttaggcacccacggggggtcttggaacatactcccacagataataggggactactgtaca

SEQ ID NO: 16963 - DNA, 514 bp, Homo sapiens
caatgacctaacctaaaatttaaatgggaatgggaaggaagccacccactccacaccaagctagtgaccacagagagtcaatgacagacttgatatttttaagcacttgctttttccggtaccactaaaaatagctctaagttgagctccagagcacactgggttgagaacatacagaaatccccctttatccgcggtttagctttctgaggtttcagttacccacagtcaaytgcagtctgaaaatattaaatggaaaattccaaaaattaaccgtccgtaagttttaaatttcatgccattttgagcagcatgatgaaacctcattgtatgaatcagcccttagtccagtgtacccgccctgtctaccctcctcgcccattagtcacttagtcatttagggtattagctccagaaaacgtagtggatataaggttgagtgctatttgaggttttaggcacccacggggggtcttggaacatactcccacagataataggggactactgtaca

SEQ ID NO: 16964 - DNA, 523 bp, Homo sapiens
ttccaagtaactcaaaagactcatcctcttgtttattaatttatccagttggttagcaaacacacttcgaacatctactgccagccgggtgctgtggtaggtgagggctccatgggcttcaatcaggccactttcaagctcagatttacatagcttggttctttcaggaattcttggtcttctgggccggagtgattctatgagagtgccacatgtctgagtgattgttgtgccttgaggtaaagacctgtttgttagagggcctgcaaaactgacttggtcttacagtttccttttgtctttcaaaacaactaatactcccttctcccactcactagtagtttatttttaaaataagctcttttatataattcttatctggtttcctcayttatgaaatgtttcatatttccttacccttgctttttgtggctattgcttctttgaagccaagtaatatcagtcacaccaacattatttgcatactcattttggggattttgtttttccttttggcagaagc

SEQ ID NO: 16965 - DNA, 523 bp, Homo sapiens
ttccaagtaactcaaaagactcatcctcttgtttattaatttatccagttggttagcaaacacacttcgaacatctactgccagccgggtgctgtggtaggtgagggctccatgggcttcaatcaggccactttcaagctcagatttacatagcttggttctttcaggaattcttggtcttctgggccggagtgattctatgagagtgccacatgtctgagtgattgttgtgccttgaggtaaagacctgtttgttagagggcctgcaaaactgacttggtcttacagtttccttttgtctttcaaaacaactaatactcccttctcccactcactagtagtttatttttaaaataagctcttttatataattcttatctggtttcctcacttatgaaatgtttcatatttccttacccttgctttttgtggctaytgcttctttgaagccaagtaatatcagtcacaccaacattatttgcatactcattttggggattttgtttttccttttggcagaagc

SEQ ID NO: 16966 - DNA, 513 bp, Homo sapiens
tgtctaaagcctatggtttactgaatccaatgagcataaaactcatagtaggggctacttactgcagactgaggagacgtggatctcagacctcatatggtgacgtcattgtgtgaccttggtacactctcaggacttcagcygtagagtgagggcataggcctacatattctccgcaatcccttcccggactctacagatgcaacgactaattccaaacaaattacaaatataataattgcaatggatccttgaagagggttttacaatcaaggtagaagttgagtttggattggaaggatgaggagggcattccaggtgaatgatgacacatcaaaaccaaggcaggaaagcccaggtcctagtcaggggagagtgaccacaccagtggccagggatctgcatttcgtgtggtccctgctcatatgaaaaaccacaagcctatctttaagtgagtcatggaaggagctatctgtgaagcagatgactactggtctgcactaggatgatgca

SEQ ID NO: 16967 - DNA, 545 bp, Homo sapiens
attttgttcgatgatgaagactgtgtattgaaggaatatttcaaaaaatacaccattgaagggggaaaatttggaattgccacatttctataaaaataattttcacatttctatacaaaatttgtgagaagtttctacattgtttgtgcaagaaaggaagattgtttaactctttaagatcaatgttggccgggcgcagtggctcacgcctgtaatcccagcactttgggaggctgagacgggcggatcacgaggtcagcagatcgagaccatcctggctaacacggtgaaaccccgcctctactaaaaatacaaaaaattagccgggcgaggtggtgggcrcctgtagtcccaattactccggaagctgaggcaggagaatggcatgaacccggaaggcggagcttgcagtgagccaagatagcgccactgcactccagcctgggggacagagcgagactccgtctcaaaaaaaaaacaaaaaacaaaaaaaaccataattttttaggggagccaaactacatatgggtctggtttacttcagt

SEQ ID NO: 16968 - DNA, 519 bp, Homo sapiens
tcattctgtcacccaggctggagtgcagtggcacgatctcggctcactgcaacctcagcctcccaggttcaagcgattctcctgcctcagcctcccgagtagctgggactacaggcatgtgtcacaatgcccggctaattttttgtatttttagtagagacagagtttcaccgtgttagccaggatggtctcagtctcctaatcttgtgatctgcctgccttggcctcccaaagtgctgggattacaggcgtgagccayggctcccggcctacttttactttttatgtgtcttattctttactcggatgaattagaacagaacagattccattaggcagaccaagtgcctataatcatatgtaataatgttttctcattactgtataattaaaagtaacatacatttttattaaaaggatgaaggaaaaattgctttcaacttcacaagcttacatctcacctgcccaactcagtagatataatccatccactcttggtcttctgaaccactttcctcc

SEQ ID NO: 16969 - DNA, 519 bp, Homo sapiens
tcattctgtcacccaggctggagtgcagtggcacgatctcggctcactgcaacctcagcctcccaggttcaagcgattctcctgcctcagcctcccgagtagctgggactacaggcatgtgtcacaatgcccggctaattttttgtatttttagtagagacagagtttcaccgtgttagccaggatggtctcagtctcctaatcttgtgatctgcctgccttggcctcccaaagtgctgggattacaggcgtgagccatggctcccggcctacttttaytttttatgtgtcttattctttactcggatgaattagaacagaacagattccattaggcagaccaagtgcctataatcatatgtaataatgttttctcattactgtataattaaaagtaacatacatttttattaaaaggatgaaggaaaaattgctttcaacttcacaagcttacatctcacctgcccaactcagtagatataatccatccactcttggtcttctgaaccactttcctcc

SEQ ID NO: 16970 - DNA, 570 bp, Homo sapiens
ttagaccaatatccttgatgaacattgatgcaaaaatcctcaataaaatactggcaaaccgaattcagcagcacatcaaaaagcttatccacctgacacctgtcttattgcccgcttcttgcctgtgcagtcttgtgtaccatcaacatctggtttgttccactttacaaatgcacacagcagtgaaggctgctactggcactgggattctttgcatccacctcaatagctgaagcctccttggggcccttgggtgatgtaacaaggtaagaattccatctggtttgcagaatcttaggaaacttactgtcctctcaatgccacccagtagcaccagggggataggcaatgccttctgcttattgagacatctttcttaaatctctcccaacacctaaccaaccaaccatcatcacaaatgatggaggattagcagaaaggagagggttgggcatgatggcgcatacctgtaaccaagaaatttgccaggctgaggtkgaaggatcgcttgaggctaggagtttgagaccagcctgggcaacatggtgagacattgtctctacaataaat

SEQ ID NO: 16971 - DNA, 399 bp, Homo sapiens
gggcggcatagactatcagcacctttaaaatgasgtgagtgcgggcccctgggtcccatagagcaatgggggacttgcctgcagccccttcctctgtggcccagcaccccctcccctcagcctcctttggtcaggtcaggtacagtgcagtgggggtgttgcaaggattaaatgagaggacaagtagaaggaagaagagggaagatgctttgatttttaaaggttttttgatttttaaaggttttttgagaccaaatcttgctttattgtccaggcaggagtgagtgtgtagtagtggaagctcagctcactgcaacctctcaccagagggtttaaatgagtctcatgcctcagtgtcctgcatcgctgggattacagggatgtgccaccaggcccagc

SEQ ID NO: 16972 - DNA, 399 bp, Homo sapiens
gggcggcatagactatcagcacctttaaaatgacgtgagtgcgggcccctgggtcccatagagcaaygggggacttgcctgcagccccttcctctgtggcccagcaccccctcccctcagcctcctttggtcaggtcaggtacagtgcagtgggggtgttgcaaggattaaatgagaggacaagtagaaggaagaagagggaagatgctttgatttttaaaggttttttgatttttaaaggttttttgagaccaaatcttgctttattgtccaggcaggagtgagtgtgtagtagtggaagctcagctcactgcaacctctcaccagagggtttaaatgagtctcatgcctcagtgtcctgcatcgctgggattacagggatgtgccaccaggcccagc

SEQ ID NO: 16973 - DNA, 399 bp, Homo sapiens
gggcggcatagactatcagcacctttaaaatgacgtgagtgcgggcccctgggtcccatagagcaatgggggacttgcctgcagccccttcctcygtggcccagcaccccctcccctcagcctcctttggtcaggtcaggtacagtgcagtgggggtgttgcaaggattaaatgagaggacaagtagaaggaagaagagggaagatgctttgatttttaaaggttttttgatttttaaaggttttttgagaccaaatcttgctttattgtccaggcaggagtgagtgtgtagtagtggaagctcagctcactgcaacctctcaccagagggtttaaatgagtctcatgcctcagtgtcctgcatcgctgggattacagggatgtgccaccaggcccagc

SEQ ID NO: 16974 - DNA, 441 bp, Homo sapiens
aaggtgccttaaacgaggaaagtgacctaacccaatctcactatcaattacatctcttttcctttgcacaatgacacattgatccctctgattacctctaatgctttgcctctatccagttactaccttactccaatacaaaaaggggagagttaatccacagctagagtagttatcaaggcttatgttcaatactggtatgtcttaaggaaaatgatatgaaaaagaatcaaacagatttagattttgcttctgattcaatcatttaaaaaaaatttatcccaagcatcaaggcctgtttcttaaaatgagaaggatgcctactgcaacttttatgcagtaactaatagtcccaaaattttacagtgaatggaataaaaagaagagagacacakagagagaagaacaagttaatttcattattaccaacacaacctgtgc

SEQ ID NO: 16975 - DNA, 583 bp, Homo sapiens
aaaaagaaagataactttactagaagaagcccacatgaaactgggcttaataattttctagtgagaattttaatgaaagaggtttatgttttaaagctgaataatattttattgtatatttattacactttcttcatccactaatatgtcagagaacatttagattgctttcatatcttggctattgtgaataataatgcaatgaacatgggagtgcagatatctctttaagatattgattttctttcttttgaatrtatacccaggagtggaatttctagatcatatagtacttctatttttaagtttttgaggaccctccatacgttttcgcaggagctgcaccattttccattcccacaaacggtgtacaggcttctgatttctccatatcctcaacctagaggatattatactaagtgaaaaaagacagttttagaaggacaaatgctacatgattccacttacataagatacttaaaatagtcaaattcatagaagcagaaaatagagcggtagttgctagaaactggagacgggggtatgggatgttttccaatggatttaaagcttcagttatgca

SEQ ID NO: 16976 - DNA, 1147 bp, Homo sapiens
tcaaaatattccaattatgaatggaatcaaaagcccaaaacaggcaaattgataatgttaagaagaagaaaaccctagatctgaattatttcacaccgttttcaaaattaacaataaagtccttttttcattgtgcccaacttcttcctctttctactctgtccccaaattccctgctccctgctttatatttatcttgtcaaagcacaataggcatttatagcatcatctgtgaacatgtagctattttgcaagatttagttaaagttccttttttaaccctgtaggttatataggctttatttttcctgtgtgtcctctttggtagatatctctcatatagtacaagcctataattatttactcatggatatatattacacaatgaagtacaaaaatatgatattcattcyaatagacataatatttaaaggagctagaaatttttgcaagtgtggaatattttagaggagattcattgaacaaatatatttaataagttgaagaagctcgtataaaatatattgtaagaaaatttatctttttattttctgaatatgtgtatagatacttttgaattgtataaactatatagttgttggtactagaagatattgatgtgttattaggtggtaagtaaatgtggtataaatttccttatgttcatatgtgtgtgtgtatatatatatacacatatattcgtatagactcataagcatcttacaaacatttctgtattgtattgagtgaggaggagacagtagggtgttttagagtgatttcccactaatccgtcctacaacactgagtcatatacttccctggaacaaagacatttcagaggcagcaggaaggctgaccctggcatagatgtgcaaggctttctccaccctgagctatatttctctatatggaagatcacaggaaaaaattattcagtagaggttttcatattcttatagaaaggttaaacacatcaggcttggaggccatagaagaatgggtagtaaataaattggctcctgttgcctcaaattgataatccacagatttataaacaatgcatagaaacagagatcactgaatctttcatacatcttggaatagctgaaacttaaggtaacctagcagcagaaaactgttgcaa

SEQ ID NO: 16977 - DNA, 1147 bp, Homo sapiens
tcaaaatattccaattatgaatggaatcaaaagcccaaaacaggcaaattgataatgttaagaagaagaaaaccctagatctgaattatttcacaccgttttcaaaattaacaataaagtccttttttcattgtgcccaacttcttcctctttctactctgtccccaaattccctgctccctgctttatatttatcttgtcaaagcacaataggcatttatagcatcatctgtgaacatgtagctattttgcaagatttagttaaagttccttttttaaccctgtaggttatataggctttatttttcctgtgtgtcctctttggtagatatctctcatatagtacaagcctataattatttactcatggatatatattacacaatgaagtacaaaaatatgatattcattctaatagacataatatttaaaggagctagaaatttttgcaagtgtggaatattttagaggagattcattgaacaaatatatttaataagttgaagaagctcgtataaaatatattgtaagaaaatttatctttttattttctgaatatgtgtatagatacttttgaattgtataaactatatagttgttggtactagaagatattgatgtgttattaggtggtaagtaaatgtggtataaatttccttatgttcatatgtgtgtgtgtrtatatatatacacatatattcgtatagactcataagcatcttacaaacatttctgtattgtattgagtgaggaggagacagtagggtgttttagagtgatttcccactaatccgtcctacaacactgagtcatatacttccctggaacaaagacatttcagaggcagcaggaaggctgaccctggcatagatgtgcaaggctttctccaccctgagctatatttctctatatggaagatcacaggaaaaaattattcagtagaggttttcatattcttatagaaaggttaaacacatcaggcttggaggccatagaagaatgggtagtaaataaattggctcctgttgcctcaaattgataatccacagatttataaacaatgcatagaaacagagatcactgaatctttcatacatcttggaatagctgaaacttaaggtaacctagcagcagaaaactgttgcaa

SEQ ID NO: 16978 - DNA, 1147 bp, Homo sapiens
tcaaaatattccaattatgaatggaatcaaaagcccaaaacaggcaaattgataatgttaagaagaagaaaaccctagatctgaattatttcacaccgttttcaaaattaacaataaagtccttttttcattgtgcccaacttcttcctctttctactctgtccccaaattccctgctccctgctttatatttatcttgtcaaagcacaataggcatttatagcatcatctgtgaacatgtagctattttgcaagatttagttaaagttccttttttaaccctgtaggttatataggctttatttttcctgtgtgtcctctttggtagatatctctcatatagtacaagcctataattatttactcatggatatatattacacaatgaagtacaaaaatatgatattcattctaatagacataatatttaaaggagctagaaatttttgcaagtgtggaatattttagaggagattcattgaacaaatatatttaataagttgaagaagctcgtataaaatatattgtaagaaaatttatctttttattttctgaatatgtgtatagatacttttgaattgtataaactatatagttgttggtactagaagatattgatgtgttattaggtggtaagtaaatgtggtataaatttccttatgttcatatgtgtgtgtgtatatatatatacacatrtattcgtatagactcataagcatcttacaaacatttctgtattgtattgagtgaggaggagacagtagggtgttttagagtgatttcccactaatccgtcctacaacactgagtcatatacttccctggaacaaagacatttcagaggcagcaggaaggctgaccctggcatagatgtgcaaggctttctccaccctgagctatatttctctatatggaagatcacaggaaaaaattattcagtagaggttttcatattcttatagaaaggttaaacacatcaggcttggaggccatagaagaatgggtagtaaataaattggctcctgttgcctcaaattgataatccacagatttataaacaatgcatagaaacagagatcactgaatctttcatacatcttggaatagctgaaacttaaggtaacctagcagcagaaaactgttgcaa

SEQ ID NO: 16979 - DNA, 555 bp, Homo sapiens
ctcctacttttaagtgagaacatgcagtgtttggtttttctgttcctaagtcacttcactgagggtaatggccttcagttccatccaagttgctgcaaaagacattrtttcattgttttgtatggctgagtagtattccatggtgtgtgtgtgtgtatgtatatatatatatatcacattttttaaatccactcatcagtttatggcacttgggttgattccatatctttgcaaatgtgaattatgctacaataagcatatgtattcagatgtcttgttttatataatgacttcttttcctttgggtagataaccagtagtgggattgctggatctaatggtaaatctctttttagttctttgagaaatttccatactgtataaatatttttaagtagataatcttattacctgccagtacaattgatccttgaacaacatgggtttgaactgtgcaggtccacttatacatggaaatttttctgcctctgccacccctgagtcagtaaggcctcctcagcctaatcaagaagatgactaggatgaagatcttta

SEQ ID NO: 16980 - DNA, 517 bp, Homo sapiens
ttcttaattcatttattaggtgtaaaggcgggactcccagggagcgtctcccataaacaatgtcaaaagggttcaacctgctcccacttcgggatgttaccttgactcagagtaaggcaatgggaaaaattcatcccaagtcaaattastttcttgacatattttggcaatgcaatttttttagagtgtggcttctctctttagtttttcctgtcattgtggtctttcagatgacaatctacaagttgtaggaaggggtgagtcacagtttgccctgacattcctgcaaccatcacagtcttttttgaatcagaggataggcagatgttaactatagaatatatagccccccatatcaataagaaagtaagtttgttctccattgtccattatgctcaggggtcctgtggggacatgatgaaacgttggctaaacgtacgaattgaacaagttataggaggacctatgaatatttatgaaagtggtcctgacacatgcatattgaacgaacatgcat

SEQ ID NO: 16981 - DNA, 530 bp, Homo sapiens
aattagaaaaaacaattctaaaattcatatggaaccaaaaaagagcccacatagccaaagatagactaagcaaaaagaacaaatctggaggcatcacactacctgatttcaaactatacttaaggctatagtcaccaaaacaattaatctttgatgttcacgtttacttcatgtcttcaagaataaaatcctctaatatagatgacrttgtcttaaggcaatggtgtctgcttgggtggtactgttttatcctgtgtccaatagttaccttcaccactttcacatatgcctcaacaagagatgttagctatttcttattcactaaagtactgattttatttaaaaggagaagcatagcagcatttaaagaacaaatagtttaccaacctatataaatatgttctggctatctggttactatccatcatgccaaaaaagaaagtctggatgaatagatttttaccaatttggaaagtaagtttgagttggtctgacttaaatacagactactggtaatggcaaaaaaaaaa

SEQ ID NO: 16982 - DNA, 549 bp, Homo sapiens
gtgttcactttatcttctgggtcctaaccctgcacactactaggtgctgttctcctgttggacactttcatggaaagtgatccaattacaaacccctagggggcagagtcaccttgaacaagtcattcacgtttctaattgtaaaatgggggacaatatgaactgaaaattcacagggttgtgaagatcaaataagatccagaaakaataatttattgagtacaattagcaggaggggagattcaggatatataaagcagaacttttgacatataaaacttctgacactgtataccagacactgttataagaattccacatttattatttcatttaacactcacaagaattttatgggatgggtactattattttcccaatggccatatgagaaaaccaatgcacagagaagttaatttgcccaagatcatacctgccagagctagaacacgtgtgtgtatgtgtgacaacaaaatgtgtgtctgtgtgacaataatatgctgtgtgtttctgtagtgtacaggaaaaatttcagagcagttaggaaat

SEQ ID NO: 16983 - DNA, 556 bp, Homo sapiens
tacagtccggcaccctaaaccatccctgtcagataagatagcaaccttcttttaagcatctccagaaaacaggatctctcgacagtcctcagtgtttatcaacactcagtgtcaaaagttctgctttatgtatcctgaatctccccactgccatttgaaccctatccttgtctgtactctgtggaaacaaccctcggctagctgaaccatctcccagcacctcttgcacccctgtgtccaagcagagtgaacttggagaagcagtgttacttttccatgctcaggcccagttttcaggaatcatcttatacttaatartaacccttcttatgaaacttaaagactctcagctgccttgcttccaggctggagtctctccagcatccatgagagaatcaacatagtccccactgactgtactgatccaagaagtttggaggataaagctcttttagttattgagctttatttttagtgattcattcctcttttcccatcgatctctggaggacagtggaagtctgggaggttaatatctgtgagtacttattggtag

SEQ ID NO: 16984 - DNA, 556 bp, Homo sapiens
tacagtccggcaccctaaaccatccctgtcagataagatagcaaccttcttttaagcatctccagaaaacaggatctctcgacagtcctcagtgtttatcaacactcagtgtcaaaagttctgctttatgtatcctgaatctccccactgccatttgaaccctatccttgtctgtactctgtggaaacaaccctcggctagctgaaccatctcccagcacctcttgcacccctgtgtccaagcagagtgaacttggagaagcagtgttacttttccatgctcaggcccagttttcaggaatcatcttatacttaatagtaacccttcttatgaaacttaaagactctcagctgccttgcttccaggctggagtctytccagcatccatgagagaatcaacatagtccccactgactgtactgatccaagaagtttggaggataaagctcttttagttattgagctttatttttagtgattcattcctcttttcccatcgatctctggaggacagtggaagtctgggaggttaatatctgtgagtacttattggtag

SEQ ID NO: 16985 - DNA, 549 bp, Homo sapiens
aggcaggtagatcatttgaggtcaggagttcgagaccagcctggccaacatgatgaagccctgtttctactaaaaaatacaaaaacttagacgggtgtgatggcaggcgcctgtagttccacctacttaggaggctgaggcacgagaattgcttgaarctgggaggtgggggttgcagtgagcataggggtgagactactccgtctcaaaaaaaaaaagttaactctgtgagagatgattataggaaaaatgtttatcttattaactgtagaaatgatcagagtaattttctttttatatttttgttttatgcttttacaagtcagtcattaagtctactctaaaatgtctattaaatagattttgacttttatattctgcatctcaaccttttttggcatttgtgctttaaatcatcattatagcaagtccagcactgcatgacaagtgcaaattttctaattgtgtttcatttcaatcctctttttagggattagaaagttatgtggcagataaagaattccatgcacctctaatcatcgatgagaa

SEQ ID NO: 16986 - DNA, 587 bp, Homo sapiens
tcatcttctctgagcctcagtttcctcacttgtaaactgaggatggtaaccatccactgaagctgacatttatcgagcatttagtatacagcagacacagtgctaagcattcagcccctatcacctaattttttgctcctagcccctctctgatrtggatgttattccaagcttcattcttctagggtgtgaggaggtctaattcagtggaaacatgcacaggtctgagctcaggttctgcacatagcagaagttaatgttactcttatgattgtaatccctcttgcatgagccacagcctctgaacagcagggcagagtgtagcctgttaccaggacttagctcaccttcctcctagcccattgtgaatgcttgtaagtcaagaagaggtaccacattcccaggaaatcaaaggcaggaaaggaacttaagactttctgatttcttattatggaacatcaagacatatgtcttgctaatagaaatgactctttatggtgagcgtgatgagcatgatgagctgttattccacatcctcttcctgaagcatgtgaaggacagtgaaaggaggtgactagcttgatgaa

SEQ ID NO: 16987 - DNA, 527 bp, Homo sapiens
gtgtgtttatgtaataaaaagtagtggtgaggttgattttgcacagggaaatgtgtgtgtgtgtgtgtgtgtgtgtgtatgatttgccacagcctgctgatgcagagacagacagtctggcaataaggcgcctggagagcctgacctcagaccctagagccacccatgaattggaaacragaagttaccaattgcacatccaaggcctcggcccagctgagtgtggaccttgcattgggtgacaggccctttccacgagtggatgcactgcaccctcatgggacaggagctggctggggatagccaactttttgggtagggctggtgggacttcatttgtcccttgcctgatgtggatgggctgtgtccttccatgatggactctgagagcagctgactcagcttcctaaaatgtggcagcatgggccaggagagggaaaccaactgggcggggtaggagtcctccatttgttggaaggccatggtgcatgggagaaatgggggatgggggtggagaatcagataag

SEQ ID NO: 16988 - DNA, 525 bp, Homo sapiens
caaatgccgtatgttctcacttgcaagtggagctaagtgataagaactcatggacacaaagaagggaacaacagacactggggcctacttaagggtagagggcgggaagagggtaaggatcaaacaactacctatcgggtagcatgcttattacccgggtgatgaaataatctayacatgaaaccccctgcaacacacaatttacctatataacaaaccttcatatgtacccctggaactaaaaaaaaaaagtttaaaaaaatagctttgttaaaatcagcagaaaagtatttcctttcctgccctcatgtcttttaggccatagaaatgttactgaatagaacacattaattttgaacattatcaagttctagaaagagattatggatgacaggacagtttctattatagaagttaggtctcaagagacatataggaaaacatgaggggcaaaaaaaaggagaaaaatatagaaaagtaccaggatattcacagactaaataccctctttactttgacaacagt

SEQ ID NO: 16989 - DNA, 808 bp, Homo sapiens
acttaggataatggactccagctgcatccatgttgctgcaatgggtgtgatttttttctttttcatggctgcatagtattccatggtgtatatgtactacattttcattatccaacccactgttgatgggcacttaggcacttaggttgagtccgtgttttccttctcatgaatagcgctgtgatgaacatacaagaacatgtctcctttggtaggacaatttattttcttttggatatacatccggtaatagttttgctggattggatggtagttgtgttttaagctctgtgagaaatttctgaacttctttccacagataatagtttcctaacagcataaaatacaagtattttgtctaaaagttggtctttggaaaatactagtagaaatattaaaaaaatgacattacttattaaaaattattttgttcaattgtccatttttttgttcatatattcattcaaaacacttttttttggcaccaataatacaccaggaactgggaagctaaggcaagtaagacagagacccttttctaaggatttttcatttgttatgagagtatttcaaaaataaagaagactttatacttcttttaagactctagctccagctgtctctgggctcacatttcagaaatgaagcctggaaaatttaggtcgtagagcttcctcatggtycataactttaggtggtcttgtggaatatggaaatgaggagacaaaaagaaaggggaagcccattttgtgttaggacttgtactgctgcatactccaatccccccaacatctcccttgcgcagaaa

SEQ ID NO: 16990 - DNA, 525 bp, Homo sapiens
atcatttaaaatcacgtgttacataaatccttttagcaactgactgcgtgttttcaaaagcgtcttctctaagtcttaaggaacatcactggatatttccaaagaggatattagraaattgctttccaagaactgagaaggaaaagcatcatgtcagacagggctaggtacttatcaaacagtaattgcctcttcttcctttctattgtttcctagattttatttgtgaggtagaaatacgctcactgtgtgcagactcttgagcaactaagtatatccatgacatgcatactttgccaatgagaaataagctgggtgttttccagataatattgcttccctaatatgaagggacaacccatctggcttctggttccctaattcttcctgtttgaaatacagacttaatgcgtggcactgcagcagccaccctgggatcctgaaactaaaagagacagatggcaaagatggaagaacaggtcaacggaaggagcctgtatctgagatagtgtttttgagcaacag

SEQ ID NO: 16991 - DNA, 525 bp, Homo sapiens
atcatttaaaatcacgtgttacataaatccttttagcaactgactgcgtgttttcaaaagcgtcttctctaagtcttaaggaacatcactggatatttccaaagaggatattagaaaattgctttccaagaactgagaaggaaaagcatcatgtcagacagggmtaggtacttatcaaacagtaattgcctcttcttcctttctattgtttcctagattttatttgtgaggtagaaatacgctcactgtgtgcagactcttgagcaactaagtatatccatgacatgcatactttgccaatgagaaataagctgggtgttttccagataatattgcttccctaatatgaagggacaacccatctggcttctggttccctaattcttcctgtttgaaatacagacttaatgcgtggcactgcagcagccaccctgggatcctgaaactaaaagagacagatggcaaagatggaagaacaggtcaacggaaggagcctgtatctgagatagtgtttttgagcaacag

SEQ ID NO: 16992 - DNA, 518 bp, Homo sapiens
tataaaaagtaaagaagactttgtgataaaaatttcttaaaattgttataaaacacgaatcaaaaagtagaaataatgataaatactctatgaacgttttcaaaatcaaaagggagtcattaacttaaaaaaaaaaaaaaagaaagcttgacaaatagagccagggaaggccaagaaaagagaattctaattcttttatgcctgataacaaaaagtatcataaaagactgcaaaaaacacaactttgcacaaaggtcattgtaaccttatacaaaaaatgyttctgtgacatctgcctagcaactgcctgtccaaccttggactggaatcacctttattgagaacgataatgtaatcctcttcattattacctttaaaaaccattgtcttccatttcctccctgaatgtgctcatagtttaccatggcacacatattctcatcacaatcctttgttctcaaatatcttttattttagagaatccttcagtgtattatttaggttgacaactgctaaaa

SEQ ID NO: 16993 - DNA, 628 bp, Homo sapiens
cggtgagccaagattgtgccactgtactccagcctgggtgacagagcgagaccctgtatcaaaaaaaaaattttttttttttttgttaattagccaggcgtggtggcccacatctgcggtcctagctactcagcaggctgaggtgggaggattgcttgagcccgggagttccaggttgcagtgagcatatgatcatgctacctcactgcagcttgggtgacacagcaagatcctgtctctctctctctctctctctcwcacacacacacacacacacacacacacacaaattaagtaaataaataaataaacataaggtgtttaagaaagaagaaaaacgcctctttataccataatttccacatctgagaatttacatgaagaaaactatcaaaaaagtagagcaagatttacttttaaaaagatgttcatggaggtgtcataaaagtaataaattctaggccaggtgtggtggctcatgcctgtaatcctagtggcattttgggaggctgaggagggaggatctctcgcttcaacctgggaggttgaggctgcagtgaactgaaataacgtcactgcacccagccctgggggtcagagtgagcttttgtctcaaaaaaaaaaaaaa

SEQ ID NO: 16994 - DNA, 628 bp, Homo sapiens
cggtgagccaagattgtgccactgtactccagcctgggtgacagagcgagaccctgtatcaaaaaaaaaattttttttttttttgttaattagccaggcgtggtggcccacatctgcggtcctagctactcagcaggctgaggtgggaggattgcttgagcccgggagttccaggttgcagtgagcatatgatcatgctacctcactgcagcttgggtgacacagcaagatcctgtctctctctctctctctctctcacwcacacacacacacacacacacacacacaaattaagtaaataaataaataaacataaggtgtttaagaaagaagaaaaacgcctctttataccataatttccacatctgagaatttacatgaagaaaactatcaaaaaagtagagcaagatttacttttaaaaagatgttcatggaggtgtcataaaagtaataaattctaggccaggtgtggtggctcatgcctgtaatcctagtggcattttgggaggctgaggagggaggatctctcgcttcaacctgggaggttgaggctgcagtgaactgaaataacgtcactgcacccagccctgggggtcagagtgagcttttgtctcaaaaaaaaaaaaaa

SEQ ID NO: 16995 - DNA, 539 bp, Homo sapiens
tcagaatgccaggmaaaagttctcagtgtgagtaatgcctcagaaaaatataaagttttaatatcttttaatatctaatagttttcagaaattgctcatggaaaggaatattgcttaataaggctaacttatcttccatttatgaaaaatccagttttccatgaattcacccacatttgtactgtacaattaaagattgagagggaattgatgagccagagctaagcatctgtagcacacattcaacattttgacatgtgtaattttaagactagtcaaattgatataattctaaaatatcacatgttgtgaggctttgtatttttcactttgcttgggtgtaaggtaaaaattccaggaaataaaatattattactattgaatttatatataggaatctcctgttcttaaatctataaccaactataatttgctttggcttaagaaacagcaaataatgctgcaatatacctgggcatacagacatctctgcaaggtgctgatttcatttccctgggtatatagtcaaaactgggatt

SEQ ID NO: 16996 - DNA, 512 bp, Homo sapiens
tggccctggagctggagttcacaagaggcatagtaggttctgtaggcatacgagcaaggtgggctaaagtcacccacacaaacctcagctccatttctgatacatgaagatggcaaagcaccaaaaagaacacatggaacagcaaaaatcagaactttgaaatgcaacgcccatgaattctgggcccagaagctaggtgacaataggtaagttgtttcacctccctggggtctcgaggtttttcatcagacaatggggagagggggctggagaggtcaatccctgggacccagcaggcccgtatcccactgcacggcagctgcggctcttagcatgcagagaaaaggagtgatctgaagatgaaagttaactgccagacagaagttaatggttgaaacttatcagttaggccactgagcgtctgttgacgcccaggatgaatgtytagggacagtttctgaagaagccataaactctaggtcccgtgttttccatggcagaggaccaagtct

SEQ ID NO: 16997 - DNA, 516 bp, Homo sapiens
ccaccctttcctcccccttctcccctccccaacatctgctttcctacaactgcttcatttctcctacttcttttttcactcttgccagtaagtcaagtgacagccaggaaaaaagcaagtcatgatgcccacwcagctcatgtggctcacatgaataagcactgcattccaggaagcaaaacagttgaaatcccaaactttcaagtgattgtacatacattatgtgacttccctgaaacttaagtaagtattaacataaccaacagctaagagaaagttatttttctgtttattacagaaacctattattcactttttttatgcaggaagaaagtgaggctcagggcctatctaagtccatgtgggctgctataacaaaatattgggaggcttataaacaacagaaatatacttcccaaggttctagggttgggaagtacaagatcaaggcaccagcagattcagtgtctggtgtgggcccttttcagggttcatagagggtgccttcttgccatg

SEQ ID NO: 16998 - DNA, 516 bp, Homo sapiens
ccaccctttcctcccccttctcccctccccaacatctgctttcctacaactgcttcatttctcctacttcttttttcactcttgccagtaagtcaagtgacagccaggaaaaaagcaagtcatgatgcccactcagctcatgtggctcacatgaataagcactgcattccaggaagcaaaacagttgaaatcccaaactttcaagtgattgtacatacattatgtgacttccctgaaacktaagtaagtattaacataaccaacagctaagagaaagttatttttctgtttattacagaaacctattattcactttttttatgcaggaagaaagtgaggctcagggcctatctaagtccatgtgggctgctataacaaaatattgggaggcttataaacaacagaaatatacttcccaaggttctagggttgggaagtacaagatcaaggcaccagcagattcagtgtctggtgtgggcccttttcagggttcatagagggtgccttcttgccatg

SEQ ID NO: 16999 - DNA, 527 bp, Homo sapiens
cagtatcgccacccggggacggctttagccacccgagcctccagcgtggggggagcgttcattctctgaggtcgtcatgaggctcaaagggaagtgaacatacagtgttctcaaggtgttacatttctaaagtcatctcaagagacagccaagcagaaggcgagaggaaggaaaaggcggtgtccacgcctgccgatggactcggggaaacgtggaccctccgcggtgtcccagggaccccaagctccatgttccccagcaaggcctgggtgacaccacctctatttgggccaaggtgagaccactatggtggkaccactcccgcagcccctgggacaggacgggacgccccaacagggagcccctccccacccacgtcccgccacctcctcccagcttcccagcgccctccccagcatctggcggcctgcggagcctcccactccgaggaagtctcctccatggactccaggcagaggaggacgctgtcctgcatgcatcgctcccttcaatgtcccatgcccagg

SEQ ID NO: 17000 - DNA, 549 bp, Homo sapiens
tagttatttgcatgtatatttaatttttcctagactgtgagtcctttgaggagagtatgccattcttatttatcttgtttcccacaattcttaacccagtgcctggtagatatgggatctcaataatcttgagtggaatggtaacatgcaattctggcagtgcartggccatgattcccttcataactacttctaagacctctgggtttccctgagtcacagctgcaaaatatcaaaagctgtctaataggatcacttttcagttcagttaactgacacagaaggatttactatgtgacctaataactgaactatcaaaaactttgcaatatttcatttaattcttacaagtagatgtataacatataataatgtataagagttttaatacataaaaggccatgttacaacataatgtgataacaaagtaccttcctggatatgtcctaccactggttaggaattgggtaaattagtgtatgagcttaagtacaatctagggggtgaggattacaaccaggaagcggtcaatggtggctataaaaacaa

SEQ ID NO: 17001 - DNA, 526 bp, Homo sapiens
atgaaaaaaattgtgataattaactcttacatactatatgaatattcacaccatatactcacttccccatgtttcttccttcgttcatcccttcctctcttgttcctatttttccttcctttttggaaaatagccctgtgcaattcactcagtaagtttccttgaaaatgtctgcaagtgaataaagaactacgcttccacaagttctgtgtggaaagagaattcccttgcatttgtttyccactgagcatcagtcttctccctgagcttctgttgcacattagtttattgttgcaccttactcctaaatgcatgtgaagagcactttaccttaaatgataataaattgccatagtaggactgtcagaagcagtcggtttctcccacccccatatttaatgatgcaaggcaaaaaaaactttatatgcttggtttcaagtatgtagatgatctcaaattgtgcacttgggttgcttttcatatttgtttcaccttggtttgttcgtggcactgtcacctgtgtacc

SEQ ID NO: 17002 - DNA, 523 bp, Homo sapiens
gctcatatcttaggcggattcctctcacttgttagtccactctatttgtaaatyggggagacattttcatcgtttctattttaaagaagggagaaagcttaagttctggcagaagggaagacattggtaaaaatggagactgactatggaaggaattaattgattcttttcatcttcgttagaatcaaaatgaatggaaaaataatctgatttacacgaactcttgcttgctcagacatctagctatgaaataaggactcagccttagctgaactctgagctcccatatcagagtttcaaatgctgttttacccccttgtaattgttaatatattcctagtgttaatatgtttctaggttccaagaaaagggaaaaccctcctgtggtcagcttgtcatttggctttcctgtaactgccaacttaaaaataaatagacaaacaaatgtagtccatttaatttaaaatgttatatttattaaaatgttcaaatatatttttctcatctgaatcactttacaaaa

SEQ ID NO: 17003 - DNA, 523 bp, Homo sapiens
gctcatatcttaggcggattcctctcacttgttagtccactctatttgtaaattggggagacattttcatcgtttctattttaaagaagggagaaagcttaagttctggcagaagggaagacattggtaaaaatggagactgactatggaaggaattaattgattcttttcatcttcgttagaatcaaaatgaatggaaaaataatctgatttacacgaactcttgcttgctcagacatctagctatgaaataaggactcagccttagctgaactctgagctcccatatcagagtttcaaatgctgttttmcccccttgtaattgttaatatattcctagtgttaatatgtttctaggttccaagaaaagggaaaaccctcctgtggtcagcttgtcatttggctttcctgtaactgccaacttaaaaataaatagacaaacaaatgtagtccatttaatttaaaatgttatatttattaaaatgttcaaatatatttttctcatctgaatcactttacaaaa

SEQ ID NO: 17004 - DNA, 527 bp, Homo sapiens
ttcaggcaaatgctattgctgtgaatgggggaaggagcaaatacatcacgttacctatgggcaccatttactagtatcccattattgaaaaagtgagaaattccaaaaatgaaatgatggaaaacactactatgtacaacaaaattgtttaaacaaatagcaacagaatgtcaaccaaataaaacactgcatcttcattagcatctaccatgtggtcaggggctctgagcatcagcttatgttccctkttgctttgtttgtttcacaaatgttagagttgtttctctcacacctctaagcttagtggagtgcttcaaatgcaactggtattaaataaacatttattgaatgttacatgaatgaacaactaattgaaagaaggcctatgtccattgtatttattctacatttttttctcacaagtcttatggtgacgaagaacttattttgtggtaggtattaaagaaaagtttaaaagaaatatttgttccacttaaagttcttaattacaagcaaaagaggttaaa

SEQ ID NO: 17005 - DNA, 527 bp, Homo sapiens
ttcaggcaaatgctattgctgtgaatgggggaaggagcaaatacatcacgttacctatgggcaccatttactagtatcccattattgaaaaagtgagaaattccaaaaatgaaatgatggaaaacactactatgtacaacaaaattgtttaaacaaatagcaacagaatgtcaaccaaataaaacactgcatcttcattagcatctaccatgtggtcaggggctctgagcatcagcttatgttccctgttgctttgtttgtttcacaaatgttagagttgtttctctcacacctctaagcttagtggagtgcttcaaatgcaactggtattaaataaacawttattgaatgttacatgaatgaacaactaattgaaagaaggcctatgtccattgtatttattctacatttttttctcacaagtcttatggtgacgaagaacttattttgtggtaggtattaaagaaaagtttaaaagaaatatttgttccacttaaagttcttaattacaagcaaaagaggttaaa

SEQ ID NO: 17006 - DNA, 527 bp, Homo sapiens
ttcaggcaaatgctattgctgtgaatgggggaaggagcaaatacatcacgttacctatgggcaccatttactagtatcccattattgaaaaagtgagaaattccaaaaatgaaatgatggaaaacactactatgtacaacaaaattgtttaaacaaatagcaacagaatgtcaaccaaataaaacactgcatcttcattagcatctaccatgtggtcaggggctctgagcatcagcttatgttccctgttgctttgtttgtttcacaaatgttagagttgtttctctcacacctctaagcttagtggagtgcttcaaatgcaactggtattaaataaacatttattgaatgttacatgaatgaacaactaattgaaagaaggcytatgtccattgtatttattctacatttttttctcacaagtcttatggtgacgaagaacttattttgtggtaggtattaaagaaaagtttaaaagaaatatttgttccacttaaagttcttaattacaagcaaaagaggttaaa

SEQ ID NO: 17007 - DNA, 528 bp, Homo sapiens
aggcacaagtgcttaataaattcttgttgaatattgatttcttgaaggagtatattccagaagtattattgagtaattgcttatgatggcagcaacaacaaaaatggaaacaatctatgtatccatcaatgaggaaataataaatacattttgatgtatctacattcacgagatgtttatgatatgttaaattaaaaaaaagtcagttgccaaaaacagtataaggtcatatttttgttgaaatatstgtgttactaaaagtagtcatagtaaaatacactaaaatgttaggagaacttaccactaaggataggttttgatagaaaaactagaagggtcctttcacttcttattttaagtaatttccagccgggcgcggtggctcatgtctgtagtcctagaactttaggaggccaaggtgagtggatcacgtgaggtcaggtgccaagactagcttggtcaacatggtgaaactctatctctactaaaaatacaaaaattagcgggatgtggcggtgcatgcctgta

SEQ ID NO: 17008 - DNA, 553 bp, Homo sapiens
tgaaatgggtccatggggcaaagaacttggggctgggaaagtctgagtggaaagacaaaaagaagctaagtggaacccttggcagggtgcctacggcttgggtttgcagaggacctggcagaacctggccagacacagacgtagcattccagtgtgcaccctttcctttggcctactgggccccaaaccaggtatctgaggcacctggtcaaagttctgctggctcagggtgccagaactttcagacctttatctcctcttacccattaactgaagctttagaaaggccacagttggtgggcgcctgtagtcccagctactcaggaggctgaggcaggagaatggcatgaaccygggaggcggagcttgcagtgagctgagatcgcgccactgcacttcagcctgggcgacagagcgagactccgtctcaaaaaaaaaaaaaaaagaaaggccacagttgccagaaagaaaggcacaagtatgcctgactcaatctggatctccaaatccctgcaggctggtttggaggtcctttctgaaggcggggaggtgg

SEQ ID NO: 17009 - DNA, 531 bp, Homo sapiens
ggaatttgaaaatatgaaggaatctatcatataaaaacgaaattacatctgttttaatgaacaagatccctagttattgatcaagtaatgtaatcaaaaacccaagtaaatattttaagttatttggaataaaattcttttcaaaaagtcctttaattatgaaagatgaacaggattggaaatgaatactattctaatttacatcaaaaatgcaaacaggcatttattataatcatactcagattcacacctacaaatttaagttatacatagtacatggcaaattagataaacacatttattcatgtttaaaatagtgtaatgccaccaccaaggaagccagtaaaaaagtaccccaagaatatactaaaggaaatgaagagcctcttttcaacttattyaagtgccgacaatggagtagggagaagaattggtagaagagatgggcaagcatcactatggagctggctcagtgacatgtgctttgtcatactagaaagattgattttatctttttacttcacaaattag

SEQ ID NO: 17010 - DNA, 526 bp, Homo sapiens
attgccttctaaacaaaatctaaatgcttttataatctgatcctgtctacatttacattctaatctctcacaaggcctatctttttgatgtgcatttaggtcttataactgcttacagaatacagaacatgtcatattttgggggactttcttgtctttttacctgttgttcttttgatttggactgcmttcatccttatcccaattcttttgagttctattaagatatagtttagctgatattgccttctgaaagttttcctcaaataccaaatacacctgggttaggtgttttctgggatgctatagtaatgtgtacatccttgtttcatggtgtctgacactttattaattactttatgcctatctctatcattttaagtcccctgaagacaaaggaagtttttttttttttcttttgtgtttgtttaacagtgatcccaggaactaggaacatagtgaatgctgatgacttggtgcaaagaggaaggaaggaaagaggaagaaagggcaagggagacaggca

SEQ ID NO: 17011 - DNA, 544 bp, Homo sapiens
aaactgtttttacagagttaaaccatcatcgagttaaacaagcacataacctatcttggtttggaccttcggagagtggactgatggcctgaagtgtgatctgaattgatggggcagagacattctatacacacagataaccggcctctcgtcttgcgaagttctccagtgcatagtcagagctagtgaccttactgagtagggtgactaagagtgtgacaaagggtgactctgcccatattttctctgtgtcttcccattgcgatgggtcattttaaagctgacaccaatctttaacccataagtaattctatattaaaaaaaaaamccctggttacagcacatttaatagtgataattccacagtatgttaattatctggtctctctaaaataagtcactgtaaggggctccagcttttttcttatgatattaaataaatcagagaagaagaggttatcatgatggttcggaggcactccaagtccagaaagagagaagtcccgaagagttataaggatttaacgaattggttgctcaaact

SEQ ID NO: 17012 - DNA, 873 bp, Homo sapiens
tccagcagcaatgcatgagagttccaattcctctagatcctcaccaacacttggtatggtcagtttttaaattttgcacattctaataggtgaatagtagtagctccttattgtttgcctttgtgctcatcaaatgaataatgatattgagcatctttttatgtacctaattgccatctatatgtactctttggtaaagtttctctttaaattggtttgtggaaaaagttaacagttatctttatttttaaaatagactccatggttcattccttttagcttttcatttttctcattttattctgcagggatatggacacatctcctggatatggaacaggaaacttacattagaggattaaatctgattgcatggaaagcaagtcaggaactaaatggaaatgtttgtttgtttgttttgagacagaatttcactcttgtcrcccaggctggagtgcaatggtgcatactcagctcactgcaacctccgcctctcggattcaagagattttcctgcctcagcctcctgagtagctgggactacaggtggcatcgcaaagtgctgggattacaggcatgagccactgcacccagctggaaactaggtctttaatgacattattcagttacctaactttcctgtgtaacccactgatggacatcaccctctaggaggtgaaaaatacttataaactgctattgtagatttgtatgttacctgtagaggaatgggtgagaaaaaaaaagtcaaatgaaaaatattcctatacgcctgtgctataattatatatggagggggatcttgttctctagagttcagtggcccaatcacagctcactgcagccttgaactcctgggcgcaagacatcctt

SEQ ID NO: 17013 - DNA, 873 bp, Homo sapiens
tccagcagcaatgcatgagagttccaattcctctagatcctcaccaacacttggtatggtcagtttttaaattttgcacattctaataggtgaatagtagtagctccttattgtttgcctttgtgctcatcaaatgaataatgatattgagcatctttttatgtacctaattgccatctatatgtactctttggtaaagtttctctttaaattggtttgtggaaaaagttaacagttatctttatttttaaaatagactccatggttcattccttttagcttttcatttttctcattttattctgcagggatatggacacatctcctggatatggaacaggaaacttacattagaggattaaatctgattgcatggaaagcaagtcaggaactaaatggaaatgtttgtttgtttgttttgagacagaatttcactcttgtcacccaggctggagtgcaatggtgcrtactcagctcactgcaacctccgcctctcggattcaagagattttcctgcctcagcctcctgagtagctgggactacaggtggcatcgcaaagtgctgggattacaggcatgagccactgcacccagctggaaactaggtctttaatgacattattcagttacctaactttcctgtgtaacccactgatggacatcaccctctaggaggtgaaaaatacttataaactgctattgtagatttgtatgttacctgtagaggaatgggtgagaaaaaaaaagtcaaatgaaaaatattcctatacgcctgtgctataattatatatggagggggatcttgttctctagagttcagtggcccaatcacagctcactgcagccttgaactcctgggcgcaagacatcctt

SEQ ID NO: 17014 - DNA, 572 bp, Homo sapiens
agttgactgatagaaagtataaacctcccccagagttagaaaatctgtacttaggcttcatggtctttctaacccctacaaaaaaatttctatttaaaaaaaaaggagaatgtcacagttttcaaaacgtttgctgctcagtgtgtggactataacttgcagggagtaaatattatctgggaccttccaggaaagatggattcccaggttccagaaagacccacagatgtagaagatkgtgtttaaccagaattccccgtgaattgtatagccatttaaataaaattaattaaataaaatcgacatttaaaagcagtactctaaagcacttcagtccttaattttagtctatatctgagttttagacctatacgtgccattgcattccatgaaccaactctgtgattttatactagacgttccttacaaaagtaataaatagcttatacatgcctccccacccggaattttttttttttttttgcttgttagctactatggatttttattacttacaaatcaagggcccttaataaatcagcttctcaaacaaaatttcctttagcactgta

SEQ ID NO: 17015 - DNA, 572 bp, Homo sapiens
agttgactgatagaaagtataaacctcccccagagttagaaaatctgtacttaggcttcatggtctttctaacccctacaaaaaaatttctatttaaaaaaaaaggagaatgtcacagttttcaaaacgtttgctgctcagtgtgtggactataacttgcagggagtaaatattatctgggaccttccaggaaagatggattcccaggttccagaaagacccacagatgtagaagatggtgtttaaccagaattccccgtgaattgtatagccatttaaataaaattaattaaataaaatcgacatttaaaagcagtactctaaagcacttcagtccttaattttagtctatatctgagttttagacctataygtgccattgcattccatgaaccaactctgtgattttatactagacgttccttacaaaagtaataaatagcttatacatgcctccccacccggaattttttttttttttttgcttgttagctactatggatttttattacttacaaatcaagggcccttaataaatcagcttctcaaacaaaatttcctttagcactgta

SEQ ID NO: 17016 - DNA, 694 bp, Homo sapiens
ggaaaaaaatataggcaaaagggaagaaagtggggacagagccaagtataagagataaaccctgctttaatgctaaccccagttaacttggccaacagctcaaatcaaaatgtacaaagtagttttgtaagctaagctcaaactggcccttcrctggccaatggacactgttgcatgagggtaacccaggcttttacactgactacagttgtttaggggaaactggaagggagggctgtatctcaggaaatgtaggggaaaaggccaaatctacaatggtctctgcaaacaaaaagcagggttaatgggtcaaatccataatgtgtctgtgtgtatactcaacatgaaaactggacatcaaagacctaattttagatgaagagtctaaaattttggttaagcccacagagtgaaaaaggtccagcatttagagagtccctaaggccattgtaggcccagagtgctttgtggaagatgtcagtcgggagcggaagagcaaattcagttgatttcttagacggaaataacagaaaagtgacaaagatccagaagtaggtttattagggtttaccttgaatcttatgacattcagggacccctcacctgcacagaccccttctaaagatacgggaggaagcctagcaatatgttcctgtgatcacaggtttctggaatttttatcagtataaaataa

SEQ ID NO: 17017 - DNA, 494 bp, Homo sapiens
ttgcatatgtagctacagacaagagtatatgtatgtatatatgtatgtatatacactcttgtatatgtaaggatatatactcttgtctgtacataactattgacaatgcagtctccttagaacacttaattctctcccgttccaacytataagccatttttgtattgtatttcattttaatgtatattttaatttcaagacattactaatattgatgtactcaatcactatcaatttatattttcctgaatttcaatgctttcttttcctttatttattgaagagtcctcatctgagataattatctttcactacttactttaatgtacccttcactaaaaagtaccctttactatttactttaatgtgggtctgatgataatacattttatcatatttgcttttctgaaaatctatttatggttatcttaatttttaaatgatattttccacttggaatataattttacattatctgagcttttccctcagta

SEQ ID NO: 17018 - DNA, 502 bp, Homo sapiens
gacagaatgagactccatctcaaaaaaaaaaaaaaaagaactttgcacccaataatccttaaatatacattctttccaagcccacatggaagagttagaaaaattgaacwtatgctttttacctgcacaataggaaaatatgcatccattgaggctagacaaagtgaattaacctggcctcctgacaaaagaggtatgagctgataagactggaagagctgtaggccgggcgcagtgactcacacctgtaatcccagcactttgggaagccaaggcaggcggatcacgaggtcaggagatcgagaccatcctggctaacatggtgaaactccgtctctactaaaaatataaaaaattagctgggtgtggtggtgggcacctgtagtcccagctacttgggaggctgaggcaggagaatggcatgaacccggaaggtggagcttgcagtgagctgagatcgtgtcactgcactccagcctgggcgacagagcgagactccgtc

SEQ ID NO: 17019 - DNA, 502 bp, Homo sapiens
gacagaatgagactccatctcaaaaaaaaaaaaaaaagaactttgcacccaataatccttaaatatacattctttccaagcccacatggaagagttagaaaaattgaacttatgctttttacctgcacaataggaaaatatgcatccattgaggctagacaaagtgaattaacctggcctcctgacaaaagaggtatgagctgataagactggaagagctgtaggccgggcgcagtgactcacacctgtaatcccagcactttgggaagccaaggcaggcggatcacgaggtcaggagatcgagaccatcctggctaacatggtgaaactccgtctctactaaaaatataaaaaattagctgggtgtggtggtgggcacctgtagtcccagctactygggaggctgaggcaggagaatggcatgaacccggaaggtggagcttgcagtgagctgagatcgtgtcactgcactccagcctgggcgacagagcgagactccgtc

SEQ ID NO: 17020 - DNA, 502 bp, Homo sapiens
gacagaatgagactccatctcaaaaaaaaaaaaaaaagaactttgcacccaataatccttaaatatacattctttccaagcccacatggaagagttagaaaaattgaacttatgctttttacctgcacaataggaaaatatgcatccattgaggctagacaaagtgaattaacctggcctcctgacaaaagaggtatgagctgataagactggaagagctgtaggccgggcgcagtgactcacacctgtaatcccagcactttgggaagccaaggcaggcggatcacgaggtcaggagatcgagaccatcctggctaacatggtgaaactccgtctctactaaaaatataaaaaattagctgggtgtggtggtgggcacctgtagtcccagctacttgggaggctgaggcaggagaatggcatgaacccggaaggtggagcttgcagtgagctgagatsgtgtcactgcactccagcctgggcgacagagcgagactccgtc

SEQ ID NO: 17021 - DNA, 585 bp, Homo sapiens
tgcagcctgggtgaaagagtgagatcccatcttttaaaaaaagaaacaaataaaaaaagtagattttttagtgaaaaagcaaagaatttcaagctctctttaaaaaaaaagaaactttttcatttctacaggttttgggggaacaggaagtatttggctacatgagtaagttctttagtggtgatttgtgagattttggtgtacgcatcacccgagcagtatacactgaaaccaatttgtagtcttttatccctcatccccctcccaccctttcccccgagtccccaaagtccattgtatcattcytatgcctttgcgtcttcatagtttagctcccactcatgagtgagaacatatgatgtttggttttccattcctgagttacttcacttagaataatagcctccagttccacccaggttgctgcaaatgccattaatttatttatttttctggctaagtagtattccatcccacaatttatttatccacttgttgattggtgggcatttgaggtggttccttgtttttgcaattgtgaattatgctgttataaatatgagtacaccagccctaattgtgggg

SEQ ID NO: 17022 - DNA, 585 bp, Homo sapiens
tgcagcctgggtgaaagagtgagatcccatcttttaaaaaaagaaacaaataaaaaaagtagattttttagtgaaaaagcaaagaatttcaagctctctttaaaaaaaaagaaactttttcatttctacaggttttgggggaacaggaagtatttggctacatgagtaagttctttagtggtgatttgtgagattttggtgtacgcatcacccgagcagtatacactgaaaccaatttgtagtcttttatccctcatccccctcccaccctttcccccgagtccccaaagtccattgtatcattcctatgcctttgcgtcttcatagtttagctcccactcatgagtgagaacatatgatgtttggttttccattcctgagttacttcacttagaataatagcctccagttccacccaggttgctgcaaatgccattaatttatttatttttctggctaagtagtattccatcccacaatttatttatycacttgttgattggtgggcatttgaggtggttccttgtttttgcaattgtgaattatgctgttataaatatgagtacaccagccctaattgtgggg

SEQ ID NO: 17023 - DNA, 541 bp, Homo sapiens
gctgaggtgaaataatcacttgaacccgggaggtggaggttgcagtgagccaaratcgcgccactgcactccagcctatgtgacagagtgagaccctgtctcaaaacaacaacaataaaaagaatttgaatatgttcagactttccaccatacagtaccttagcaaggtacactgagattaggaataagttaaaatgcttgtctttggaagattaagtggatgttaatctaagcaaagtggattctgtaaaaccctgaaagaagtttttgagtttcacggtgtgaacagaacagagaacccttgatgagaacacatgcgtagctcctagcacagagtgtgcgacacagttaatgtccacgggaagagcttgacacaaacttaaataccaaacttagttcagaagcacttcgcattaagctcctgtgcctcagtggcctggcacttactggactgaaggacagaatcactaacctgggcttttactaccattgcagcccagtgccagtgacacttagggactcttccctgagcaccttccca

SEQ ID NO: 17024 - DNA, 806 bp, Homo sapiens
agctggacttctttctttttggaaatcttccctaactcttcrcccctgtccccatgtccccatgtccccatgcaacattattggcagggacttctcctccgttctgctggcatccgggctcttctctgccataacgtttcgctcacagcattatctcttaatttatctctctcacctggaagaaagaacctctttatatttctctgttcagaaccaggtctgccacagataaggcattcaggaagtatcagttggttgaatcaaatgactaattaatgttttggccctgtggaatggattcccagtgtgtgcacagtcaccggaatgcagcaggtctagctgacggaatgtgctgactgcacagttcttcctccgtgccccagcatctcctccaccctagctgtgtaccaggcagggatggcttgcatgtgaaggataactcaagggatggctctccttttgtcctcactcagctcatgttccacaaacccaaggcaggcaatcattgatgcccgggtgtcatccctgggctcctctgaactctcctgtggccatggtggacaattccagaagagtccacttctctgcctggggccttttggggtgccctgagacctggcctgtttatttgcaggacagctgggaagtccagggatttaacatcccccagtgaaagacaggagttggtggatgaatatcccaacttcctcatggcttgttggaacaactctaggtggattcctctctattccttggcgggtccccagcaggactgagcccaagtgccacagtggtggcccagcact

SEQ ID NO: 17025 - DNA, 806 bp, Homo sapiens
agctggacttctttctttttggaaatcttccctaactcttcgcccctgtccccatgtccccatgtccccatgcaacattaktggcagggacttctcctccgttctgctggcatccgggctcttctctgccataacgtttcgctcacagcattatctcttaatttatctctctcacctggaagaaagaacctctttatatttctctgttcagaaccaggtctgccacagataaggcattcaggaagtatcagttggttgaatcaaatgactaattaatgttttggccctgtggaatggattcccagtgtgtgcacagtcaccggaatgcagcaggtctagctgacggaatgtgctgactgcacagttcttcctccgtgccccagcatctcctccaccctagctgtgtaccaggcagggatggcttgcatgtgaaggataactcaagggatggctctccttttgtcctcactcagctcatgttccacaaacccaaggcaggcaatcattgatgcccgggtgtcatccctgggctcctctgaactctcctgtggccatggtggacaattccagaagagtccacttctctgcctggggccttttggggtgccctgagacctggcctgtttatttgcaggacagctgggaagtccagggatttaacatcccccagtgaaagacaggagttggtggatgaatatcccaacttcctcatggcttgttggaacaactctaggtggattcctctctattccttggcgggtccccagcaggactgagcccaagtgccacagtggtggcccagcact

SEQ ID NO: 17026 - DNA, 806 bp, Homo sapiens
agctggacttctttctttttggaaatcttccctaactcttcgcccctgtccccatgtccccatgtccccatgcaacattattggcagggacttctcctccgttctgctggcatccgggctcttctctgccataaygtttcgctcacagcattatctcttaatttatctctctcacctggaagaaagaacctctttatatttctctgttcagaaccaggtctgccacagataaggcattcaggaagtatcagttggttgaatcaaatgactaattaatgttttggccctgtggaatggattcccagtgtgtgcacagtcaccggaatgcagcaggtctagctgacggaatgtgctgactgcacagttcttcctccgtgccccagcatctcctccaccctagctgtgtaccaggcagggatggcttgcatgtgaaggataactcaagggatggctctccttttgtcctcactcagctcatgttccacaaacccaaggcaggcaatcattgatgcccgggtgtcatccctgggctcctctgaactctcctgtggccatggtggacaattccagaagagtccacttctctgcctggggccttttggggtgccctgagacctggcctgtttatttgcaggacagctgggaagtccagggatttaacatcccccagtgaaagacaggagttggtggatgaatatcccaacttcctcatggcttgttggaacaactctaggtggattcctctctattccttggcgggtccccagcaggactgagcccaagtgccacagtggtggcccagcact

SEQ ID NO: 17027 - DNA, 799 bp, Homo sapiens
ttctcctccctgggtcttagtgccccatttgtgaatgaacgaacagaccagagggtctctctctctccccctcaggtccctcggggtgtaccacagagtgtatctgttacttaattgactggtttgaaccccagtttcctaatcaataaaataggaataataactgttgctttgcagggggattatgcggaaaacgcctggttctggcttcctccacttgtgccctcccctcactcactctgcctttggctctgcgcttctgcaagcatggtcacctgtggctgcacaygcagggcctctgtgctgctggttccctctgctgagagcaccttccctgatagccatggggctcacctcctgatgggggctgcattgtgtcccttcgcaaatgatacattgacgtcctaatccctggtgtctatgaatgcaacctcatctggaaatagggtctttgcagacataaccaagttaaaaggtggtcatactggagtagggtggtgtcttagtccatgttgcgttggcataaaggaatacctgaggctgggtaatttattaagaggtttatttggctgaggattctgcagactgtacaagaaggatggcattggcacttgcttctggtgaggacctcaggaagcatccaatcttggcagaaggtgaagtaggagtgggcgtgccacatggcaagagacggggcaagagagagatgctgggttcctttaaataaccagctttcacatgagctaatagaatgcaaattcactcatcaccaagggaatggcactgagccattggtgag

SEQ ID NO: 17028 - DNA, 522 bp, Homo sapiens
gttaatgccctaaatacttttcaaagatggtatttacttacatgcacacagtgcatcactatcccgagattgtttacctccagaaaaatatattttatatattacatttggaaattatactaagtacctttctacaaaactcttgtaagtacaaattaattctattattctaaatctagctgtagccttcccactcaaatactatgaacatgctgagaatgatgtgtcccaagttttccatttgtggactggaaaacrcagtccagtccccagtggcagatattattgtcagatacagcagaagagaaacatctcaatttccttatatgatttccaatttctgtggataatcaaagatgcatgtagaattgtaatattctaatttccatttgccttcgttttcccaattccactttccacttcagccctgccttgagtcttttgctttaatttagtcaagttgatagagaagtattctagagtgagagaaaaaaatagagaaggaggaagttttagagagag

SEQ ID NO: 17029 - DNA, 278 bp, Homo sapiens
gagagaccaggtgatttgcctgagcaagtctgaagcaccatagaagctggtaaagatgactaggtgcagtggctcatgcctgtgggagaactatgggaggccgatgtgggtggatcgtttaagcccaggagttcgagaccagtctaggcaacatggcaaaaacccatatctamtaaaaatacaaaaattagctaggaacagtggcatgggcctgtagtcccagctacttgggaggctgaggcaggaggatcacctgagccttgggaggtcaaggctgc

SEQ ID NO: 17030 - DNA, 278 bp, Homo sapiens
gagagaccaggtgatttgcctgagcaagtctgaagcaccatagaagctggtaaagatgactaggtgcagtggctcatgcctgtgggagaactatgggaggccgatgtgggtggatcgtttaagcccaggagttcgagaccagtctaggcaacatggcaaaaacccatatctactaaaaatacaaaaattagcyaggaacagtggcatgggcctgtagtcccagctacttgggaggctgaggcaggaggatcacctgagccttgggaggtcaaggctgc

SEQ ID NO: 17031 - DNA, 533 bp, Homo sapiens
tttaaacccagcactgccaagcctcttcaacctctgaaaaattataattgcaaaccagaataaaaatttttttttttttgagatagggtcttgcgctgtcacccaggctggagtacagtggcgcaatcatagctcactgcagtctcagcatcccaagtaamtgggaccacaggcacacaccatcatacctcatttttttatttttattttttgtagagatgaggtctcgccatgttgcccagcctggtctcagactcatggtctcaagtgatcctcccacttcagcctcctaaagtgctgggattaccggcgtgagccgccatgcctggccaaggccagggttattctcctttgggtaactaacgtccacctgacgcatactagctgatgctgcgtctcctctgcagggacgtaagctccacaagagtgggattttccttactcactgtgggatcccaagcatccagaacaatgtcaggcacacggcaggccctagatatatgttaaagaacgaaactcatccatccccgaat

SEQ ID NO: 17032 - DNA, 542 bp, Homo sapiens
ccgtgaatcatcccagctggcaaaaaaggagaagaaaaaagtaatttctttttaaaaaatgaacaatcattttcaaattattttctctcccaacaaaggaattagccaaggttttgtttcaagaccaaacaaaaaggggaaagcaatcagytttctccatgaatgcaatgggtaattcatgaggctctggaaaatacagctgcagttttgccaataatttcttgtgcctgtgtaaacagtaccatattctctgaagcttttcccccttcaaaaaggtaaactttgcattgccaataagtaggggcagaacaatatagtcagcctccaaattctttctgggtaagaccatgttctttacaagaaatttcggatattcaatgaatggttactcctatctaccctgaagaactgggttaggaacatatgaggtacaagtgaccaaatacagttagctgttattacttacatagctgatgaagattgaggaggggagggaagatggatgctggcaacagatttctcactgtgtcatttcccttcat

SEQ ID NO: 17033 - DNA, 542 bp, Homo sapiens
ccgtgaatcatcccagctggcaaaaaaggagaagaaaaaagtaatttctttttaaaaaatgaacaatcattttcaaattattttctctcccaacaaaggaattagccaaggttttgtttcaagaccaaacaaaaaggggaaagcaatcagctttctccatgaatgcaatgggtaattcatgaggctctggaaaatacagctgcagttttgccaataatttcttgtgcctgtgtaaacagtaccatattctctgaagcttttcccccttcaaaaaggtaaactttgcattgccaataagtaggggcagaacaatatagtcagcctccaaattctttctgggtaagaccatgttctttacaagaaayttcggatattcaatgaatggttactcctatctaccctgaagaactgggttaggaacatatgaggtacaagtgaccaaatacagttagctgttattacttacatagctgatgaagattgaggaggggagggaagatggatgctggcaacagatttctcactgtgtcatttcccttcat

SEQ ID NO: 17034 - DNA, 1770 bp, Homo sapiens
aaacccgagatttattacggaatcagcgtgaaccttcccagcacagctcacagagcatacgccaaaaattacagtgtgattcagtttcaaaaattgtctgtagtgacctgtgagttcacagctcgtgaggacattctttagttcggctgaagccaaaaaacctggaaccatcgaaatgggaagaagtggagtctgccaaattctgcctcttacactttcagctaccacgccatgttcaactattgtacttgataaggattggaaacttaaggtgctgataatttcaatagagtttcaccagagtagtatttcttgtgagaaagccataatctcatcagtaacgcctttctaaaagatccaacagaaaatatgaactagcaactcatcctgacaaggaagtaaaactcaggaaaaatcctaaggcagagcagcttcaggcttcagtgtgaaactatcatagtctgggcgcggtggctcacgcctatagtcccttcactttgggaagccaaggtggggcagatcacctgaagtcagcagttcaagaccagcctgggcaaaatggcgagacctcgtctctacttgagcaaatacaaaaatttgcccggcgtggtagcgcgcacatttagtcccagccactctggaggctgaggcaggagaatccgttgagcctaggatgccgaggctgcagtgggctgagatgaggccgctgtaatccagcctgggggacagagcgaggcactgtctcagaaataaacaaataaaataaaataaactaaaataaagtgacgtaaaataaaattgaaataatattttcacgtttccctcacccagcccattttattttcagagtatttgataaaccgctttcttccctgtgcgttagagagttttttttctcagacatcgaagttttctaatgctcaacttcgtaaaatgtctcatttttactgtaaatagtttctttactgttgtgagatgtgaactttgcgattctgtgaagaggactgaattctgaaatgccccctgcatttcccgcccctcagagagtcgccctgtgtctgcccctcccttgggtgtgggcggaagcacgaattgatgtgcccgcccgacttcctcattagattggggggtatcctgaaccaacggctgctaagggctgggtctaatgcagtcatctgagccctttataagggaggactgaacccccctgtgattacgctcccctgtgggagattccccagcactggctgtgcacacccagggagcctcacggcccagacctgggcagcacgggtaggagctgagagcatcctcacggcagcaggcagaacaaacaagtgggcctggggctcrcaaccctgaggcattgttgaattctgccaccaactcgaatcggatcgaagccagacccttctcaggtggaggcaacgaccgcacagccagacccatcctggaggtccctcgtgggactctgagcaggaggcagtcacttggcctagcagaacttctgacctgtgagctggtgtttgttttaaatacccaaaattggtgagaattcgttctgcattgacctaaaactaacatactctccttccacaagtttcttcacactgtggaagcgagaaaattcagtgtgtgtgtttgtgtgtgggaaggggcggccgggagccgtgtccggttacggcgaaactggctcagcagaaacacagcagctaaaatctttgaaaggttctcatcgcagatccacaatcaaaccaccccagccggaac

SEQ ID NO: 17035 - DNA, 1770 bp, Homo sapiens
aaacccgagatttattacggaatcagcgtgaaccttcccagcacagctcacagagcatacgccaaaaattacagtgtgattcagtttcaaaaattgtctgtagtgacctgtgagttcacagctcgtgaggacattctttagttcggctgaagccaaaaaacctggaaccatcgaaatgggaagaagtggagtctgccaaattctgcctcttacactttcagctaccacgccatgttcaactattgtacttgataaggattggaaacttaaggtgctgataatttcaatagagtttcaccagagtagtatttcttgtgagaaagccataatctcatcagtaacgcctttctaaaagatccaacagaaaatatgaactagcaactcatcctgacaaggaagtaaaactcaggaaaaatcctaaggcagagcagcttcaggcttcagtgtgaaactatcatagtctgggcgcggtggctcacgcctatagtcccttcactttgggaagccaaggtggggcagatcacctgaagtcagcagttcaagaccagcctgggcaaaatggcgagacctcgtctctacttgagcaaatacaaaaatttgcccggcgtggtagcgcgcacatttagtcccagccactctggaggctgaggcaggagaatccgttgagcctaggatgccgaggctgcagtgggctgagatgaggccgctgtaatccagcctgggggacagagcgaggcactgtctcagaaataaacaaataaaataaaataaactaaaataaagtgacgtaaaataaaattgaaataatattttcacgtttccctcacccagcccattttattttcagagtatttgataaaccgctttcttccctgtgcgttagagagttttttttctcagacatcgaagttttctaatgctcaacttcgtaaaatgtctcatttttactgtaaatagtttctttactgttgtgagatgtgaactttgcgattctgtgaagaggactgaattctgaaatgccccctgcatttcccgcccctcagagagtcgccctgtgtctgcccctcccttgggtgtgggcggaagcacgaattgatgtgcccgcccgacttcctcattagattggggggtatcctgaaccaacggctgctaagggctgggtctaatgcagtcatctgagccctttataagggaggactgaacccccctgtgattacgctcccctgtgggagattccccagcactggctgtgcacacccagggagcctcacggcccagacctgggcagcacgggtaggagctgagagcatcctcacggcagcaggcagaacaaacaagtgggcctggggctcacaaccctgaggcattgttgaattctgccaccaactcgaatcggatcgaagccagacccttctcaggtggaggcaacgaccgcacagccagacccatcctggaggtccctcgtgggactctgagcaggaggcagtcacttggcctagcagaacttstgacctgtgagctggtgtttgttttaaatacccaaaattggtgagaattcgttctgcattgacctaaaactaacatactctccttccacaagtttcttcacactgtggaagcgagaaaattcagtgtgtgtgtttgtgtgtgggaaggggcggccgggagccgtgtccggttacggcgaaactggctcagcagaaacacagcagctaaaatctttgaaaggttctcatcgcagatccacaatcaaaccaccccagccggaac

SEQ ID NO: 17036 - DNA, 1770 bp, Homo sapiens
aaacccgagatttattacggaatcagcgtgaaccttcccagcacagctcacagagcatacgccaaaaattacagtgtgattcagtttcaaaaattgtctgtagtgacctgtgagttcacagctcgtgaggacattctttagttcggctgaagccaaaaaacctggaaccatcgaaatgggaagaagtggagtctgccaaattctgcctcttacactttcagctaccacgccatgttcaactattgtacttgataaggattggaaacttaaggtgctgataatttcaatagagtttcaccagagtagtatttcttgtgagaaagccataatctcatcagtaacgcctttctaaaagatccaacagaaaatatgaactagcaactcatcctgacaaggaagtaaaactcaggaaaaatcctaaggcagagcagcttcaggcttcagtgtgaaactatcatagtctgggcgcggtggctcacgcctatagtcccttcactttgggaagccaaggtggggcagatcacctgaagtcagcagttcaagaccagcctgggcaaaatggcgagacctcgtctctacttgagcaaatacaaaaatttgcccggcgtggtagcgcgcacatttagtcccagccactctggaggctgaggcaggagaatccgttgagcctaggatgccgaggctgcagtgggctgagatgaggccgctgtaatccagcctgggggacagagcgaggcactgtctcagaaataaacaaataaaataaaataaactaaaataaagtgacgtaaaataaaattgaaataatattttcacgtttccctcacccagcccattttattttcagagtatttgataaaccgctttcttccctgtgcgttagagagttttttttctcagacatcgaagttttctaatgctcaacttcgtaaaatgtctcatttttactgtaaatagtttctttactgttgtgagatgtgaactttgcgattctgtgaagaggactgaattctgaaatgccccctgcatttcccgcccctcagagagtcgccctgtgtctgcccctcccttgggtgtgggcggaagcacgaattgatgtgcccgcccgacttcctcattagattggggggtatcctgaaccaacggctgctaagggctgggtctaatgcagtcatctgagccctttataagggaggactgaacccccctgtgattacgctcccctgtgggagattccccagcactggctgtgcacacccagggagcctcacggcccagacctgggcagcacgggtaggagctgagagcatcctcacggcagcaggcagaacaaacaagtgggcctggggctcacaaccctgaggcattgttgaattctgccaccaactcgaatcggatcgaagccagacccttctcaggtggaggcaacgaccgcacagccagacccatcctggaggtccctcgtgggactctgagcaggaggcagtcacttggcctagcagaacttctgacctgtgagctggtgtttgttttaaatacccmaaattggtgagaattcgttctgcattgacctaaaactaacatactctccttccacaagtttcttcacactgtggaagcgagaaaattcagtgtgtgtgtttgtgtgtgggaaggggcggccgggagccgtgtccggttacggcgaaactggctcagcagaaacacagcagctaaaatctttgaaaggttctcatcgcagatccacaatcaaaccaccccagccggaac

SEQ ID NO: 17037 - DNA, 1770 bp, Homo sapiens
aaacccgagatttattacggaatcagcgtgaaccttcccagcacagctcacagagcatacgccaaaaattacagtgtgattcagtttcaaaaattgtctgtagtgacctgtgagttcacagctcgtgaggacattctttagttcggctgaagccaaaaaacctggaaccatcgaaatgggaagaagtggagtctgccaaattctgcctcttacactttcagctaccacgccatgttcaactattgtacttgataaggattggaaacttaaggtgctgataatttcaatagagtttcaccagagtagtatttcttgtgagaaagccataatctcatcagtaacgcctttctaaaagatccaacagaaaatatgaactagcaactcatcctgacaaggaagtaaaactcaggaaaaatcctaaggcagagcagcttcaggcttcagtgtgaaactatcatagtctgggcgcggtggctcacgcctatagtcccttcactttgggaagccaaggtggggcagatcacctgaagtcagcagttcaagaccagcctgggcaaaatggcgagacctcgtctctacttgagcaaatacaaaaatttgcccggcgtggtagcgcgcacatttagtcccagccactctggaggctgaggcaggagaatccgttgagcctaggatgccgaggctgcagtgggctgagatgaggccgctgtaatccagcctgggggacagagcgaggcactgtctcagaaataaacaaataaaataaaataaactaaaataaagtgacgtaaaataaaattgaaataatattttcacgtttccctcacccagcccattttattttcagagtatttgataaaccgctttcttccctgtgcgttagagagttttttttctcagacatcgaagttttctaatgctcaacttcgtaaaatgtctcatttttactgtaaatagtttctttactgttgtgagatgtgaactttgcgattctgtgaagaggactgaattctgaaatgccccctgcatttcccgcccctcagagagtcgccctgtgtctgcccctcccttgggtgtgggcggaagcacgaattgatgtgcccgcccgacttcctcattagattggggggtatcctgaaccaacggctgctaagggctgggtctaatgcagtcatctgagccctttataagggaggactgaacccccctgtgattacgctcccctgtgggagattccccagcactggctgtgcacacccagggagcctcacggcccagacctgggcagcacgggtaggagctgagagcatcctcacggcagcaggcagaacaaacaagtgggcctggggctcacaaccctgaggcattgttgaattctgccaccaactcgaatcggatcgaagccagacccttctcaggtggaggcaacgaccgcacagccagacccatcctggaggtccctcgtgggactctgagcaggaggcagtcacttggcctagcagaacttctgacctgtgagctggtgtttgttttaaatacccaaaattggtgagaattcgttctgcattgacctaaaactaacatactctccttccacaagtttcttcacactgtggaagcgagaaaattcagtgtgtgtgtttgtgtgtgggaaggggcggccgggagccgtgtccggttacggcgaaactggctcagcagaaacacagcagctaaaatctttgaaaggttctcatcgcagatccacartcaaaccaccccagccggaac

SEQ ID NO: 17038 - DNA, 461 bp, Homo sapiens
  misc_feature (1)...(461): n = A,T,C or G
tgggactttacttcttcaaactatcattgccattcttcttgtatgaatgttaatgaaaaatcacttgatattgctatagaataaagtatatttcaccaattcagtaaataaaaattgaattttacgtcctaaaagctatacttttatgtacatattaaagtataaatggttatgtttaaagttactgacttgtctcatttaaaatgtgattttaaragaaactctttcttccttatctcaaagagaatttttggccaagcaaggtggctcacgcctcccagaactctgggaggccgaggcaggtggatcacaaggtcaagagatcgagaccatcctggccaacatggtgaaancctgtctctactaaaaatacaaaaattagctgggcgtggtggtgcacgcctgtagtcccagctacttgggaggctgagcaggacattggttgaacctgggatgcgaag

SEQ ID NO: 17039 - DNA, 576 bp, Homo sapiens
aggaaaacttgagcgtaatattggtctgtcttatctgttccagtttctcaaatactttttatttttacagaaagggtcttgctctgtcacctaagctggagtgcagtggcatgatcatagctcactgtggcctcaaactcctgrgctcaagccacactcttgcctcagcctgcaaagagctgggattacaagtgtgagccactgtgcccggcatagtttctgaaatgcttttagaaatgctacttatagcagcattagctgtaaaaaaggccctgtatgtgagtcctgccatgggaggcttgggcaaatactggggaaacaggaagtttatctttggccctttcaggattaaaaaaaagaaaaatttgagtgtaatatttgatacatacaaaagaatgtgttgttaaatataatagaataaacactctgcttaagaacaagaacattatcaatatgaggatttacttccttttgggatcttatgcgaatttctgaaaaggtctgggttctagctgcctagcattaacataaaaggtttgagaaatatacattcaataagctgctatctgataatgg

SEQ ID NO: 17040 - DNA, 576 bp, Homo sapiens
aggaaaacttgagcgtaatattggtctgtcttatctgttccagtttctcaaatactttttatttttacagaaagggtcttgctctgtcacctaagctggagtgcagtggcatgatcatagctcactgtggcctcaaactcctgagctcaagccacactcttgcctcagcctgcaaagagctgggattacaagtgtgagccactgtgcccggcatagtttctgaaatgcttttagaaatgctacttatagcagcattagctgtaaaaaaggccctgtatgtgagtcctgccatgggaggcttgggcaaatactggggaaacaggaagtttatctttggccctttcaggattaaaaaaaagaaaaatttkagtgtaatatttgatacatacaaaagaatgtgttgttaaatataatagaataaacactctgcttaagaacaagaacattatcaatatgaggatttacttccttttgggatcttatgcgaatttctgaaaaggtctgggttctagctgcctagcattaacataaaaggtttgagaaatatacattcaataagctgctatctgataatgg

SEQ ID NO: 17041 - DNA, 618 bp, Homo sapiens
caaggaggcaggataatatgatctataactggaataaaaataaatcaataaaaacaaactcataaataaatgataaaagtaacagaaaagaatattgacataattattagaaatatgttccacatgacaagaatataaaggaaattacaaacatgatgagaaaagataatataaaaaaacagacaaaaatagaattcctaaagaaaaaaatccaaaattagacactggagcatattggacactacaaaaggaaaaacaagtgaattagaaggcaaagaaataaaatctataaaaattaagcacaaagtaaaacgaaaatcatcagttacctgtgggaaatattaagcagtcaaatacggtataagtagagaccaaaaatgaaaagtaggagtaacgagaaaaaaattcaagaaatagtggctgaaaattttccgtatttgacgaaaactataagctcacagttctaagaagctcaacaaataaaagcagaataaatataatcataycaaagcacctccaattgttctactgtgaaaaactttaaagtagccagaataaaaggatgcctgatacacagagaaataaagttaagaatggcagttgacttctcatcagaaa

SEQ ID NO: 17042 - DNA, 1554 bp, Homo sapiens
tctggaggctggacgtccaacacccaggcgtggcaggtcatgctcctctgaggctcagagtggagtcygggctcacttttcccagttctggggcgagggggtgtgggagtggggtgggcaacctctggtatttcttgccttgtagccgcctcactccaatctttgtctctgttgtcacatggcctctttctccctgtgtctgtctctgtgtctctcctcatcttcttataaagacatcagttacactgtagtagtgtccaccctctatcctcagtatgacctaatctcgactccattgcatcagccaggagcctatttccaggtgaggtcacacattcacaggacacagtgggtagcacttggatttatcatttaatggggactaattcaaccaataaccttgcctgatccaggaaaacaaacataaatatgcattgttgagcacatattcaatgtgtttctcttctgttctctcttcacttctgaataaatcagcagcccaggtttctttcttctcctacctatatctttccatgcatctttaacttggaaattaaaatacttttcccatctgcaataatcacatccatttcattcttgagagaaagcgcaagggaatttttgcagccagtggtgcttttctgccttctccaccaccatgacaaaggccaggtctctgatctcagcatcattcctccaatcaggcctcctcctccccttattctggaaataggactgcacaaaacaaggggtgaggtgggtgtgtcttatgagagtacctcctggactagtcaattcattttgttttcttctaccttggctcatctgagcccatcactttgctccttacatggtagagggaaaaacatctggagaggagttcaaacgggagcactgctgggaaggaaaaatgatgccttaactctgctgcgaaataacccctgtccctgtcatggatcctgctctcggccaagctctgacacacagctccgaggatggatgactcggcagctgcaacacacgtcggcttgtctggctgcagacaagaggcatgtttgatttgtgtgtttgctgaagctcagtaacaggcagaatcttttctctacccttggaatagacacagaagaatccactaacttacggaaagagaaaatccaccctgttaacaaatttaggttttccccacagccctcccatttctctggcctctgaggtgctatttggaaagacttatagattagcatctgggaagctttccaaactgcttgtaaaatgaatagaaagaaggaaaagataacaagccatattaggctgttttcatctctttaaccacaacactgtggtgagctgagatcaagtcatgttttctagggtttcttgtagaagattagatttctagtttgtacatctgctcgggtctaatcgctcacctgtttccactcctggctgtgtacagcagaagctctaattcatttgtctgcaataacagggggtgagtgtgcatgatgggagtgtgtccccagcctcaatatattcctgcttcttggacagaga

SEQ ID NO: 17043 - DNA, 1554 bp, Homo sapiens
tctggaggctggacgtccaacacccaggcgtggcaggtcatgctcctctgaggctcagagtggagtctgggctcacttttcccagttctggggcgagggggtgtgggagtggggtgggcaacctctggtatttcttgccttgtagccgcctcactccaatctttgtctctgttgtcacatggcctctttctccctgtgtctgtctctgtgtctctcctcatcttcttataaagacatcagttacactgtagtagtgtccaccctctatcctcagtatgacctaatctcgactccattgcatcagccaggagcctatttccaggtgaggtcacacattcacaggacacagtgggtagcacttggatttatcatttaatggggactaattcaaccmataaccttgcctgatccaggaaaacaaacataaatatgcattgttgagcacatattcaatgtgtttctcttctgttctctcttcacttctgaataaatcagcagcccaggtttctttcttctcctacctatatctttccatgcatctttaacttggaaattaaaatacttttcccatctgcaataatcacatccatttcattcttgagagaaagcgcaagggaatttttgcagccagtggtgcttttctgccttctccaccaccatgacaaaggccaggtctctgatctcagcatcattcctccaatcaggcctcctcctccccttattctggaaataggactgcacaaaacaaggggtgaggtgggtgtgtcttatgagagtacctcctggactagtcaattcattttgttttcttctaccttggctcatctgagcccatcactttgctccttacatggtagagggaaaaacatctggagaggagttcaaacgggagcactgctgggaaggaaaaatgatgccttaactctgctgcgaaataacccctgtccctgtcatggatcctgctctcggccaagctctgacacacagctccgaggatggatgactcggcagctgcaacacacgtcggcttgtctggctgcagacaagaggcatgtttgatttgtgtgtttgctgaagctcagtaacaggcagaatcttttctctacccttggaatagacacagaagaatccactaacttacggaaagagaaaatccaccctgttaacaaatttaggttttccccacagccctcccatttctctggcctctgaggtgctatttggaaagacttatagattagcatctgggaagctttccaaactgcttgtaaaatgaatagaaagaaggaaaagataacaagccatattaggctgttttcatctctttaaccacaacactgtggtgagctgagatcaagtcatgttttctagggtttcttgtagaagattagatttctagtttgtacatctgctcgggtctaatcgctcacctgtttccactcctggctgtgtacagcagaagctctaattcatttgtctgcaataacagggggtgagtgtgcatgatgggagtgtgtccccagcctcaatatattcctgcttcttggacagaga

SEQ ID NO: 17044 - DNA, 559 bp, Homo sapiens
gttttcaagtattttgcctaagtttatttctgactggctcatcttttgacccaaagtgagaaagaaaaaacctttttatacgaggaacatgagccctttaagttatcaggctcagaaaggcgtctataatataatagcagtgtcctctcactcccccttgagctaaataaatagttacctcaaagccacctgctatggatgagagccatctacatagcacatggggactcactgccaacccccaacccctcacaagttggggtaccagcaaggctagcttagaattaattaggcagaagctagaatcgttttggaagccacaggcagccagttcccacattcacaccaaaatgggattttccaatcrccaccagcatgggacattttagaaaagcagtgaaacagacaaagccacagcttcagcgctcacagaacctggaggaggtggggcgaggacccagtagaggcggggcagcctgatggcgccagctcatctgacccacccacctggctcctccagacacccattccacctggcatttgaatgtcaaccatccgt

SEQ ID NO: 17045 - DNA, 314 bp, Homo sapiens
ttttatttgcaaatgcaggttgccaggtgacaggaaccttttatgcttgtgccccacctgagtcccaggctcccggagtccccacagagccaagcataaggtctgccgaagccttggcgttctcaggtgagtgcagggtttgctcctggaggcaccgcaggaggccagcctctgctgccagctctgtcatctttgggcagattcgatgggactttagacacttgctttgctccctctggggtctggagtagatgtagacacatcctgtgwgtgaggtgaccagggtgatttaggagcaccattagaaaacctga

SEQ ID NO: 17046 - DNA, 545 bp, Homo sapiens
tttttttttcttaaagtagcatattttaattaacagatgcacatagtaaattaactttctgatgcaacagtcttattataatgcatttcatacttctttctccctaagtagctattaagtttccaagttttctggggaaagctatgaagctctaggctttgtcttgttcaagtaaaaggttaaatttttcattaaggtctgttgattcccatgcgatccttctcamcttgcttaattctgataccaatcttttcttaattttaggcatacagagccaacagtaattatttttaagttactttcaattagttttcagttgtaattttgtcacctttgtttttaatcatgtaggcattggggcatgtcggtctgatctggagaaaaaaaattctctaggatcaaagacaggacagtcacttgatttctctggcatatgagaagtgctgttcctcaagccaaacatttaattgttgggattttatgttggagcaagtaaagatcttaagcttacttcatctgtttaaagagatttaagacaactgccc

SEQ ID NO: 17047 - DNA, 1684 bp, Homo sapiens
cttcacttttttctctctctacattctctttcctagatcaacttagccatctatgactttaaatatcatctatatgatatttcctaaatttagatctccagttcttaccttgcctctgaattccaaatttgtatttcccattattttgtatatttccattttagtgtcataggccttcttaatctcaaactgaaatctgcattccctcctctccccggctgctcaaacctgttccacaccttgtcttcccccttttagtaatggcaacactatcccctttagatgctcaaaccagataattcgaattcatctttcatttttttttcccctcgcaacctccatattttatatacaccacactttatttaatcatcactgtcactattttgaaccatcgcttatctcacctattttaaaaatcccaactggtgcaccaccatttctactccaaccaattttcaacatggcagagtaatctgaaaatcgacagcatcatcactttaaagtcctgtaatggcattcattgactgcctccttccactgcactatgttccattctatctttctctctgtctctcttatgccatcaacaacaatcctatggagccaggatctccctctgtcaccctggtcggagtgcagtggcacaatcctagcttccggcagccttgaactcctgggctcaagcgttcttcccatctcagcctcctaagtagataggactacagatgcattccaccatgcccagctaatttttaattttttgcagatatggggtctcgctatgttgccaaggtttgtgctgaacccttgtcctcaagcaatcctccacctcagcttccctaagtgctgggattacaggtgtgaactactatgcctggcactaaaatatatttaataaaaagtataaaaacaaaacacaagaattaacaaatgttgaggaatttgaaaacaaattatatttgatattaaaaccataccaaaaaaaggggaacttttttgatgatttagaaggtatatctgtatcacaaagcatctcagtgcatcatattgatttttaggcatccatggcagctatacaatgtaggatctttgggttcgatctcacttgcccctctagaatattctacatttaaaaaatatcttgtgtaagatcatttagattgatttttacttttacataagttgaaaaagcaatgtcagctgtttgaccaaacttgactaaattttgagaaagtaagggaaataataatactgagtagttttcagactcataagcactggggcagtgctcctggaaagacaactgggaaatacaagacgtggttctaactgttctcaaactgatgtctcatcctaagattgatcgtgatgctcttgaaaaacaccctatgaccccaacasagcccacggatacattcatttattggcttgtacaactactaaaagttacttccaatatggtgacccatgcttcaggcatgataaccacaaaataaaatgaaaaaaagaaggaaggaagatggtgtttagcctctgggtgattcagagaaactgtatctggcagcagcacgttgtgaaaacaacttttatcaccatcaaaactggactccaggggagatctgatatactcaccattatttgggctctcagatgttcaaaagttgaagcacggtagactgct

SEQ ID NO: 17048 - DNA, 553 bp, Homo sapiens
ctaaaaaatacagggctgaaaaaggacagtgtgtctgcctagaaatttctctgtctacagattgaccagatttttaatccctatcaacttaaaattatattttttaccttcctcgcatggagtggaattctaatttacctgaaatgtgtaaaatatatactttcaactttactttttttttggatttgttaacaaatgtaaatgtggttatggaacacattaaaatccatgtaataagctactttgaaaatattgaatatttgtcttttaaaraagctaaggatgaattaagcatacctctgggaattaaggaaaattcagtaaaatagaagaattgtgttatgtacctgaatgaagatcggaaggtgaaaaagagacaatgagtggccataaaagttcaagggaggaagagatattttgttggtccatttctcaatgaagatggtattattaatagcatcatgggcaacataatactatgtttagaatcctgggcacctggccacccacaatcttgtaacagcttaaaaagtaaaaatatccacacatatcc

SEQ ID NO: 17049 - DNA, 553 bp, Homo sapiens
ctaaaaaatacagggctgaaaaaggacagtgtgtctgcctagaaatttctctgtctacagattgaccagatttttaatccctatcaacttaaaattatattttttaccttcctcgcatggagtggaattctaatttacctgaaatgtgtaaaatatatactttcaactttactttttttttggatttgttaacaaatgtaaatgtggttatggaacacattaaaatccatgtaataagctactttgaaaatattgaatatttgtcttttaaaaaagctaaggatgaattaagcatacctctgggaattaaggaaaattcagtaaaatagaagaattgtgttatgtacctgaatgaagatcggaaggtgaaaaagagacaatgagtggccataaaagttyaagggaggaagagatattttgttggtccatttctcaatgaagatggtattattaatagcatcatgggcaacataatactatgtttagaatcctgggcacctggccacccacaatcttgtaacagcttaaaaagtaaaaatatccacacatatcc

SEQ ID NO: 17050 - DNA, 548 bp, Homo sapiens
tgagaatctatctacactgttttagatgggtggattggccttagtttctgtatttcatcatttttgttgctcttttggtcttcgattactgatttgactgtggacattgaatcatgcactaactagatttcaaattggtgccctagattctgctaacccacaatctcaccttgtccatgacctgaattctgtttctgctatacatttgtacttgaaatagcttccggtcctctaatgcctttgtcttgtcctcctttttttacttgattaactcacagttcagaggccttacgttgctacacagccgagatatgacatcttctttcttttacaaattgtcacgtgttcctattcaatgtatggtctggtaccttctgattctaaagttcttagctgcattttagtggcattaaatgttttagttgcatttacacattaaactaatcaatagaatgtctggcaaatagtttttaataaaaactgctttattgacttgctttgaagtcaaatggtyctgccatttaatattgtgatgaaccttgggaaag

SEQ ID NO: 17051 - DNA, 581 bp, Homo sapiens
atgagtgaggctccgtgggcgtgggaccctctgagccaggcatgggatataatctcctggggtgccatttgctcagctggaaatgcagaaatcacccatcttctgtgtcgctcacgctgggagctgtagactggagctgttcctattcagccatcttggaaccgccccaggtcatagaagttttaagagagaaagtaggaacacatraggcctgtggagggctatattcagaatttgcacattacttctccatgttctattgatcaaagtggccacaaagcaagccagattaaaagtgtactgacatagactccacctcttgacagaaggaaatgcaaatttgcatttgcaaagggaaatagatactaggagaagaataattgcagccattttgcaaacactctcccacaggtaagtttaactaaatacatgcaaaaatcaggatcatttaatgtatcatgaattaaccataaacagtagaaggatccaagttgacaagtatttgtggatgaaactcatgacttattcttcacttagattcaagtaagtgactactctggtgatagttattttgataggca

SEQ ID NO: 17052 - DNA, 578 bp, Homo sapiens
gttccccacagggggccccagagcagaaaacctaggacaagggcctctggtgccactcctcttgccttcctgccatctctttattcatcctccaaacactcaccaaaggaaactctgggccaggcctggatgggctctggggaccctggtgtgaatcagatgtggtccttgcccacaaggaactgacatatagcaagatgctcttctagaaacccaacctgtatttttaaattctcctcctctttccttgagtgaaaagcaccagaaatattgtcttggaatctagatttcacccctggaataatgggtaactgagaatccsttgatcagtccccctaagtttggcaaagtttctcgaggtcactgaaggaagccaggctaactgttcagggacagggagcccaggcagatgctctgtgttctgggaaaaaaaaaaaaaaaaaagctgcctgacctgtggtggaggaatatctcaaggagagatgaaggacatagttctgtcaccatgacattgacacaagaaatggctctggtatggtgctcccagatgctagaataggtgatggcagagtatggga

SEQ ID NO: 17053 - DNA, 501 bp, Homo sapiens
aggcagaaagagacatcacttcaaagtaatatgggctatgatataggtagagaagcatgcccgggatctccttgagagggggtacttagcctagactggggagagagaggaggagaagcaagcagttcagggaggcttaagatgcttgaggccgggcacggtggctcatgcctgtaatctctagcactttgggaggccaaggcaggtgggtcacaaggtcaggggttcgagatcagcctgatcaacatggtgaaaccccctctctactaaaaatacaaaaataagccaggtgyggggccgggcgtggtggctcacacctgtaatcccagcattttgggaggccgagctgggcagatcacgaggtcaggagatcgagaccatcctggctaacacggtgaaaccctgcctctactaaaaatacaaaaaattagccaggcatggtggcgggcacctgtagtgccagctactcgggaggctgaggaaggagaatggcatgaacca

SEQ ID NO: 17054 - DNA, 566 bp, Homo sapiens
ccaggaggctacagaaacaggagaagaaaacaggaaaggacatcatcacatactgtaactccaaaatatttatttactcagacaggcctcctctcttatcctacagaccagaagggaagttcctcctccctttggaaaacaagactccagagtgggaagaaacccatggccttggcacaaagctctgcaagacgtaaatgtactctgtgtagaaggccttacacactgaaggctgcccataaagggtgaatgaatgaatgaatgagagacagagaatttgtgtgtgtatgtgtgtgtgcctctctgtgtgtgtgtgtgtgtgtgtgtgacagagagatagagattgagactggcaagtattctctaaatagatcataggtcataaacttccagcttgtagacaagttggatttccctagagaactataataataatgttagaaactgcaaatatttgttctttttatgtgcaaggcagttataaatgctatacatgcaytaattgatttcactggcacagttttttgatgttgattcttttattaccttcattttgtaaatgagaa

SEQ ID NO: 17055 - DNA, 546 bp, Homo sapiens
agagattgaaaaagaagagcaggctgctgctgaaaaggtaatgaccaaggaggaatttcagggtgaatggactgctccagctcctgagttcactgctactcagcttgaggttgcagactggtctgaaggtgtgcgggtgccctctgtgcctattcagcagttccctgttgaagactggagcrctcagcctgccacggaagactggtctgcagctcccactgctcaggccactgaacgggtaggagcaaccactgaatggtcttaagctgttcttgcatgggctcttaagcaacatggaaaaatggttgatggaaaataaacatcagtttcttaaaaaaaaacccaaacacctcatgttctcactcgtaagtgggagctaaacaattagaacacatggacacagggaagggaacatcacacaccagggcctgtcggggggtggggggcaaggggaaggagagcattaggagaaatatctaatgcatgcggggcttaaaacctagatgacggattgatggatgcagcaaaccgccatggcacatgtat

SEQ ID NO: 17056 - DNA, 380 bp, Homo sapiens
cttactactagtaggatacatattttatgctatttttccaatggtcatgatatatttgcacagtacaacgtatggtcttctgtaatcatccttttaacaaccaacactattttgtaacaatggatctatataagagtgcagtggtttgtagagttttatcaaactcaattttattatattcattctttattaactaggcaattcactctctgatcattaaatacacacacacacacacacacacacacacacacacacacgaataccccctcaaaaacatacaaaaaacaccygagcataagtaacccaagttacttatgagtggattttaaatgtggtatatgcatagaatggaatactattctgctttaaaaagaaac

SEQ ID NO: 17057 - DNA, 492 bp, Homo sapiens
gcgtgcgcgcgcgcrcacacacacacacacaaacttgtgatgataaaatgagttcctgccattaacttttaaaaacatctttaaaactttgtttacagaccaggcatggtagctcacgcctgtaacctcaacactttgggaggcctaggtaggaggataactagaagccaggagtttaagaccagcctgagcaacatagtgagactcttgtgtctacaaaaaattttaaaaattcgtgggccatgatgtcacatgcctgtaactcctatctacttgggagactagggcagaaggatggcttgaactcaggagttcaaggctgcagtgagctatgatcacgccactgcgctccactctgagtgataaagtgagaccttgtctcaaaaacaaaaaaaaacaaaaaacaaaaatcaaaaaacaaccaaactttttgttgttgaggtgaaaagctttgcttacctcaactttatcaaaatactttttaacatttca

SEQ ID NO: 17058 - DNA, 632 bp, Homo sapiens
tcgacactttttattgaaagacgtggaatgtatgtctcctcargttgaatctgggtgggcttctgactatcttttgactaatgaagtatgacagaagtaatgatctgtggcttctgaggccaggtctgaattgattatgcctctcctgcctgataattctcttggaacttgccgactgtattcctcattttgagatgctccctataagaacccagccattatgctggaagaagcccaagccacatggaaggtcttgtttaggtgcttaagtcaacagtcacagctgagcccagcctttgagtgaggttatcccaggtgccagaatgtgagtacagaaacctccagatgcctccagttctcagcccccaggtattcttcctttcatctgaaggtcatggacatcatggagcagagagaaaccatccccagtttccctttctgatacctaacccacagaatctgtgagcataaacaaaatgattctgattttataacagtaaacttgaggtagcttgttatctggcaataagcaaccagaacagaacagctacaataaaaacagtttaaagagcttgtacttctaagtatgaaaaagttaacatgatgaacactgctttcactgcctactctgg

SEQ ID NO: 17059 - DNA, 632 bp, Homo sapiens
tcgacactttttattgaaagacgtggaatgtatgtctcctcaagttgaatctgggtgggcttctgactatcttttgactaatgaagtatgacagaagtaatgatctgtggcttctgaggccaggtctgaattgattatgcctctcctgcctgataattctcttggaacttgccgactgtattcctcattttgagatgctccctataagaacccagccattatgctggaagaagcccaagccacatggaaggtcttgtttaggtgcttaagtcaacagtcacagctgagcccagcctttgagtgaggttatcccaggtgccagaatgtgagtacagaaacctccagatgcctccagttctcagcccccaggtattcttcctttcatctgaaggtcatggacatcatggagcagagagaaaccatccccagtttccctttctgatacctaacccacagaatctgtgagcataaayaaaatgattctgattttataacagtaaacttgaggtagcttgttatctggcaataagcaaccagaacagaacagctacaataaaaacagtttaaagagcttgtacttctaagtatgaaaaagttaacatgatgaacactgctttcactgcctactctgg

SEQ ID NO: 17060 - DNA, 494 bp, Homo sapiens
gaaggtccagctgttacaaaatgaagacagacaacacaacatttactctgtggagatatcctactcatactatgcacgtgctgtgattttgaacataactcgtcccaaaaacttgtcacgatcatcctgactttttaggttggctgatccatcaatcttgcactcaactgttacttctttccccagtgttgttaggagcaaagctgacctgaacagcaaccaatggctgtagatacccaacctggcaataaaaggaaaatatattaattcaaactctatggaaacttaatacttctctctaccaggaattggcttattctgtaaattttctttttgagastgttgcccaggctgcagtgcagtggtgcaattatggctcattgaagcctcaaccaatcctcccacctcagtttcctaagtagctgggactataggcacatgccgccacagcccactaatttttaaatttttttgtagagacagggtctccctgc

SEQ ID NO: 17061 - DNA, 525 bp, Homo sapiens
caaagccccatctctattaaaaatacaaaaattagccaggcatggtgatacatgcctgtaatcccagctactagagagactgaggcaggagaatcacttgaacccaggaggcggaggttgcagtgagctgagatcrtgccactgcactccagcctgagtgactgtctcaaaaaaaacaaaaaaaaacaaaaaaacaaaaaagttactgaatgaatgagtatagtctctgtcagctgccactttacaaaataagtggtagatacattaaaagtaattcctaaaaagaaattctataagcccaaacacatactcagaaaatgtaatctgccaaaatgagctatgatttaattgaatcaaaatctttttgcaattactatacaaaaaaatgaaactatatgatttagattggaaactctggtatccaaacaagaggccattcccacgtaggaaaaaagtaaactaaatgactatgctaattttagaaccgtcttatgaacctttttctttgagacagctgggaaaaaa

SEQ ID NO: 17062 - DNA, 526 bp, Homo sapiens
ggcctttggagcctggcaggtagggattctcttcactttctcctccttcccctggattgaggtgggtgacacaggaggccagccagctcaggaccagatcccctctctctagctggagcaatagccagccctcctgacggagctcacatatatctaaaacatcgtcttgtagatcttaatgatttytcaacagcccctgattgaagcatgcccaatttagcaatgccgtaagtaactttttatatttccttagggaatcatttcacttatgaatcttttctgaatctgcaatctcgattaaaagttgatgttgttttttctcgtctcctcggcttctgagatgcctccctagtgaaaagggtggtagcaccatcaatcctcctcattagtctgtctggagaatttttcttgagggtggggtgggggacagcaaccaagtctcctctgtcgtggcacctagcggggtgtgacctgggggagggttgccctcggggaggggctcggagaggtggggggggcattgacc

SEQ ID NO: 17063 - DNA, 648 bp, Homo sapiens
tgaagtattattatagtccctgttttaaagtcttagagaggttaagtaatatgccttcaagttatagaaccaggtctgtttgatgcctaaacctgtgctcttaaacagcatgctatatttttccttttatgctgagtgccagatatatggctagtgtctcaaatacattatttttaattcttattattccacattcacagatgcagaagctggaattcaagcaatctgtagataccttaatcaagatcacaatggcaggaagtgatctgtggtctgaaccaatgaatttttttattttcactttttagtacgtcaaaatttaaacacaacaaagatgatttctcaaaaataataatggtctataaaataatctaattatttaattttattttttaaatggtactactaaaccctratgtcaagaacatgataaaatgactaaggtccacatttcctgctggtgctaaatacatcatcataattttatagatttggcaaagattcttaaagtgattgagttcaaagatgctgatattagaaatgaagaaactgaggttcagtaaaactgtgcctttagtaaagcacccagctagctagaggctatatgtactagttctggttctggcagcaacccttagtgtaatagat

SEQ ID NO: 17064 - DNA, 648 bp, Homo sapiens
tgaagtattattatagtccctgttttaaagtcttagagaggttaagtaatatgccttcaagttatagaaccaggtctgtttgatgcctaaacctgtgctcttaaacagcatgctatatttttccttttatgctgagtgccagatatatggctagtgtctcaaatacattatttttaattcttattattccacattcacagatgcagaagctggaattcaagcaatctgtagataccttaatcaagatcacaatggcaggaagtgatctgtggtctgaaccaatgaatttttttattttcactttttagtacgtcaaaatttaaacacaacaaagatgatttctcaaaaataataatggtctataaaataatctaattatttaattttattttttaaatggtactactaaaccctgatgtcaagaacatgataaaatgactaaggtccacatttcctgctggtgctaaatacatcatcataattttatagatttgrcaaagattcttaaagtgattgagttcaaagatgctgatattagaaatgaagaaactgaggttcagtaaaactgtgcctttagtaaagcacccagctagctagaggctatatgtactagttctggttctggcagcaacccttagtgtaatagat

SEQ ID NO: 17065 - DNA, 531 bp, Homo sapiens
tccctaaaacatgctcctccttcataattcagtgctacacatactgtttggggtatctctttaagggtggtagcaggcagctagcaatggtcacttttacctggccaggctgggagtgctccatgaaggaggtgattctcaagcttgaagttgaggaagcattcataggcagacaagtgggacaaaagtgtaatctcagcagagggaacagactagattaaaatatggaaggcaagaaaccattgggataaaagtagtgatgacatttgttaaaatawggacaacagactgaggaggaatttttgagagaaagatgaactctgcttagaatctgttgagtttaatttatctgggacttcaagatggagagaagaataggcaattggatatgtggggaaggatatggactagttatctaaaaggtagagaaggacatgtagatctaaaagttaccagcacaatttcccagggaaaaattttagagtaataaaaaaagaaacaccaacatttaaaaagcaggcaccagtaatg

SEQ ID NO: 17066 - DNA, 540 bp, Homo sapiens
ctcattttgctttcttgggctctgatcctctctcgtattttcatgtttcctatttgtatttgttaggggcttttctctcctttacaaaattgggtagtcatgcttctccagtaaccttggtgagtcagttcaacctctaattacttcagtctccttgcctgcaagaaaagcagtcaaactacacgaacactctattgttttgcatyatttcacacgtacacagggataaggagggaaataattctcccaatgaagcagaaccaccggtaacagctggcacaacttctaaagacccagtctgtcttgaaaaacagccgcaaattgtccctaaataataattaccccacctgtatcaggactatctcactgactagctgcacttcatgacacaatacctgctattaactctcagcatggatataaacattgccataatattttttaaaaccaacaatgtatcatttgcacattaggacaacagaatgttagttaaggcacagaaaacacaaaggcatggctaccctgttctttggtgactcc

SEQ ID NO: 17067 - DNA, 1013 bp, Homo sapiens
atccacattccaatctgatatccatcctacactagtacaccatccgtcaggatgagggtggtggcattcaacaaagctaacttgtgttaatcacaactcatggcaagtaaatcctctctctattcctgagcactgaaagtgagaaatcagatgagatgaaatagagagaaaccccatggcctcttttggatgaagcagagagatttagtgtggtctctttcctcctgacttcccaacttgtaaatcagttgttgattgggacttcttctcttgtggcccttgatgctctgaggtacaagctacagtttggtgattaaagcttgagtgtatttctttattagcataatccattagcagaaccttaactacatgtgaacctggtgcttttgctataaatcctagagtatctagaacacaaaaataaggatagcgaggcataaaaatgaaaagaatgggaaaaatggaagaatatgaggagggaaatatggattaattgaaaatacagagaaaaaagcttgacaatatcatgatggtttgcataaggaataagtattgaatttatggtcttaaaatcgctatttaaaaccctgcttgctgtttgatgttctcatttttctggaaattcatttaattacgcaaatctggtccgagtatttaccttcccaaattcttaaacaagtaaaacagatgaattactttgagctatgtggactcaaggagtatgtacaatatgctcacaaaaaattgaggtaagtactagcttatraaataccatcatctcacctttgcagtgagaacttctggcagacataataattactattgtggagatacttcataattgcaaccatttgagggttactttttgccaccaaacctactaggcgttttattagaattatgtcatttaatcttcaccacagctatatgggtgaaataattattctttcaattttacaggtaagaaagctaagccttagagagtccaaaatcatattagttaacagagctgg

SEQ ID NO: 17068 - DNA, 559 bp, Homo sapiens
gactcaaaagaaaaaaaaaagtaaaattataaaaacacatgtagctttctatagagtagcagttacctctgagatatgaaacagggaaatgggattggaaagcagacaaatggagctttaatgtaaccaaaatgttttatttattaagcaaaaaaaaaaaaaaaactccagtaaaaacatgacaattgttagcatttgttaaatatggatacgggacacatgggtgtttcttaggcatttgcatttgctatattatcctctgtgtttttctgtttaraaagatttcagagtttaaaaaatggcccaaggaatttccctggaaagacagatatattttatatggtttttcaatctatgacctcatttgtattgaagtgactctgttttctatgtttcttattaaaacaatacatcagacactattcactctattcattaatccaatgatttattcactcagcaaacatttatttagtgtccattataaaaaaaggtaccattctacatgataggggatacctaccagctaaaaagacaagactccctacttcaatgagta

SEQ ID NO: 17069 - DNA, 559 bp, Homo sapiens
gactcaaaagaaaaaaaaaagtaaaattataaaaacacatgtagctttctatagagtagcagttacctctgagatatgaaacagggaaatgggattggaaagcagacaaatggagctttaatgtaaccaaaatgttttatttattaagcaaaaaaaaaaaaaaaactccagtaaaaacatgacaattgttagcatttgttaaatatggatacgggacacatgggtgtttcttaggcatttgcatttgctatattatcctctgtgtttttctgtttaaaaagatttcagagtttaaaaaatggcccaaggaatttccctggaaagacagatatattttatatggtttttcaatctatgacctcatttgtattgaagtgactctgttttctatgtttcttattaaaacaatacrtcagacactattcactctattcattaatccaatgatttattcactcagcaaacatttatttagtgtccattataaaaaaaggtaccattctacatgataggggatacctaccagctaaaaagacaagactccctacttcaatgagta

SEQ ID NO: 17070 - DNA, 456 bp, Homo sapiens
cttccagttatactctgccactattgcattgacctctggaaattttctccttcagcttagttatatccctgactatatcacttatctagatgtgaaagataacaggcccagttatttttcttcctgacaaaaagaatagaaaagttgggctacatttwaaaaaaaaatagcttatgtaccaaataattgatttgcaataaccaaaagactttaacgtatggtaggtcttttaaagaaagttgagtgcaacatcttagaagcaataaataaagtgtagttttccttaaaacatattttttttaccatatcttattgtcttagcatatacatctaaataagtcatatctttttaattatttaaattaacaaatgaaagttgaatgaatcatgttatctaaatctccatttctaacaagcaatagtttcatcatatacagtaaactttgactttattca

SEQ ID NO: 17071 - DNA, 1794 bp, Homo sapiens
agttccagttctttgacacttttttttgagaggcctgaaggtggcttcctgaggaaggaacttggataaaacaaatacctgtttcaagctttaacagcagaagcatcaatttctatgtttgtctaaaaacaattgtctatgggactatttcaaataggtgtcaatttttattgactgcttttctgcatctcttacaataatcttgtgattttttttgatctgttaatgcagtcaattcattatgttttattattttcttttctttttttttttttttgagatggagtctcatactgtcggccaagctggagtgcagaggtatgatctcggctcactgcaacctctgtgtcctgggttcaagtgattctcctgcctcagcctccgaagtagctgggattacaggctcctgccactattcccagctaatttttgtatttttggtagagatgggctttcgccatgttggccaggctggtctcgaactcctgacttcaggtgatccacctgcctcagcctcccaaagtgctgggattacaggcatgagtcactttgcccagcctatcttcttttcttatttattgatagatttagtttgccaatgttttgttgattgatacattttgtatcaatgttcatgagtgaaatcactttgtaattttcctttttcaaactgtctttggtttttggtattagttgtttattctagccttataaaatggaaagagttatctatttttctatttcatggaataatttatctaagactgcaatgatatgtttactttgaggaaagattttaaactatgggttcaattttttaaattttcctaaaacaattattttttctcctacattttagtattttatacatgaaaaattttaatatttcatattttctaagaattttcccttttcacctgttttcacttgggggtgcataaatatttataacattttatctttgtaatatctgcagcaactacaattatgtttactttttttattcatgatatagttttaaaaaatgattgctcttttccttttttgatcagtattgccagaagttagttaactttatgaggctttccattttttttaatgtgtttattttttaaattttagagtcaggtttttacgatgcatgttgcccaggctggagtgcagtagcatgatcatggctcaatacagccttgaactcctgggttcaactgatcctcctgacgtagcctcccaagtagctgagactaacaggcacatactaccatgcccagctttttataagactttttcaaagaaccaactttggatttattgatcctctctattgtatgtttatatttaaatctattcatcatttctactctttttttttttttttttttgagatagagtctcgctctgtcgcccgggttggagtgcagtggcgcaatctcggctcactgcaagctccgcctcccaggttcacgccattctcctgcttcaacgtcccgagtagctgrgactacaggcacctgccaccacgcccggctaattttttttgtatttttaatagagacggggtttcaccctgttagccaggatggtctggatctcctgacctcgtgatccgcccgcctcggcttcccaaagtgctaggattacaggcatgagccactgtgcccggcctcatttctgctcttaacattatttcttctttggttgggtgggtttatttctagttaactctaacactcacagttttgatcttggaggacccagatcttcagaggaccaaatctccttatatttcttacc

SEQ ID NO: 17072 - DNA, 544 bp, Homo sapiens
gccatgttgtcacagtcttctgtttctgtgkaaaattaagatttgcctttatgtcagctgctgggtattcaggcagacaatgttgtagaaggagaaaagtacagctgtttggtcagttccaggtttgaataatgacacctctgttcactacctagtgatcttgaccaggcttctctaagcctcagtttcctcatctgtgaaataaaaagaatacctatcttattgtgactattattaaagaaatgaaattgtgtatgtaaaatgcttggcaaacagaaagcactcaagaaaagctaacttatggctgggtgcggtggctcatgcctataatcccagcactttgggaggccaaggcgggtgatcacctgaggtcatgagtttgagaccagcctggccaacatggtgaaatgctgtctctactaaaaatacaaaaaaattagctgggcatggtggcatgtgtctgtaatcccagctactcgggaggctgagataggagaatcgcttgaacccaggagggggaggctgcagtgagctgagatcatgc

SEQ ID NO: 17073 - DNA, 544 bp, Homo sapiens
gccatgttgtcacagtcttctgtttctgtgtaaaattaagatttgcctttatgtcagctgctgggtattcaggcagacaatgttgtagaaggagaaaagtacagctgtttggtcagttccaggtttgaataatgacacctctgttcactacctagtgatcttgaccaggcttctctaagcctcagtttcctcatctgtgaaataaaaagaatacctatcttattgtgactattattaaagaaatgaaattgtgtatgtaaaatgcttggcaaacagaaagcactcaagaaaagctaacttatggctgggtgcggtggctcatgcctataatcccagcactttgggaggccaaggcgggtgatcacctgaggtcatgagtttgagaccagcctggccaacatggtgaaatgctgtctctactaaaaatacaaaaaaattagcygggcatggtggcatgtgtctgtaatcccagctactcgggaggctgagataggagaatcgcttgaacccaggagggggaggctgcagtgagctgagatcatgc

SEQ ID NO: 17074 - DNA, 577 bp, Homo sapiens
ctgtttttagaatgttagaaaagagactcagactactctttctgactccaagggtaaggcagtcagaatgtatctggtgtgtactmgaagaggaaacgtgctgcacattgggaccccaggtcctttggtttaacctgtcctttctgaggcgtgggcatcctggagtccctcagagatttctgacccagccatctcagtaagatctgctgtgttctggaggtgatgagtgctctccagagttcatttgaaagtcaggcccttctctacgtgctcctacccctgtgcctgtcattctctttactgttgaggagggaccttaactcctggcaggtgaactataattaagatcaatggatactaaagtaagcctatcaaaaatctggtttttgacaaagatttgaatagaatttggtccttgccctcaaggatctcacagtatgataaacttgtctttgctttttaaattacagtgccgtttcagcagtcaggcaccttgggtacttgactgaatcttgttcttttccaatatatttcacatgagacttcatgttatcttggacaaccacctaatgagagt

SEQ ID NO: 17075 - DNA, 577 bp, Homo sapiens
ctgtttttagaatgttagaaaagagactcagactactctttctgactccaagggtaaggcagtcagaatgtatctggtgtgtactagaagaggaaacgtgctgcacattgggaccccaggtcctttggtttaacctgtcctttctgaggcgtgggcatcctggagtccctcagagatttctgacccagccatctcagtaagatctgctgtgttctggaggtgatgagtgctctccagagttcatttgaaagtcaggcccttctctaygtgctcctacccctgtgcctgtcattctctttactgttgaggagggaccttaactcctggcaggtgaactataattaagatcaatggatactaaagtaagcctatcaaaaatctggtttttgacaaagatttgaatagaatttggtccttgccctcaaggatctcacagtatgataaacttgtctttgctttttaaattacagtgccgtttcagcagtcaggcaccttgggtacttgactgaatcttgttcttttccaatatatttcacatgagacttcatgttatcttggacaaccacctaatgagagt

SEQ ID NO: 17076 - DNA, 638 bp, Homo sapiens
tttcacctttttgctcaggctggtctcaaactgctgagctcaagcaatcctcctgccttggcctcctccaaagttttaaacatatgtaaatatattattttaaatattttttacactaataggttaaatactataagaagaatcttaatatttcctcaatatccatcaaaatatgtgaaagcaagttagacaaaaacttagggagatctttcattgggaaaatgggggacagacttatatttagaggttccctttaattgggcaaatgcaaaaaaaaaattctgctagagaaacacagtgacttctatgtgtccagttgaaaaagatggaattttatgcagttctgtttctcttctgagtttaactgaactcagaggaataaaccctcctagagctgttcacactggtatttagagcaaaattaaaaactgaattctcacctttatcagtcggcgaatactgtaagaaattaagaggatcgttccaataataccagccatcacacacaaaataatgagtattatcactacaggagctaaagagagcagcaaaattatgaaagtctgaaataaatgaccacatagcaatagaaaaataagacagataacatcagcrtaacatcaccttgccttttaata

SEQ ID NO: 17077 - DNA, 679 bp, Homo sapiens
tatgtactcaawaaatattgaatgaataaataaaatgacaatttgtgcaaaatgcttggtacataatggtcacttaacgaatgttatctttccttttcatttattctacaatagtgatatttgcagtcactctgaagacacatgcaaaactggcttaattccttccctacagttcacatccctgaattctcaataataaagacttaaaggatctattccatttactgaattgcatgttttgggtggtgtttttcctgagcccaggccattctgtacttgaattgacaagaggtcatagcatatttgaatgctccttttttatcattagtcataatgatttcttaggttctgggtatgctcatgtgtccaattatatttgggatgtttgctttccagatgccagcagaaattctgcatctctgcatttgcttttcacctttggatctccagcctgttgcaatgtctcttttggtagttatggttttgccagtttgacttcccttttcttcaaatggaaaggtcctagtatcactgattgtctttaagatttttcagagtaatagtctaaaattgaggtagagaattgcctatcctattgaaagtttagaaaagtgtgcaatttgggaaagtttctgatgaagcttgacagttctctgaattgccaaggccttggcagtga

SEQ ID NO: 17078 - DNA, 490 bp, Homo sapiens
tttttttttttttgagagttttgctcttgttgcccaggctggagtgcaatgggcagtcactgaaacccctgcctcccaggttcaagtgattctcctgcctcaaactcccaattagctgggattacaggcacctgccaccactcccatataatttttttgtatttttagtagagatggggtttcaccatgttggtcaggctgctctcgaactcctgacctcaggtgatccacccgactcggcctcctaaagtgctgggattacaggcgtgagccacsgcgcctggctgcttaaagttaaggaaaatgtatcttccaagagatttccatgatggctatgaattttgcagctctcttctttctctggagattttatgactaaaaagcttataataatataccacacagggcattccacaaattctggtaaaataaaattgaaagtgaaaaacattctgtaaaatatgagcacatatactcattatgatgcaca

SEQ ID NO: 17079 - DNA, 490 bp, Homo sapiens
tttttttttttttgagagttttgctcttgttgcccaggctggagtgcaatgggcagtcactgaaacccctgcctcccaggttcaagtgattctcctgcctcaaactcccaattagctgggattacaggcacctgccaccactcccatataatttttttgtatttttagtagagatggggtttcaccatgttggtcaggctgctctcgaactcctgacctcaggtgatccacccgactcggcctcctaaagtgctgggattacaggcgtgagccacgrcgcctggctgcttaaagttaaggaaaatgtatcttccaagagatttccatgatggctatgaattttgcagctctcttctttctctggagattttatgactaaaaagcttataataatataccacacagggcattccacaaattctggtaaaataaaattgaaagtgaaaaacattctgtaaaatatgagcacatatactcattatgatgcaca

SEQ ID NO: 17080 - DNA, 490 bp, Homo sapiens
tttttttttttttgagagttttgctcttgttgcccaggctggagtgcaatgggcagtcactgaaacccctgcctcccaggttcaagtgattctcctgcctcaaactcccaattagctgggattacaggcacctgccaccactcccatataatttttttgtatttttagtagagatggggtttcaccatgttggtcaggctgctctcgaactcctgacctcaggtgatccacccgactcggcctcctaaagtgctgggattacaggcgtgagccacggcgcctggctgcttaaagttaaggaaaatgtatcttccaagagatttccatgatggctatgaattttgcagctctsttctttctctggagattttatgactaaaaagcttataataatataccacacagggcattccacaaattctggtaaaataaaattgaaagtgaaaaacattctgtaaaatatgagcacatatactcattatgatgcaca

SEQ ID NO: 17081 - DNA, 499 bp, Homo sapiens
tattytgaatttcactaccttgtttttgatacttaggcgaaacctatattctttctctcattaacatacggttaaggcagttttggccagatacgtcgtcatacttccactttgacatcagaatgtcgaggggaaatcaggggtctgtaaatggcaagacttagactcttaaccaggctgtgcttatagccagatgcttgactttggcctgtcacataactgctctgggcttgtatttttttcaagcatacattgtgggagtcctatgaggtgctgttaaagctatgttttagatctcaggttctgatttcttgtttttgtatgtctgaacatgacagaagtactaataggctacaagctaatgaagaacccacttgagtaggacagtattcttgcagtgcaaagctctttgcggagttctctaattcagcacacgtcctttagcaatgctcaggctagattagctcattccctgttgtacagaattttcattggttaa

SEQ ID NO: 17082 - DNA, 533 bp, Homo sapiens
tttctcaaagcacattccatgaccccaaatagatgctgcatggaaaataaagtgggtctgtgattaagtaacattgaaacattgggttaaacaaagattaacaggtatctttattgcaaaatttctcaaaacgttatgtttatttgcattttaaatctctaagagtagggaattgtgagcagtcttttctatatattttgattgaaacagcctgccctccacttcccttgcagaatttcttgaggaatcattgtctgcaagtcacttctttagaaaatgttgctttagtccaggggtggtggttcatgcctgcaatcccagcactttggggggctggggtgggcgaatcacctgaggtcaggagttcgagtcaggagttcgagaccagccttgccaacatggtgaaaccttgtctctactaaaaatagaaaactatttttctwtttagctacttaggaggctgaggcaggggaatcactggaacctgggagacagagattgcagtgagctgagatcatgccactgcactccaa

SEQ ID NO: 17083 - DNA, 522 bp, Homo sapiens
agtagagatatcattagctagaaggaaaaatctctccaaaaagcaggagcagtgtaggttaatggtgcagattcttttcgttgtgaatggaatgttttctcaggaccatcgagatatacaagacctgcacattaatatttggtgagctttccttcagatttcatgtatcattcaataaggaaatcaaastcatgtggtcaaataaggttgtaaaatattccaattgcataaatcctcacttttatttgatcagagaaaatgttcattatgctctgccttttgttaatacaaaataaaaagtataccccaggggttagaccaaggacaattttggtcaattatctttttaaaatgaatttttttttttgacattaaaaaaaaaactctaattatccttcaagccaaaccctggaatccagtgcatgcttgcctacacatttactgaagtgatatcatggcttcttctatgctttccacccatgtacctcagtctagttacgtgtaacattttattgttagaaa

SEQ ID NO: 17084 - DNA, 522 bp, Homo sapiens
agtagagatatcattagctagaaggaaaaatctctccaaaaagcaggagcagtgtaggttaatggtgcagattcttttcgttgtgaatggaatgttttctcaggaccatcgagatatacaagacctgcacattaatatttggtgagctttccttcagatttcatgtatcattcaataaggaaatcaaactcatgtggtcaaataaggttgtaaaatattccaattgcataaatcctcacttttatttgatcagagaaaatgttcattatgctctgccttttgttaatacaaaataaaaagtataccccaggggttagaccaaggacaattttggtcaattatctttttaaaatgaatttttttttttgrcattaaaaaaaaaactctaattatccttcaagccaaaccctggaatccagtgcatgcttgcctacacatttactgaagtgatatcatggcttcttctatgctttccacccatgtacctcagtctagttacgtgtaacattttattgttagaaa

SEQ ID NO: 17085 - DNA, 633 bp, Homo sapiens
cagcttaaacctgctcccagggttcatgcagaaaacagrtgtagtcagcatttttttgccaggctttagagagtgttgctaaaacaaaaatgatcaacacatttccagcaaagagcatggaacacacagaaacatgagatacgaaattcaagtcatcagagtctaattctgtgattcaagaactgtgtggctctgtgcaacttaatcactcctagcttcagttttgtaaaggggaaataagaattacctggttaaatttggtggaaataaaataaaataataagtactaggtctcttctaagggaacacttaataagaagacatattatagaatcaggaagcattaataccttgtactatatgatagcgacataaatgaggtgcaatgggagtgagggtggccgctgaggtggctttccaggcaatgagtgtttgttttgggggactgaggtacggaaggagggaggcagcctgcagggggtctgcaggggacatcggggcagccaggtgaggctgaatatccctttgtgactgtcatggagctttgaggcctcagatgaggacttaatttcctggatcttcagcttcctcacacaatattaattaagttttaaaattctgaacttaatattt

SEQ ID NO: 17086 - DNA, 633 bp, Homo sapiens
cagcttaaacctgctcccagggttcatgcagaaaacagatgtagtcagcatttttttgccaggctttagagagtgttgstaaaacaaaaatgatcaacacatttccagcaaagagcatggaacacacagaaacatgagatacgaaattcaagtcatcagagtctaattctgtgattcaagaactgtgtggctctgtgcaacttaatcactcctagcttcagttttgtaaaggggaaataagaattacctggttaaatttggtggaaataaaataaaataataagtactaggtctcttctaagggaacacttaataagaagacatattatagaatcaggaagcattaataccttgtactatatgatagcgacataaatgaggtgcaatgggagtgagggtggccgctgaggtggctttccaggcaatgagtgtttgttttgggggactgaggtacggaaggagggaggcagcctgcagggggtctgcaggggacatcggggcagccaggtgaggctgaatatccctttgtgactgtcatggagctttgaggcctcagatgaggacttaatttcctggatcttcagcttcctcacacaatattaattaagttttaaaattctgaacttaatattt

SEQ ID NO: 17087 - DNA, 633 bp, Homo sapiens
cagcttaaacctgctcccagggttcatgcagaaaacagatgtagtcagcatttttttgccaggctttagagagtgttgctaaaacaaaaatgatcaacacatttccagcaaagagcatggaacacacagaaacatgagatacgaaattcaagtcatcagagtctaattctgtgattcaagarctgtgtggctctgtgcaacttaatcactcctagcttcagttttgtaaaggggaaataagaattacctggttaaatttggtggaaataaaataaaataataagtactaggtctcttctaagggaacacttaataagaagacatattatagaatcaggaagcattaataccttgtactatatgatagcgacataaatgaggtgcaatgggagtgagggtggccgctgaggtggctttccaggcaatgagtgtttgttttgggggactgaggtacggaaggagggaggcagcctgcagggggtctgcaggggacatcggggcagccaggtgaggctgaatatccctttgtgactgtcatggagctttgaggcctcagatgaggacttaatttcctggatcttcagcttcctcacacaatattaattaagttttaaaattctgaacttaatattt

SEQ ID NO: 17088 - DNA, 669 bp, Homo sapiens
tgaggcctccctactcttgtggaactgtaagttcaattaaacctcttttcttcccaacactggggtatttatttatcagcaggatgaaaatggactgatccataatcatagaatcttgctccatttaagcaagagtggcattatacattttacataaacgtgtgtgtgtatgtgcacctgcttggaatattttaagatcttaaatagtcaatttcttaaatttcatctttttcaaatcttttattttttaaatacagaaggttacaatcatattttcgtaaggtaattttggtacatttcacatttaatggcttatttctgataatattattgatagcaaaaaaacctttttagataatgttttgttataaaaaattatgcttgtgtatttggttgagtatctggccttcattgtatttatacatgcagatttaaaaattctggattaacaccaattcacctcataattattgcttaaaaaatagcaggtatataggtcttatgagtaggtaataattaaatactgytaaatcattataggcacaattatatccaagaaacaacattgatggactataatggctgagatcttaattaagcatgagtcagcaaattctaaacaaaggttctatgactaccaccttttcctaagtctttatacagatcatt

SEQ ID NO: 17089 - DNA, 453 bp, Homo sapiens
ctctaattaaaataacttaatttaatttatttataatttaatttataaaatgatattattataaaatatgtagctctcagctctcaattcagaaatctgctcatttttctgtgtggctgtctaacccaacactggtatagttcactcttcataactcagaaggctacaggtctgtctggaagtttgctgggccactgagtagcataattatttatgctcatcttgtaattgcttcctcaatttcacaataattggggaaaatgagttaaggrtaaaggcaaagtgcttaggtactatacaaagaaaatgatgaattttattatattctgactaacttagttttaagctacctcagagaaaaaaaaaatgtctaattatttagtcgtctccaatatagtacattatccagtatctatatagtatgcttctaaatttaatgcatgattgaaagga

SEQ ID NO: 17090 - DNA, 547 bp, Homo sapiens
cgaagtaaggagccgacattccttgaataggaattacagttttgtataactataggtggaatatgtctagaatactactcgttgttttccttgcttaatttactataaaaaccacctcaaagattactgtctcttaattattttctgattaccttaatttcagaacatctctcccacctccagacttttatagcagtcccctagtaccaattttatggcttgtactactttgcattttaataattgatatttatgtcttagctttctagtgttagctactgataatcaagaagggtgttatacatctgtttcatatatatcagatattcatgaagcatttgttcaaagaattaatgaaaaaacccttcctcttggttgatgaaagcctagtctttattacgactgagaaggaaaaacattgtttccttggttttatatyccagttttctgtcatatctactttattcagagtagctttaataacttttatcttgttccatattttccccttatatctttgaaaaaagatgtttcattatgttataat

SEQ ID NO: 17091 - DNA, 569 bp, Homo sapiens
attccaatggtgatgaagtgactttcttagtgtatcatatctgaaggtccacagtattattttgttccattaatagtgatgttaaatttgatctgttggctaaagtgctgtctacaatatctccactatagtcactagatttttctcttgttattgataattaacttttgagaagatactttgagattatgtaaatatcttgtttctcattaaattttacccatcagtttgatgattttgcttaaataaattagcgtgatggttgccaaattttaattttctaacttgactgtttcttctataagaatagcattttactataaaaaagagaggtgttttttgtttgtttgccatttatgtgcttataattaagaaccctgacctggatgctaggtgtagttattgctacttaggtggcatagtttctaagacctgtctggggagacatagctagaaaatatatgtaatacagaaacatgcacacatgaaaaaacatacgtgtctatctaatctatctgaaaaaccgtgaatmtgtactgatacctttagtctgaatccaataccacatg

SEQ ID NO: 17092 - DNA, 422 bp, Homo sapiens
ttgatgaatatgatcttatttggtccttttaaaaccctatgacacagatactttttaaattcaaactttacagatggggaaactgagcctcgatgaggtaaaatagcttgcccaaaggaaagcatctatgatacagttgagtagaaatttgaagctaaattgggtgagctcccaagtctatactcataaccactcatctccaaagtccatactcataaccactcataaccatgtctaaatgattccagcaaccactctcctgtgcttacatcccattacattgaatagcatttcccacttccttggggactcatgtttgacaaagccaatttatacatagttgggaagacctaacagagtttatgaaggacactgagacattggtatttgggkcatgcccaagagtgaagatggcaaaattt

SEQ ID NO: 17093 - DNA, 1808 bp, Homo sapiens
aatactttttgcccatcaattcttacttctagggttcgaccttccccccataactctgctgtctgcttttgccaaaatagagcttcatttgcaattgtgtttgcaggcctgtgtttgtgtgtatgtgtgtgtatactgtgtggtaagggtggctgtgctaaatggagatggcaaattgattattatcctaactcttctcaagaaactcatgagttatgcacgaccattcgatggctaatgcgggcataggacattcttaggaacagagaagcagatgctggcaaatttcaatgccctgtagtaaactacatttgaaaagcagtagctaaaatatatatttttaaatacaggtataaaacaaaaataggggcataagacaaaaatgaatttatacaaccgtaaaccaaatagatatgtgtaacctattttttgtggttagtataaccagatgctggaaaagtataccaggaatcacggtggggatgagggaaactggaaatttctaacaactgagaggacctaggtttgtttgatgccaagatatgctttcccactacacttcctcttaattatcatattcttaaatctcttaaaatataccaccttccattagaaatgctgtttattatctacaaaggataaaatacctttaaaattctctgctacttactaattgggagcctggttagaatgtccaaacctcagtwatctcatgtcttaaaggaatgtattatactttctaggactgctttaaagattaattgagataatgtctataaacacctggcaaataatacaagttcagtaaatataggttgatattttcttggcacattacttttggcattgtaaaccctgcccctcccccgaatattggtggaatgtatgcgtgcataacaataaactggagtagactttttaaaagaataaatacttcaaaaacaagcttttacatagaagccattttgaaagagcttccaatagtcaaatatacaacaatttgagcaataaaataaaaatgtggtattagattataacccaaaatataaaataaatataaatgagtctatcctgatataaattagtaaaataaaaaaggaagggacaaatgtcttttatgaaaggattccgattaagatatgtagatactccctatgccggtttaatcatctctcctgtcttgagtctgggctgcatttaggacttagtgaccctcttacaaagtatacagtggggaaaggagaaaaactttacagtgaaaagacctgaaaaacactacatgaaacaagcaatcaaggttaacgtcgccagtggtggtaggtcacagtacttcataaaactccatgaccccaatctgaccatgagaaaaacatgagacaaacccaaattggggggcattcttctaaatatctgaccagtattcttcaaaactaccaagatcatgaaaataaagaaagtctcagacactgtcacagacccaaggtgactgagaagatgtgaggactaaatgcaaggtgaaatcctgggttggatcccagaacacaaaaaagacattaatggaaaaactggtgaaatccaaataaagtcagtagcatatttagtagtaatgtacccatttagtagtaatgcacccaaaaaattaaataaatgaggaattatgcacaattctataaggtgttaacattaggagaaactgggtaaaatgtattaaaactatgtactatttttgcaacattttctaaatctaaaattatcccaaagcaaaaactgtatcttagaaaaaaaaacgaaaatctttatatgtagca

SEQ ID NO: 17094 - DNA, 565 bp, Homo sapiens
tgtgtacccaaagcttagctcccatttataagtgagaacatatggtatttggttttttgttcctgattactttccttagggtaatggcctccaattccatccaagttgctgcaaaagacattattgcattctttttgtacagctgagtagtatttcattgtgtatgtttaccacattttctttatccactcatcggttgataggtacttaggtggattccatatctttgcaattgtgaatkgtgctgtgataaacatgcacgttaggtgtctttttgatatagtgacttctcctttggaagatttctcaaaaaactaaatgaggcctacaatttgattcagaatttttttttaagagatgaggggtctcactatgttgcccaggctggtctcgaactcctgggctcaggcaatcctcctgccttagcctcctgagtagctgggactatagctgggctgggatttttttttttatggaagtagcagtttcattttatcagtactcgttatcacctgccctagatcagctggcttctctgtcttatcttaagagctaacttcccaat

SEQ ID NO: 17095 - DNA, 565 bp, Homo sapiens
tgtgtacccaaagcttagctcccatttataagtgagaacatatggtatttggttttttgttcctgattactttccttagggtaatggcctccaattccatccaagttgctgcaaaagacattattgcattctttttgtacagctgagtagtatttcattgtgtatgtttaccacattttctttatccactcatcggttgataggtacttaggtggattccatatctttgcaattgtgaatggtgctgtgataaacatgcacgttaggtgtctttttgatatagtgacttctcctttggaagatttctcaaaaaactaaatgaggcctacaatttgattcagaatttttttttaagagatgaggggtctcactatgttgcccaggctggtctcgaactcctgggctcaggcaatcctcctgccttagcctcctgagtagctgggactatagctgggctgggatttttttttttatggaagtagcagtttcattttatcagtactcgttatcamctgccctagatcagctggcttctctgtcttatcttaagagctaacttcccaat

SEQ ID NO: 17096 - DNA, 532 bp, Homo sapiens
ttagtagagacagggtttcgccatgttggccaggctggtctcaaaacctggccttaagtgatccgcctgccacagcctcccaaagtgttggggttacaggcatgaaccaccacacctggcccctgcatagttcttaacaaatccatctttgagtcttttttccatgcygggcactgtcctagatgctttatgtaagttaattcattatgctgctgagaggtagcagagttcctaatttactgcttactagctataagagcttagataaattatttaacttctctgtgcctcagtttcctcaagtttgaggaaatgggaataacagcagtatctgccttaagcgttgctttttgaggactaaaaggtatttggtaagggtttagaaaagcacatagcaagtattcaatatatgttagctatactgattaaatataatcaaccgtgagatagattttcccccacttagagaaaaggaaagtatttgggaaggttaagcaagttttccaaggtcattcaaacggttacatggcat

SEQ ID NO: 17097 - DNA, 589 bp, Homo sapiens
tgcgcacctgtaatcccagctattcaggaggctgaggtaggagaatcgcttgaacccaggaggtggaggttgcagtgagctgagatcacaccactgcacttcagcctgggagtcagagcaagactccatctcaaaaataataacaataatttcacatttacataaaaggcatgcttagtcattaggtcttcgcaaaatggtatctcacaaactaatcccaggattagcttttaggttgggggttatttcttayttagtcacagctgaaaatataacatatccccatgttttaaaaaatccagcaatgctttatgtcaggagaattgtgttttttttaccctaaaacaagctcattcaataatctttattatatcagaacaaatactaatttaaacattttattttctcttccttatttttttttctttgttttctttcacttacataggctggaactcagatcagcctggcagatttaccattttccagtgaggttttcactctatggtataacttgcttccttccaagcaaatgccttgcaaaaagaatgaagaaaatgaggactctgtatttcaaccaaaccagccg

SEQ ID NO: 17098 - DNA, 550 bp, Homo sapiens
agagaataaacagaaaccactacttcagaaaaaaatgaacaaacactagatgtatcccaagatgttgggcaggtctgtagtgatttctagggctggcaaaatagcaactacaaagtatatcctcagaccacccaatctaagtgctatttggtaatgggaattatgaagaatcctaccaggcattcttcccttcggtgtttactgacagagcaaaggtctaccctcagtgtcttctgttgtaaggctgtttgggaaatggcgactctgaacacatcattgaataaaatggattctgtgggcggatgaacttttgtgcgaaacagacagctgacatcagttgaggaaggaagaacggcaaccctaaaatatctgcaaagaacaagaataaaatggatttcataggtactttaattataccagattcacagctatcatttgaaattatctgcaaagagagaaaatgagggatcgtggagttcaagatcaatctaaagtgttgctgccatcacgggtccgtgctcagctgcatagatgctctgtycttaaccca

SEQ ID NO: 17099 - DNA, 399 bp, Homo sapiens
aattgaggccaccaaggaactcaggccaccgaggaacacaggccaccaaggaactcaggccaccaaggaacacaggccaccaagatgcacgaaaagcaggaatttgtaacaagagatcattgtgggaacataaggctgtatcccccacccccaaatctgggtaagtctccagaaggcttggtgagaccttgaaccttctgtatctagagcatgctggagagcctccagcaagtcacacgaagatggcaggaaaaggacattccaggggctggaggacgttaggagcatccaggmagctgaccccagatcccaatcatgcatagttttgtgtcagtatcagaaaaagaagaaaagaagtgcttgtgagtcatcatctccagattagctgttctgagtctc

SEQ ID NO: 17100 - DNA, 541 bp, Homo sapiens
cccatcctgcttctctggctcttctcctccaggagctcctctccacagagccaggatattctgggtatgttcagagttcaaggtctccccatctcctttcctaacttcactgcattactagtccttggtgtttccttagggctactggctcctatggcctgaggcttccacagcctgaggcttcccaaggctacaagtcaacttagctgaccatgaaggcccctgatcactatgggctgaggaaaggatytggggtcttcccaatatcctccctgcctcctcagccagtggaggtcccagcattggagtcattccccagggcctggaaaacatctctcccttcccgttgctcatgattatgcaggcctagtcacaggtctcagctaaaccttggcaggttggaaggatggggcaccaagtggaggggctttttgagcaaggctggggctgctcctttgagtgagccctgttgagctccatgcaccctctggtggccaacctcatttttgcaactacagctctggacaagaaggaagcagct

SEQ ID NO: 17101 - DNA, 543 bp, Homo sapiens
ccagcatcgttcttcgctcaataaattttgcctataaaaaagtggaagaaaagggaggaaggaagggaaggggaaggaaaaaagaaggaaggggggtgaggaagaaaaaggagggaggtacagrggaggaaatatggctgagggaaggaaatatctgtggaatgcctgggtgaacctgggcagtgccagagggagagcaaatctataagccctgcttgtggtttcttgaccagagaatgagaaaaaggcattagatcatttcatgatttcaagcctgggtgaccagaggaatgaactcatatgaaggggccaaggaggctggtactgtagctaccaaagggcaaagacctggaggttctctaaagggaaggaatggatgaaggaagaagggcacagggtgaaagatcaatattgtttgcaggacatgtgatattgtaaattagggcaaatggaaaaatgagagaaaacaggatctgagagacaaaaaggacgcacctacttaaaaccatttaattggttccaaacccttgtcggccaggcaca

SEQ ID NO: 17102 - DNA, 583 bp, Homo sapiens
ttgacaaatactgactggccaagttagcagggtgatagggtctgtctattttgaatctgaaatccatctcaaagacaggccaagagcttattagtggacttaactggattctgctggcccaagcgcagtaaagtcaaacaaccatatcgaggttttgcattggggaaaggaggacatttatttgcagggcatccaagcaagaaggaccaggcggctaactatcaaagyccctcactgaatgggggcaataatcatatctcttacagatgaaatcatgaatgaaatggtttatggaaaagcagcaatggttgataatcctaaatgttaagtatgtttatattttttccctgactttaaagtgcttctccttcattcctatacacaggtccagactgatggcttattttttaaaattctcttagtcacttcattggttctaacaataattttagaaactggatgactttgcaatgtagaaaggctatactttattcagatagagtacactcacatattggcttgtctatggcacatcgatatcatgccaagaatgtaagcactaagagagaataagaggaaaatc

SEQ ID NO: 17103 - DNA, 542 bp, Homo sapiens
tacaaagaattaggtgagggagcaatgaagatacgattctgtaaaaccttgattatcagctayaggagtttgaaagttacacaatgaggtatggaaagccattgaaagtttccaagcaagagagattacatgatcaaaacaggaagattattttattttgttttttgcattatgtgcaagtgtagacatgcagaggattgttttagaatccatatgtaaagtgtccaaaaggaaaagcttaattcagggagacaaaatagaaaggtctagcaaaatctaggagtgaggtgtgaaggggccaaatcagatcagttgtaataggagtggaaagaaaaagcctaggatgtttcaacagagggcactgggccaaagctttggtgttacctggcatagggtttctttcttctcatttgttgataatgataagcttttgcccatatttctgtggaattatttaccattttggtactgatttgtagaagtctgtttagacacataagtgcttttagataaaatacttacattcaaagtaattaactggc

SEQ ID NO: 17104 - DNA, 612 bp, Homo sapiens
acaaagtaggccctaaattaatacttatagaatgaatggatcattggttgatttgaaccattccatttgctggcttccagaaaaacttccagttaactggtgatttgctcaatgtcccaagcctttcttttttttccrtactgtaaatcaatagacttttagttgaaattttttgtctttagctttctggaactttcttaactctcttgacaagcaaaattgttacttcctctatgctatgatactaactggcttacatcacatcatcaataaatctttcatcatactgaatttcagttactcacactcagatctgcttacccaactagattattaactgcttaagggtaggcattctagttctatatgtctagtgcatgttgaatgctcaaaatatgttttgtgaaagtatgaatcaatcaatcaataagctatgtttcctgggatataccagccttcaggtaaaaactgagtcattgtaacaataatcaaacagttcttctctggatatgcctttttcttattacacatccctcaaattctaaccagatattttttatactgtactggagtgagtattgtatattttctcatatattcattatttcacac

SEQ ID NO: 17105 - DNA, 557 bp, Homo sapiens
cctaataattagtgatgctcagcatcttttcatgtacttttctgtcaatttgtatatcttctctggaaaaatgactactcaagtccattgcccattttttaattaggctgttgatttttttgtggttgttgagttgtaggagccctttatagattctgaatattaacctcttgttggatatatgatttgcaaatatgttttctcattctgcaggttctcttttcactgttgattgtgtcctttgatgcacaaagtttttaagtttaggagaatattatttgtctatttttgcttacgttgcctatgattttggtgtcatacctaggaaaccattgccaaaagtaatattttttrtatagtttcacaacggaatcccacatgaggaacagaacaatcagtattgtctagaattataattatttaagggtctatctagaattcaaataggcttggtggcaaaaaagaaaaggagttgttcattcttttaggcaactcggtacttccaccccctctatgtttgggcattttcatatcttatgaatattgtggcatgtgga

SEQ ID NO: 17106 - DNA, 570 bp, Homo sapiens
tctgtgctcagcaccatctggaggcattagcaggagtgaatccacttgtcttttttgtccttttgtgaatttattttccatacttatgtatcctgttccgggctgttcatgcacaacaaatttgacttttacaaaatctaaggccatcggatttttataaaagtcaaattttggtccctctccacacttaccccaaagaaaaaacattaaactttgatctaatgacagaaacattctctgcacacatgattggtttgatcactataatggtcaagaaaatggtttagcttattttaacatactcaytctttacaaagctctaattagtggataaatgtgtgtgtgtgtatatatgtgtgtgtgtatgtgtgtgtgtttgtatgtctctaaatgagactcataagccctttcttctgtatgtaacaaacaatacaaacatacctgattggtgagtaaaagtctgtccccaccccctgcaaataagtatttctgtgcaagatgaaacacacatttcatccagagagaagaagcctctctacagtaaatggagacattggatttatggtacca

SEQ ID NO: 17107 - DNA, 1229 bp, Homo sapiens
gcgatgccggtgagggccgagttcccagaagagctcttgaggtttcttagtacaattcctcccccacgagatattgcctagtcacaccacctctcccccttccccaaactcctgtcatctctccttcctctagacttaactctaagccctaggcaccagatttggcagtgcttcagaattacacatcacatggggagcagcatgctcccactgtgccccagaagagtttcccggacagtgtccagagaatctgttcggtgagaaccaacttctaatgaagtttgtgagattttatttttttattatttattattattatttttttgagacggagtcttgctgtcgcccaggctggagtgcagtggcgcgatctcggctcactgcaccctccccgggccgggttcaagcgattctcctgcctcagcctcccgagtagctgggactacaggcgtgtgccaccacgcccagctaatttttgtatatttagtagagatggggtttcaccatgttggccaggatggtctccatctcttgacctcgtgatccgccttccttggcttcacaaagtgctgggattacaggcctgagccaccgcgcccggctgttttgtttttaatgcatagatttgacccaatactgtaagacaagaactgtgtctgattcaaatgttcaaaatcacctttgcagtccccagagtgcgtgtgtagtgctcagccgtcctgcgttaatggaatcactggatgacagagttcatgtttagatgtgcaccgtgtgttgttctgccctggtcaggcaccagcccccttcttgccatggtggctttcctccactgtcctagcatggcttgcggagaccgtcattttgcttttacctgcgctagtactcctggtttcctgactcaagtagcttactcagtagccctactggatttgatcatctgaatgttttcataagtatcttctctcccataagtgtgtttcctcaattcatttccagtcttgatgaaagccaggccatcttcctaggcccctacctatgtttasctggagccaggttctgcagattctagctcttcatcacctgcccttgaagtctcaaggccccccaccccactccaccttgcacactgcagattggatgtgtcatttgtcttcagggtaaaaaatcaaccactcagcttcacatccagcatgtgcctccctctctggccctgactcctgaccttccct

SEQ ID NO: 17108 - DNA, 1031 bp, Homo sapiens
  misc_feature (1)...(1031): n = A,T,C or G
tgtgtatatatgtgtatatatgtatatatatgtgtrtatatatatgtgtatatatatgtgtatatatatgtgtatatatatgtgtatatatatatgtgtatatatgtgtatatatatgtgtgtatatatatatatgtgtgtgtgtgtatatatatatatatacacacatacatacataggcttgtgtgactcaagatagtagtgagaggctgggcgcggtggctcacgcttgtaatcccagcactttgggaggctgaggtgggcagatcactaggtcaggagctcgagaccagcctggccaacatagtgaaaccccatctctactaaaaatacaaaaattagctgggcacagtggcgggcgcctgtaatcccagctactcaggannnnnnnnnnnnnnnnnnnnnnnnnnnnnnnnnnnnnnnnnnnnnnnnnnnnnnnnnnnnnnnnnnnnnnnnnnnnnnnnnnnnnnnnnnnnnnnnnnnnttaaattttaatgaagttcaatttataattttttctttcatggatcattttttctttcatggatcattttttctttcatgatcatggatcattttgatgttgtatgtaaaatgtcatcaccaaacccaaggtcatctagcttttctcctatgttatctcctaggagttttatagttttttgtttttcctttaggtctgtgattcattttgggttgatttttgtaatagatgtaagatccgggtctagattatttatttacatacttatttatttacttacatgtggatatacagttgttccagtaccacttattgaaaaaaatatcctttcagtgttgaattgtctttgctctttttgaaagatcagttgactatatttgtgtggttctatttctgggctgtttattctattcatatgtactgagtctttttgttactttcagtgaagataaaatctatttgtagctaatcttggtttgtctttgactcttagtttcctcatgagaagcagggatccgtagaatagatccttcttactgtttcttcc

SEQ ID NO: 17109 - DNA, 1237 bp, Homo sapiens
  misc_feature (1)...(1237): n = A,T,C or G
gttttagggagatgattaaaagtgataagaagccagggcgctgtggctcacgcctgtaatcccaaaactttgggaggccaaggcaggtgaatcacttgaagtcaggagttggagaccagcctggccaayacggcaaaccctgtctccactaaaaatacaaaaaattagctaggtatggtggcaggcacccataaacccagctactcaggaggctgaggcaggagaatagcttgaacttgagaggaggaggctgcagtgagccgagatcaagcccttgcactccagcctgggctacaagagtgatacgccatctcaaaaaagaaaaaaaagtgacagggagaatgatattttgagacagagagaaacaaaaagaaaggaaataaagtagataataatagtaatggttcagatgacactattatttgatttaagggagtggtgaaaatattaatatgtaaaacagtcaagcttttgtaaattattacatgtttatgttaaggttatactggagttgaagactatttcataattttaacttgtataattatagttcactatactgttactcagtttagaaggcaaatttgtggagtgtcacatgagtaagacattgtgttgaagaaaaagttcaatgacttcgctgctctcaaaacaaaagtagctcctctcgccagtcaaaaacaagatatatatatgtatttttactctcagagtcaattgcttccaaattttggctgtaatttactttctattaatcattcttcccactaaggacatggccctatccatacaggtgacctgaactatatttgccaatatccttgcttttcattctgtttgtgttattttcctagctgatttgctctcattctgctatcgctgaatccagaaattacacttcaaaaccatctcaattgtctcatcctcttgggtttccttttttgttattctaattctatttccaagaataaataccaaatatgatcttctctctcctttaggtcccatcttgactataaataattattggtgacttttcttatctgtgtatgcaaatttttactgccctcccacaatctccataaatttaaatgtgaactttgtaaagccaaatataattttatgcaccattttatnnnnnnnnnnnnnnnnnnnnnnnnnnnnnnnnnnnnnnnnnnnnnnnnnnnnnnnnnnnnnnnnnnnnnnnnnnnnnnnnnnnnnnnnnnnnnnnnnnnnt

SEQ ID NO: 17110 - DNA, 556 bp, Homo sapiens
tgacctttaaagatgtattatagaaggtacacttacactgaagatgtagactcatcaactaagattattttgttaatttttttcttttacttttttcaattttagcaggttttttgcttcttttggttttgtgtgtgtgtgygcacatgcgtgtgtttgtctgtttacttttttcatttatatgtttagtttgccagtagggaaagaatggatgaaatcatgtcaactaaagacctgcagataagcagagattggagcttggctaaaatagggattctttgctgaagccacaagtttccctacaacctgagaggaagagcagccacacttcctgagttccatctgaagaggcacaagatgcactagtgcattactagggcaatgacctcaacagccctgttaggctcaccttaaaacaaacactgttttggagtgcaggctttgcattagacactcagtaattaaggacacagtttccgctttcccaggttgtttatctctcagatatcctatttctcaatctctacatgtttctttctggcaattgagtcatgct

SEQ ID NO: 17111 - DNA, 568 bp, Homo sapiens
ctgttttcccttgtattgtaacaaattacgcttgttacctcaaaaatgaaaggcttatttagggcaaagacattttcttgttcattcttgtatttcccaagcccctctcctagtgcctttcatataaaccgtcagataagaatgtttattaatttgcattattcagatattactaccacttctaaataaactatatttcagacactggtagtattctaaaatggctaagctacgaaaataacaaatggatattactttttttcggtgcattaaaaattatttttaaagtgtcaaagtttttattaaaagtaatttcttttagaaaaatattctacagtttgccattattttttaattggctgatacgtgtggaatgcagtytgttgtggtccacgtcacattactccttctgagccgcctccagcagccccccagttggccacgcagctgtgctcacctccagccccttatcctcgggtctctagttcagatcggggtggacatgtggcccatgagggccccagcagattctttgctaaaacctgtatcttggactcagcaattctag

SEQ ID NO: 17112 - DNA, 530 bp, Homo sapiens
tgtaatgtttgtcttcaaattcctcatttatgttatatttttctgaagaagaaaggtaagactgtgagtcagatacaaagttagtgtctcactcaaagccaccgaagaacagcttgtaaacaatacaaacaaggacaatgaacttatacaattcatgtttgatagctggacttctggattttagcatgtaacttatttatctttttgcctaactgtagccttacatatatggctgcctcagtttccaagggagagtatgaagaccacagtttaaataatgaatcatcccagagttgctttttttatttaaattgaatgcaaagcaaaagttataggacattgcctgraaagaaacacaacgagttccagaatgagcagagttgaaatgcaaataagaatattctagcacatatctgattgctggctgaccattgcaattcttcattaattctgtaaattgtggagggagagaatcacattccttgcttttgtggtagcctcaatttttaaaatctgcaaatggtttatag

SEQ ID NO: 17113 - DNA, 530 bp, Homo sapiens
tgtaatgtttgtcttcaaattcctcatttatgttatatttttctgaagaagaaaggtaagactgtgagtcagatacaaagttagtgtctcactcaaagccaccgaagaacagcttgtaaacaatacaaacaaggacaatgaacttatacaattcatgtttgatagctggacttctggattttagcatgtaacttatttatctttttgcctaactgtagccttacatatatggctgcctcagtttccaagggagagtatgaagaccacagtttaaataatgaatcatcccagagttgctttttttatttaaattgaatgcaaagcaaaagttataggacattgcctggaaagaaacacaacgagttccagaatgagcagagttgaaatgcaaataagaatattctagcacatatctgattgctggctgaccattgcaattcttcattaattctgtaaattgtggagrgagagaatcacattccttgcttttgtggtagcctcaatttttaaaatctgcaaatggtttatag

SEQ ID NO: 17114 - DNA, 479 bp, Homo sapiens
cccccctcccattcccactcctggcattcccatttgaccatttcaagttaacagaattcacattttgcagctctgttttctctgtccccgaatgttcaagttcaaacgtgttctcggcatagctgacccttctgcctctggagacttgttccctccgctgtgctacagttaccctctgtcrttatctctaatatagaatttatcagattttgctgcccaaattatcgatcaaatggaacgcatccagaaaggccagtgtctgatagatgcagcctgaggcatttaattctgctagcaatcacattgtgcagacacctacagcaaataactttttatgtataagttgattagaaatattagtaagtcttacattaaataatgtagctacaaattttaataaaaatagattaaatgccattaaagattgtttatcatatctttgtagttaatccatttattggcttatagagatctaggat

SEQ ID NO: 17115 - DNA, 537 bp, Homo sapiens
ctcatatagggataaaatgccctcggtgcaaagagttacgtgtaaaactgtgtaagttaactttcacaatgttgtaatttctctttctccaaaatccattctctattatgtttaaatgttgatatgctgaaatttaaagaaaacttgataaggtatatagagtagattaagagaggcttttctttcctcccaaattcaatttagtgaatttaaactattggtacctaacggaattgtgtgctgactcaaactttttactcaagtcaattttttttttaaattaatttttagagacagggtcttgctttgttgcctagactggagtgcattggtgtgatcatagttcactatagcctccaattcctgggctcaagcaaccctcctgcctcagcctctcaagtagctaggattacaggcacatgccaccacacctggctaatttttttactttttattttttgtagagtcttgctggttgcccmagctggtttcaaactcctggcctcaagcaatcttcctaccacggcctcccaaaat

SEQ ID NO: 17116 - DNA, 900 bp, Homo sapiens
ggaaggccgaggcgggcggatcatgaggtcaggagatcgagaccatcctggctaacatggtgaaaccctgtccctactaaaaatacacacaaaaaaattagctaggtgtggtggcgggcgcctgtagtcccagctacttgggaagctgaggcgggagaatggtgtgagcccaggaggcggagcttgcagtgagctgagatcgcgccactgcgctccagcctgggcgacagagggagactctgtctcaaaaaaaaaaaaaaaaaaaaggggggggagggaccgattttatgaaggttatggaacaaggaggaagctatgatgtgaaactcggaaaggagcgaattgtagactttgaaagcagcataggaatgtcgtgatgttactctcagtgagtaacatggaggatgagttggagagggtgtggactggagcagagttttcgtgttcggtgatgagatttaccttgagagtaaagacgaaagactgggaggccttgctctattgccagcaaactctatggaattttcctttcagttggaaggctaaagtttcacatctacttaatatgtttctacggagtgtttagatgtgttttagattgagagtttttcagatgaggaagatgactaagtaaaataaatgaaagagaaaattttgctatttcatagtgaaatagaaaagggcttttttcccccttttgctagtagtttaaaagtgacgagaataagtcacatgaatacaaatcttaaaactgaatagaattttgtttctcataggtcatatcatgcctgggaaatctccaagttctttatggcaatatatcagggaatgcagtgacattttcagcatatactgttgccattatttgtgtgtgcatatgygtagctttggtgattagaa

SEQ ID NO: 17117 - DNA, 931 bp, Homo sapiens
cagcttgcaagagagatgtgccctcacaactatgaatcaagaaatagttctgagtggacagcatggggtctcagggaattgatcatcagttaccctatccstgtcttccttccctagtccctacctccttgatatctggtgggtatgttttacattcagaatgtataatgtataatccttttaaggattatccaataatgtataatccttttaaggatgcacgatccaggaatgctgagcagggttaaaaacacacaaagtggtaaaaataaattttaaaaataaataaataaatgagcaggcagcttacccacagccatcctagtaatcaccagatggtaattgcggacaatggatgtggtgtaaaatgcattgatctgacaaagcaaaattggactcagagaaaatgcatttaaacaaaggaatttaatggtgaggatgtgtcttggggagggaaatgaatcttgttcccagatgggtcttccaatatgacaaataaaaattaaacttttatagctggcatcaggttgggtgctgattcacgcttcaggcatccaaagttcctctgcttctttagtagagcaattggtgggcttcatgatgagtcaaggtatatggcattcggcaatggctgctacacatttagccccaatgaagctctcttctctataaataaaataatgctttatctttcaaggattttccttttcaaagcagtctcagctatctccactttctaataattcatgtattcatgccacatatcttccgtaggccccaaatagtcccactggagctttgttgagtgctgggaaggcagcagtggacacacagctactcccctcagtgttcacaattcactcttccagagtcaactaggttttctcttcaaatattatcggttatgccttgtgtcaattttttttttttg

SEQ ID NO: 17118 - DNA, 931 bp, Homo sapiens
cagcttgcaagagagatgtgccctcacaactatgaatcaagaaatagttctgagtggacagcatggggtctcagggaattgatcatcagttaccctatccgtgtcttccttccctagtccctacctccttgatatctggtgggtatgttttacattcagaatgtataatgyataatccttttaaggattatccaataatgtataatccttttaaggatgcacgatccaggaatgctgagcagggttaaaaacacacaaagtggtaaaaataaattttaaaaataaataaataaatgagcaggcagcttacccacagccatcctagtaatcaccagatggtaattgcggacaatggatgtggtgtaaaatgcattgatctgacaaagcaaaattggactcagagaaaatgcatttaaacaaaggaatttaatggtgaggatgtgtcttggggagggaaatgaatcttgttcccagatgggtcttccaatatgacaaataaaaattaaacttttatagctggcatcaggttgggtgctgattcacgcttcaggcatccaaagttcctctgcttctttagtagagcaattggtgggcttcatgatgagtcaaggtatatggcattcggcaatggctgctacacatttagccccaatgaagctctcttctctataaataaaataatgctttatctttcaaggattttccttttcaaagcagtctcagctatctccactttctaataattcatgtattcatgccacatatcttccgtaggccccaaatagtcccactggagctttgttgagtgctgggaaggcagcagtggacacacagctactcccctcagtgttcacaattcactcttccagagtcaactaggttttctcttcaaatattatcggttatgccttgtgtcaattttttttttttg

SEQ ID NO: 17119 - DNA, 931 bp, Homo sapiens
cagcttgcaagagagatgtgccctcacaactatgaatcaagaaatagttctgagtggacagcatggggtctcagggaattgatcatcagttaccctatccgtgtcttccttccctagtccctacctccttgatatctggtgggtatgttttacattcagaatgtataatgtataatccttttaaggattatccaataatgtataatccttttaaggatgcacgatccaggaatgctgagcagggttaaaaacacacaaagtggtaaaaataaattttaaaaataaataaataaatgagcaggcagcttacccacagccatcctagtaatcaccagatggtaattgcggacaatggatgtggtgtaaaatgcattgatctgacaaagcaaaattggactcagagaaaatgcatttaaacaaaggaatttaatggtgaggatgtgtcttggggagggaaatgaatcttgttcccagatgggtcttccaatatgacaaataaaaattaaacttttatagctggcatcaggttgggtgctgattcacgcttcaggcatccaaagttcctctgcttctttagtagagcaattggtgggcttcatgatgagtcaaggtatatggcattcggcaatggctgctacacatttagccccaatgaagctctcttctctataaataaaataatgctttatctttcaaggattttccttttcaaagcagtctcagctatctccactttctaataattcatgtattcatgccacatatcttccgtaggccccaaatagtcccactggagctttgttgagtgctgggaaggcagcagtggacacacagctactcccctcagkgttcacaattcactcttccagagtcaactaggttttctcttcaaatattatcggttatgccttgtgtcaattttttttttttg

SEQ ID NO: 17120 - DNA, 429 bp, Homo sapiens
gaattcaagtagaatgaagtcatcagtaataaagaaaaaaaaaaaagaaactgataaagcactgttttytaagaacacacttttcttccatttgtggtggaaaaaaaaaattgtactgagactgtaaactattcttccatatgcctataaatgcataaatttaaaaatatgggtttgatcagattgctgttctcaaataagggaatggggcaggaatacaaaatcagctgttcaggattcagaaagtcccctgtggctgacaggagcatggctatttacccagaaaagaaatctggcccaagagaaaaaacaggaaaacagcccagaaagtcatggaccatctaagtgcaaaacatgctgtatcttctcccttgtgtgaatattttttaaaaatatggaacactgtgcaaaccttttgtggtaacctgg

SEQ ID NO: 17121 - DNA, 1272 bp, Homo sapiens
tatatacgtacatataaatatataggtatttcagtataccaatactttgcaaactgggatcccacagcctgaatttgacccatgtagaccttatttggaagccacagagtattaatttttaaaaaacatgagccaatatttaaaaatcaaggtatttcactaaacaaatttttaatttcaaaaatatttttaatagaaatcactggctcatgtttaaaactttctctataaattyaagtttcatgataggcttttatatattctacaaatttcttttagagctctagatctgcaattctgcgatattacaaagtctggaatcgtgttttgtctttcacctgtgaaaatgttactgttaatccacatatggtcaacaaaactggcattgagctgtttttccgggagaagtgatggattcatgctgctccatccacatattcttggcaagtgcccttttgaccactggcatgtatttttaagactctctggggttgggaggagagcctgtggtaatggaaaagatccaagttaactggcccacacaggggagccaacccatgaccttgaccccattaccacagtgttctaaccaattgagctaaataattgagtaattgtttcttagcaatctgatcaaatcagatggcttataataagactctgtctgtgaacaagcgtgaggatgtcagtgaacagagagcttaggataaggggaaagttatccagtctgcaggttggttggcattttatatttggccaagtagtcaataaattggactttgtcattatggctaattgcatttctgagcaatgagaacttaccaaaaaaaaatgaaactttaattaagtagagttttttttttttttgaaggattcagatttttcagttcataattgacaacatatgtacaaacaactggggcaccgagcaggagggaaagaactttgtgctgagttgaggggttcaggtccctgtttgatcccagctacttagtgtgatagtgtgaccttaggtaggtcacttgactttctgagctttgggagggattagataaacatgatctcacagatccccctatccctaagaaactacctcttaatttttaaaccaataaaaatattttgcaacagatttcttcctaactaaaaatgaaaatggaatatttttcacagaggtagataattaaacaatatttcgaaagtatttattgaacaagcttatttttgaaatatgttggtgcttgcataaagtcagtcagtatataatatgca

SEQ ID NO: 17122 - DNA, 600 bp, Homo sapiens
gagcttggcatttgggctagagccaacttgaaaattcagagcatgagaaaaaatttttttctttagacctgtcttctccacaaattatattcacgaagattttcagactctgtccctgtggctcrggctcaagtagagatagatttcagcctgccacaggtaggacagaaaatgattttaaaagaacaataaataaatattagaagccttttctttagttgctattttttccctttttcttttgatggctgatgttcagttttctcccaatttctttcttgtgctacagcaagcctcgaaaaatacttcactataagagcaacttctaaatgctctcgtcttcttgcagaaatcatgtcagaaacatccaaatgaatcttaatagttgagtaaaattgaatttggcttctctaggccataacagttagtattactccattgtgagcagatctggattataattaagaaaacccaacattaccactgacacagaagtatgctaggaaaatgactaatttacatagatctatgcctgttctgtaacttctgcatctggcatgctatgagggacagtgtgatcatgcatgtaaagtggaggga

SEQ ID NO: 17123 - DNA, 561 bp, Homo sapiens
tgctgggattttaggcatgagccactgcacccagcctattgtgccatttctgtgggtaaactgactccaaggtcaaatgctacattagtcactcagaattgaaatagtgcttttttttttttttttccttctggggatttcaaattgctggggaaaaggagtctctctcgttcatttattcattcaattcataagcaattgcattatgccagatatactggggggaaaaggtgagcaaaagccaatatagcccctgttctcatggatgttacagatgsatgatggagacaaatattaattaaaacaaaaatcatctaaatgtgaaaatacagctgctgtgaaggagaggtgatgggaaagggtctagggaggtgtttcctgggtatttgatggatctctggattggttctttgtcattgggtggcagacactgtcttcagctaagtggctcaaagctttgacagcattgactttgcatacgaacaggggtggaggtggcttgagcctttgggggttggtagtagaagcagcagtccaagttgtctgagatgttggggacac

SEQ ID NO: 17124 - DNA, 523 bp, Homo sapiens
aggcagattttcatgacaactgacaactgaaggccacaatctgttgagtatgatctcattttataaaaaatatatatttttgcattgaaaaaaggacctccaactcagcaaactatcacaaggacaaaaaaacaaacaccgcatgttctcactcataggtgggaattgaacaatgagaacacttggacacaggaaggggaacatcacacaccagggcctgtcgtggggtgggggaaggggggagggatagcattaggagatatacctaatgtaaatgatgagttaatgggtgcagcacaccaacatggcacatgtatacatatgtaacaaacctgcatgttgtgcacatgtaccctaraacttaaagtataaaaaaaaaaaaaagaaaaaagaatctccaaaatacacacaaaaccacctgggaaggctaggtgcagtggctcatggctgtaatcacagcactttgggaggctgagataggaggattgcttgagctcttgagtttgagaccagactgggcaac

SEQ ID NO: 17125 - DNA, 523 bp, Homo sapiens
ttgggggagggggagaagccatctgctccagaatagtcttcgaatgacacgatcaaatgactgcagagcaaactggagggagtccaacagaaagttcctgtctgctgcatccagccccaaccagcactcgagccattgtgtttacatggaagctcacacacaggtttcaaaggcaaggccgtgataaccaaggatgtaagtgagatgagtgtggaaaagaccacgtcagggagctttctcaccccgtatctcaccagtataccatttggaaaactaaaaagccattctttagagagaagctcagtcttttttcctgatcccttcagctatgcatttggttacaattaatgtatcagatcaaatgaaaaagttacattcctttgtaaattcatttttatgtgctcgtcttctattagtgtttaaactctgaaatctatttacttaaaatatgaggcaattttcttgtttttaaaatatggcctgyctcaatttgcaaaacatccttgattcttattttgtttct

SEQ ID NO: 17126 - DNA, 565 bp, Homo sapiens
tggctaatgtgtggcaagagactgaggtccagtagcttgcgcaaggtcacacagcaaaccgtgggtaggacctgccctttccattatgcccggctgctgctttggtgtgccagctaattcgaaattttaaaaatttgcatttctaaatttacaaaaattttagagatcagaattatcactgaagtacaaaatgttcatagtcttgatgaaatcctctaaaatggtcacttcttcattttgctcaagctgtcctattctttgtcagctcaggctgccataacaaagtatcacaggctgagtggcttaaataataggaatttattttctcacagttaaaggtgktaggaagtacaagatcaaggtgccaatttggttcctgttaagagatctcttcctagcttttagagggcctccttctcaccatgtcctcacatggcagagagggagcactcttgtgtgttttcttcttatgaggaaccagccctatcgaaatagtggtccacccttttgacctcatttaaccttaattacctactcaaggtcctagctccaaatatattggggg

SEQ ID NO: 17127 - DNA, 565 bp, Homo sapiens
tggctaatgtgtggcaagagactgaggtccagtagcttgcgcaaggtcacacagcaaaccgtgggtaggacctgccctttccattatgcccggctgctgctttggtgtgccagctaattcgaaattttaaaaatttgcatttctaaatttacaaaaattttagagatcagaattatcactgaagtacaaaatgttcatagtcttgatgaaatcctctaaaatggtcacttcttcattttgctcaagctgtcctattctttgtcagctcaggctgccataacaaagtatcacaggctgagtggcttaaataataggaatttattttctcacagttaaaggtggtrggaagtacaagatcaaggtgccaatttggttcctgttaagagatctcttcctagcttttagagggcctccttctcaccatgtcctcacatggcagagagggagcactcttgtgtgttttcttcttatgaggaaccagccctatcgaaatagtggtccacccttttgacctcatttaaccttaattacctactcaaggtcctagctccaaatatattggggg

SEQ ID NO: 17128 - DNA, 606 bp, Homo sapiens
agaactttctggccttggccagaaaggactcaagccagtctaatgtattgtctatattttaactcctggcctaccttgggaatttcagcattttatctgttctaatgcctgatggggactcgcttatttctttattcagcagtttattctgagcacaaactgtgctctaggctctgtgtggggtacctgggattagtagctaaaataagagtctctgttctttagaagtttccatgataatgggtcaaacaaacacatcaacagacagtttacarttccatgtgataggcacggtgggctggggccggatcaggggagtctgtggaagcccatgcaggggcacctggggctgaaagcctgggaaggcctctgggagggaacatctgcaaggaatgtggagttctctgtggtgcagggcagggcagcctagtggcagagcagtgagcaggagggctggggtcagggcgtgtgagctctcagtgtggtggggcataggcataggcatggggcggaaggagaaagctttgacaggtattgggacaccttgtggaggagcaggtggacattaaaccccaagtggctttttatatcatattattgagttgg

SEQ ID NO: 17129 - DNA, 551 bp, Homo sapiens
tatcccataaatatgtgcaattatgtgtcagttaaaaaaaatagatgctgtggttttcttattaacttgggggtaggaagtgttcctgggckttccgggcctggcttgggtcctgccctggggcctgtgctgcagcctggccttcctgggtcctgcacttagagcttcttcccacccgcaggagtggggtaggaagtatctgagtgctgggctcgtccctggcctgccgttacattctttctcctgaaggcttttagcccaaggcctagtgctgggttagagaggccagagttggagcaggaacatccacgcatgaataacaactgcaagagcaaattgattatttactgtgggctggacacaccctctgaggacttatcctttcatttaattctcagcacagcccagaaagtaggtaggattattggccttgtcttatagacaaaggggctgaggcccaagatagtaaagggagttgccctgggtcacacaaatccaggatctaccccagacagtcttattccagagtgtggattcttaaccatcttaac

SEQ ID NO: 17130 - DNA, 554 bp, Homo sapiens
ttttttaaatgggaactggaggcccagagaggttggagaacgtatgcaagatgacacagctcctaaatttgggtgtagtggggctgggttctaaggcagccatcatcaggggtatgctctcagcattctgtcccacccctctcatgacctacagccagagaacagaggctccaggtgggtctgtgggacacaggagcatctttgtagaatatagagtcttcttaaaaatttctttaattcttaaaaattaagtacagaaacatgagtgaaaattcaacagcctctgattaaggaaattcttaaccactgagcacaggcaaagacgctcatctctttggctttcagtctgacttactgatccacccatgtcacygagaggaacagaaaacagaggcccctgtggccccactctgtgcaatgccaggctccatttgcctctgcctgtctctgcctcatttctccaggctctgccttgcccagaacccagcagaggcccactgagtgctcctgggtaaggctcacctgctgggaggcctcagcacagccccaggggg

SEQ ID NO: 17131 - DNA, 526 bp, Homo sapiens
agtttcaccatattggtcaggctggtcttgaactcctgatctcctgattcgcccgcctcggcctcccaaaatgctgggattacaggcgtgagccaccacgcccggccaggattggctgcttcttggccaacctaggacttggggaaaaaggatagataagagaggttgaggggttttgtgggagcaaactttcgatccagtctactcacaggacctcccaaaaactccatgccattttcatctctgaaattgctttgaacatgcctctggtctgtgaatcccacctgtctttacctaagcccttctcttcttttcctcctcccttaggactgtcctacaaaatttcccttaggtggtctatctcactgcttcccacaaatgagaaaggggaataaggtgttacaaatggccaattattcatgtgaaacagaactcttacatctccctccaccaacctgctcccctttcagaatttcctrtctcaatgaaaacatcaccttcctccttgtcaccaagcctagtaaag

SEQ ID NO: 17132 - DNA, 497 bp, Homo sapiens
aaaagccagaagcagaccataataaggatactatttataaaatcacagaggctcaaaggagttaaaatgagaaaatattcctaaaataaaacataaaaattataatgagttgatgttttgaaaaggcgctaaatgcatgaagaacctgattcaaaaacagggcctggggactttgatttcatggcatgatyttgagatgtatttggtgcagattttgaaattaaaaaaaaaaaagttccaggaaaggtaaaattaatctggaataaaatttctatggttgggccaaatgccattcggaattatcaggtcttgggataagctacagaaggaaatttaagcacattaccacttcttccaactgtgacacacagagttttcccagaagacaagtgaaatgaaagctgccaatgatctaggttttgaatagtaaggactgaccatcttcagtgtgccttaacaccacccacttgagagaaactgtgaataccaataaggca

SEQ ID NO: 17133 - DNA, 659 bp, Homo sapiens
gaagatgtgtatttgtatatacactgtaagtgtaacagagtgactaagaagggcgcttttcacacagaagcagattccctttcttccatagcctcctcttttttgcagggagatacgatttaagtattgtaaasagaagttcccgtgtagacactggactgtgcctcagcaaagtcataggacatagacatccctcttgttagaaaaccactggataatgacatcaaaaggggacaagcagtattcgttgtatacacagaaggctacagatggcctgaggcattgactgggtccctttcctgattcctagtagtaacatcaactgcaacaggcacagtccacagcacagcgctgtgtccaggcgactgaatatggttccctaagactaaatttctcatgtcaggtcccagtgaactaattttgggttccaaaaactgctctattaaactcttttcctctattttcccaggtaaagtcatcctctctagtcttctctggggatgagataatctggatctttctctatatgattgcaatgattgcagtagttttttgtgacatgaactccattctctacttcattgagggctttgcctttttttttttttttttgagccttttattttcactcaaagtttaatacaaagcaaatattttgg

SEQ ID NO: 17134 - DNA, 659 bp, Homo sapiens
gaagatgtgtatttgtatatacactgtaagtgtaacagagtgactaagaagggcgcttttcacacagaagcagattccctttcttccatagcctcctcttttttgcagggagatacgatttaagtattgtaaacagaagttcccgtgtagacactggactgtgcctcagcaaagtcataggacatagacatccctcttgttagaaaaccactggataatgacatcaaaaggggacaagcagtattcgttgtatacacagaaggctacagatggcctgaggcattgactgggtccctttcctgattcctagtagtaacatcaactgcaacaggcacagtccacagcacagcgctgtgtccaggcgactgaatatggttccctaagactaaatttctcatgtcaggtcccagtgaactaattttgggttccaaaaactgctctattaaactcttttcctctattttcccaggtaaagtcatcctctctagtcttcyctggggatgagataatctggatctttctctatatgattgcaatgattgcagtagttttttgtgacatgaactccattctctacttcattgagggctttgcctttttttttttttttttgagccttttattttcactcaaagtttaatacaaagcaaatattttgg

SEQ ID NO: 17135 - DNA, 521 bp, Homo sapiens
cagatatggaaaaatggctatccaaatagtggtatccttttacctacccaaaagtagcatatgaaaattttcattcttcatatgtttccaacacttaaaattgtccatcttttaaagtttagccatgctggatgtgaaacagcatagtttcatttgtacagccttaaaaaatgttattggtcactctagctattcttttttgtgaaatacctgctcaaattatgttgccaatttttagagtggggaaggggrgttgactgtctttccattattactttgagtgagttcattttatatattctggatattagtactctagataaaacaattgcaattttttagaagtttcatcattttatatttagataaataatccacctgcaattgatttttgggaatgctttgaggtgagagtcaaattcactcctcctcccattggtatgtccaactagcccacaacttatccaacttaatttactgaaaaccttttcccacttctctgccacctcatattttactga

SEQ ID NO: 17136 - DNA, 724 bp, Homo sapiens
atttggccctccaagcagccccttgaggtagacatgtggctagcccatatttctattctccccattttaaagattcagagagggagtgagtcttgggccaggtcacacaggaagtcacctacctcaagagctgggtctctgacagtccagggctgtgtctaatgaaagagctaacattgatcgagtgtcccagcatttcacaccacactcctaggggacgagatagtcgccacacttcccagtgtgtggctggatgctcagaaacgtagcgcaagtgactccgggtctagcagcttttgcttttctgttctgagggaagccagtcacctttcaataaagccaacaacaccatgctgaaaggaggcccaagctaaccacacacagacaccacgcaragaagaatggagggtcccaagcggccctgggctgaaccacaaggaacagagatgccctgaccttttcccagcccactctctaccccctaaaactcctgcccaaagtgcagaactctgagcaaataataaaaggatggtcgttttaagacattaattttgtttccttttttaatgcaatattatgcactcgtttttatgcacaggataatgcaggctatggagaaaaataaaacagaggaggcaaagaactgggggagagggagcaaatttaaacaggatagtcagggaattatttaagcccattcaccacaaagccacttggaaagaaa

SEQ ID NO: 17137 - DNA, 724 bp, Homo sapiens
atttggccctccaagcagccccttgaggtagacatgtggctagcccatatttctattctccccattttaaagattcagagagggagtgagtcttgggccaggtcacacaggaagtcacctacctcaagagctgggtctctgacagtccagggctgtgtctaatgaaagagctaacattgatcgagtgtcccagcatttcacaccacactcctaggggacgagatagtcgccacacttcccagtgtgtggctggatgctcagaaacgtagcgcaagtgactccgggtctagcagcttttgcttttctgttctgagggaagccagtcacctttcaataaagccaacaacaccatgctgaaaggaggcccaagctaaccacacacagacaccacgcagagaagaatggagggtcccaagcggccctgggctgaaccacaaggaacagagatgccctgaccttttcccagcccactctctaccccctaaaactcctgcccaaagtgcagaactctgagcaaataataaaaggatggtygttttaagacattaattttgtttccttttttaatgcaatattatgcactcgtttttatgcacaggataatgcaggctatggagaaaaataaaacagaggaggcaaagaactgggggagagggagcaaatttaaacaggatagtcagggaattatttaagcccattcaccacaaagccacttggaaagaaa

SEQ ID NO: 17138 - DNA, 522 bp, Homo sapiens
acaggggccgcactccttattgccactctacttgatataagaactgcagtgcatatcaagaatctggacacctccttggggtttgtttcaatggcacaagacaggcatataaccactaaaggcaaactttcatcaacaggggctggagaaatagcctagcacgtggagaagacatccatctccttccagccttagcccagagcaggaagagtctcacctgcagagctttcctttgctgtcccttgatgctgaggtggtggcccaggcagtgcccagggggccaggcctcacgcaacagagttattaactgccaagctaaactggacaaccaggagcccaaygttttcacatgtccttccccagggcccacttgccctgggctgagcacccaagtggccactctgtcacccagccctgccacgtggctctggagccagacaaatgcttacagccatacaagtgccacatatgcatacatgtacacatgccacagggccgcatatgcatacatgtacatatgcc

SEQ ID NO: 17139 - DNA, 536 bp, Homo sapiens
cctcacccccctgctcccaccctttccccctgggttgaatatttcaaatctatttcttccttaaatcttactcaaaggaaatccaataccatagtcagtttcaccaaggatgaatttcttgacccagaaaggaaagctcattttagggagatggtcagtttaggtatgtgtctgaattttatttaagatagatgaacgtggatatatagttatgcatttgggcctgaatttttttttctagttgttcttttcactgagctttcccaagaatccccccagaattaaaaaaaaaaaattactatctcctctccctggcatataaaatggttgggattagatttaccaaaccattacatctcccttttgtctgcctgcaaacagattttccaatccataggcccaaagtgaactcccacgtggagtaggatkaaaacccacagcatctagatcttcaaattctggagaaaaagagagtgtgaaagactgctcagtggctggggtgagagtcaagtctggccaggtgctaatctggagaa

SEQ ID NO: 17140 - DNA, 571 bp, Homo sapiens
atttctctgtgggcagggtcttgtctatcttgttattcactgtccctagtacctcacataagaactgtaataaaaagatactcagtaactattttcattcattatgctttactatttgattagggttttttttttttgccttcatgagaggttatttaatcaagttcccctaaaaattatgtagttttaattgaaaatactataaatttattcatgtgctttgttgaaagaatcaaaatctttaaaatcttgactctttccatttggggaaatggratatgactgtctatccactgaggtctcatttaataaatatttatctttactttcatgtagtttgttcacagttgttacatttaaatctaagtagtttataatttgtgctgctattgtgaatgagattttttcttacattatcttagcatttgtaatcgatgtaacttataaaacattattattataaaataataattgtatgtatttatatggtaactgaccatataactgaaatctctttttagttctagtatttatacaactttttcccttcaagttcctagaaatagttaca

SEQ ID NO: 17141 - DNA, 584 bp, Homo sapiens
attttttttttttttgccccattttacagatatgaaatgagaggctgtgttgaaggtgttttctggggttgatttaaatagaattaataaactcagaaaaaagattcttaatcgataaaggtgttttttttttgtttttgttttkttttttttttttgagtcggagtctcactctgtcgtccaggctggagtgcagtggcgtgatatcggctcactggaacctctgactccctggttcaagcaattctcctgcctcagcctcccgagtagctgggattacaggcatgcgccaccatgcccgtggtttcaccatgttggccaggatggtcttgatctcctgaccttgtgatccgcccaccttggcctcccataatgctgggattacaggcgtgagccaccgtgcccggccttggctttcattcttattgtcccatggttaccagagcctaaagaggtaaagaggtaggacctatgaggctctcacagtttgtttttttttttgtttttgttttttttttttttttgaaacagggtctcactctgtcgcccaggctggagtgcagtggcgcgatcttggctcactg

SEQ ID NO: 17142 - DNA, 617 bp, Homo sapiens
aacctgcctgtagaagccgctgcagtagaggcttttctggctctagaagcctctacagaatgtcctgggcctggggttgcccttcactagtattgtgagagaacctagtcatagggaccaagaccaggaacactcgccttgaccactcaatctctgcctgcttttagcagtgatttgctagacccatctttctataatggagattattttgtttgaaaaaaaccttattttttattaatggtggcggtgggggtgcataagcaatgctattccacagatgatgtgcacggaacaagtgagaagggaaagggaccttgtgctagaaccagtacagaattcagagccatttctcttggctgattatttggtgttggatagtggacaaagtgtttggtcctctctgatgaggtgcaggcattaatttctggtagattctgatgacactgctaggaaaagaaggtgtgacaacgattctataggagaaactgggggarggcgggtaaaaacaagaatgaaattccttttgaaatgtgcctagatactattcagaggaaattagtggttgaaagctggcagttggagcacaaagtattagacaatgacttagtatcatggcc

SEQ ID NO: 17143 - DNA, 645 bp, Homo sapiens
gtcacttgtgtttgttctgagtggcaagacaatatagtttctggtcaattctgtcttactacaagagtcctctaaaatcagaaatgttttgggcactgctagtaatttctaggccatgcaatttctgaccccaataactgtcacaggggattggcagatgctgctgttagaactgcccagtcccaatagctagccaggccagatgattatttggagttcaggcctcacaggcaagccaccagctctccctgaatattggttggactgaacttttggattaaacgaccagttgtgccaatgccaggtgaacatggttggaagcaatgagatgccaaatgaatcaactccatgggcactcctagtcaacagctgaatgcatcgtccatgtttttattctgtcgacccgatgccttgctaacacacrcccttgaccatataactgtgtgtcttcttcttaccaccctctccatttcttcctccctaaagtgctatgtcttgggctatcagtctcatttccactcttctgaacccacttccatttccacactgtccatgtggttctcaataattggagttactcctcctcctaaaaaattcatatttctctctctctaattcaccgtgcatagaaagacaactttacta

SEQ ID NO: 17144 - DNA, 526 bp, Homo sapiens
aggacatacagaagcaagagctgggaaggagaatatgaccagtgctcctggtaactgcagttgacaatctgcagtgcaacaggttcaatgttgaaacctcagaaaaacactagagaggctttgaaggatgcacatacgtcggagacagagaggactgagattctgcagtaatggagggctcagagttactgtaattaggccacctatattaatgtccataagttatacttacaggcttttgaaaaccacaaccatggagtccgcttctccaaacaaatctgaacatatttatacctgatttccattgatcaatttcaaactccccacacttgtacacaaggcacttcacaatctgaccccaaccccttccgtacatcgtcttctgccccctttccccactgagcctgttgtctatcttctttctccatgtttttcaggtcactsacttatacctctccccatatttcatcaacaatatcttccccacacctatttgtttctgatttatttattttcatcgagtctt

SEQ ID NO: 17145 - DNA, 597 bp, Homo sapiens
aaaactcagggaacttcaagraacagggtccttggcaaatgacatttgtctcagctggagttttgaaatgagctatattcagacagttcataagttgagtctctaacatgtagctgaaggtcagataaccaatattgtaactgaagggaaagccacatgctcccattgccagatacgtaagcagcagagcaccctttcgtgaacactgaggcgtctgcattgcactctcaccagaggggaggctgccccctccactctggaattggccatagacacacgaaaatactttggtcatatagatttcttatttttcagatttggctttttccactggaacatttgaaagtcaattttacatcagagtggatccacattgaatatccctggaggttatttccaacctttccatcattatttaaagtgtatctttccaaaaattatctttagtctaattaatattagcttttccaataagtggtttcatttattatactccaatagtgctttttctctatattatacgctatattatacaaaaaattatctatgctcttgttgtttaaaattatacaaatggtacatcaagagaatattcaa

SEQ ID NO: 17146 - DNA, 591 bp, Homo sapiens
tgagccaattctctaatttcttattttttatacacacaccattggttctgtgtctctggggaatcctgacttatacaatggtcttaccaatgagttgccaaggtccattgggtattcatgtggcaaaaaataaatcttgaatccttcttcacaccaaacataaaaatcaactccagatggattgtaatttaaatattaatgctaaaacaataaagcttctacaagttaacataggaggatatctttattgccttaggataggggaagatttctcattagatcacgaaaggcctaactgtatataaaagattgaagcatgtgactctcttaaaaggaawaacaattgtgaaaatccattaaagcattctgctctatcaaaggaggctgtgaccactcatttctgagaaatatctgtcatgtgaaaacataatcacatgattatgcataatcctaagcataatccctgggtgcttccaactcctggtcacccatctggagatacaacttctccataagcccctcaatcaacaagtgaaccactcgtttgtgtaccctaaacctttcaagtaaccataggcaaccctgggctga

SEQ ID NO: 17147 - DNA, 630 bp, Homo sapiens
atgattcccgcatcttcctgtatatgctttacctaagtaaacagatctataataaagttccttagaagattttttatatcttcctttccccaactactataataaacagctagttgccttagagaccactgcaggttttactattttacaacctggcctttagtactgacattaggcaaactcaatgttgtttaatagtgtcaaagaaaatactgaatggtctcctcataatcacaccagagattttccaatttgtgttgatagtagggagcttctggtgatctgggctaaggagtaagataatgaaaatagaatttagaatgttttgcttaggaatagatgtccaaatggataagacaaaaaagggaccagagacaagaatatcagagaggaaatggatgcttaatgtgaattgaaggaatgtctgaactagactaaaatccaaaattacaaatgagaagcacagggaaaccaggtggtaagtgtgtgctgagcagtagctagaagcttkgtgtggctgtgactggggtgcctgaaagggcctgggctctgcagaggtgtgttggaaggtggtgggctaggaggtcccctcttccctgccccccttccgtccttccatgaggtaattgc

SEQ ID NO: 17148 - DNA, 562 bp, Homo sapiens
tggagcrgagcctgggctgagccaggcgcgcaggggcctccgcacgtgccgcgccggtagcagacgccaagcgggcggacagtgagcgtgagaggccggctcggagtggccgccggagcagtgccggggatggaagaacagcccatcttcaccaccggagcacaggtcttccagattgaccccaacaccaaaaagcactggatgcctgcgagcaacaggcggccaccgtttcttacttctatgatgtcacaaggaacatctatgggatcgtcagtgtggacggagccaaggtgaccataaacagcacaatcacaccgaatatgaccttcaccaatgtgtcacagacgtctgggcagtgggccgacagcagagccaacacggtgtttggtttggggttttcctctgagcagcagctgacaaagttttcagagaaattccaggaggtggaggaagcggccaagacagccaaagacaagacccaggagaacatggagccctcgagtaataatcccgagaatccgggcatggagccccatcttctactccggcatccagtgtcaac

SEQ ID NO: 17149 - DNA, 562 bp, Homo sapiens
tggagcagagcctgggctgagccaggcgcgcaggggcctccgcacgtgccgcgccggtagcagacgccaagcgggcggacagtgagcgtgagaggccggstcggagtggccgccggagcagtgccggggatggaagaacagcccatcttcaccaccggagcacaggtcttccagattgaccccaacaccaaaaagcactggatgcctgcgagcaacaggcggccaccgtttcttacttctatgatgtcacaaggaacatctatgggatcgtcagtgtggacggagccaaggtgaccataaacagcacaatcacaccgaatatgaccttcaccaatgtgtcacagacgtctgggcagtgggccgacagcagagccaacacggtgtttggtttggggttttcctctgagcagcagctgacaaagttttcagagaaattccaggaggtggaggaagcggccaagacagccaaagacaagacccaggagaacatggagccctcgagtaataatcccgagaatccgggcatggagccccatcttctactccggcatccagtgtcaac

SEQ ID NO: 17150 - DNA, 562 bp, Homo sapiens
tggagcagagcctgggctgagccaggcgcgcaggggcctccgcacgtgccgcgccggtagcagacgccaagcgggcggacagtgagcgtgagaggccggctcggagtggccgccggagcagtgccggggatggaagaacagcccatcttcaccaccggagcacaggtcttccagattgaccccaacaccaaaaagcactggatgcctgcgagcaacaggcggycaccgtttcttacttctatgatgtcacaaggaacatctatgggatcgtcagtgtggacggagccaaggtgaccataaacagcacaatcacaccgaatatgaccttcaccaatgtgtcacagacgtctgggcagtgggccgacagcagagccaacacggtgtttggtttggggttttcctctgagcagcagctgacaaagttttcagagaaattccaggaggtggaggaagcggccaagacagccaaagacaagacccaggagaacatggagccctcgagtaataatcccgagaatccgggcatggagccccatcttctactccggcatccagtgtcaac

SEQ ID NO: 17151 - DNA, 562 bp, Homo sapiens
tggagcagagcctgggctgagccaggcgcgcaggggcctccgcacgtgccgcgccggtagcagacgccaagcgggcggacagtgagcgtgagaggccggctcggagtggccgccggagcagtgccggggatggaagaacagcccatcttcaccaccggagcacaggtcttccagattgaccccaacaccaaaaagcactggatgcctgcgagcaacaggcggccaccgtttcttacttctatgatgtcacaaggaacatctatgggatcgtcagtgtggacggagccaaggtgaccataaacagcacaatcacaccgaatatgaccttcaccaatgtgtcacagacgtctgggcagtgggccgacagcagagccaacacggtgtttggtttggggttttcctctgagcagcagctgacaaagtttkcagagaaattccaggaggtggaggaagcggccaagacagccaaagacaagacccaggagaacatggagccctcgagtaataatcccgagaatccgggcatggagccccatcttctactccggcatccagtgtcaac

SEQ ID NO: 17152 - DNA, 577 bp, Homo sapiens
actgagtagtgttgacataaaattaacgaaaattgttggagaaaatcagcttttggtgaatgtctgagcagaaaatctgggctttgagccctaggtaaacttactttcccacaccccacttccatagagtagacatattggaatagcctaaaatatctatctctaaaatggtacctttgaaacattctaaatttattatttcattctttcatcctcacccttaaaattttcattccaactctgcatcactggcttttaaaagttctccaatgccggccaggtgcggtggctcatgcctgtaatcccagcactctgggaggctaaagcgggttgatcacaaggtcaagagatcaagaccgtcctggccaacgtggtgaaaccctatctctactaaaaatacaaaaattagctgggcgtggtggtgcatgcctgtagtcccagctactcaggaggctgaggcaggagaatcgcttgaacctgggaggcagaggttgcagtgagatgagattccgccactgcactccagcctgggtgacagagtgagactctgtctcaraaaaaaaaaaaaaaaaaaaaa

SEQ ID NO: 17153 - DNA, 564 bp, Homo sapiens
gcatgaaatataaaatttttaaattgatamattggattatcaaaattataaacatctgtttctcaaaagataacattaaaatgaaaataattctggtgtggtgactcactcctgtaatcacagcattttgggaagccaaggtgggcagattgcttgagcccaggagtttgagagcagcctgggcaacatagcaagaccctgtctctacaaaaaatttaaaaattagctgagcatggtggtggacacttgtggtcctagctactggggaggctgaggtgggaggattgcctgagcctgggagtttgaggctacagtgagtgatgattgagccactgcactccagcctgggtgaccgagtaagatcctgtctcaaaaaagaaaaaaaaaaaaagaaagaaaagaaaagaaaaacaacgaccaaaagccattgtctcaagaaaatatttgcaaggggcatatctgacactgaactggtactcatattttttattattgatttgcagaagttctttatatattcaaagttataaaataggcagaattaatctgtgattatagaacaca

SEQ ID NO: 17154 - DNA, 595 bp, Homo sapiens
ttttaaaatttttttatttttattttttgtagagaaaagatctcgttatgttgaccaagctggtctcaatgtcccggcctcaaatgaccctcctgcctgagcctcccaaaggtctgggattacaggcatgaggcatcsagccacagttggtttttgtatgtcaatcttatattcttcaacttgctcaagtgagaagaaacaatctgcctgatctcaaggcctattccataattatggtatttaaaactatatgggattagcagaagggtggacacatagatcagtgaaacagtagagaactcagaaatagatccatataaacatgccctagtgatgttttaaaaataaattttattgtgtatatttgaggtttacaacatgataggtttttttggtttggggtttttggggtttttttttgaaacagggtctcactctgttgtccaggctggagtgcagtggtgcaatcacagctcactgtagcctcgaccttccaggctcaagtgatcctctccctcagcctcccagacagttggggctacaggtgtgcaccaccacgcccagctaatttttcatatatatatatatatatata

SEQ ID NO: 17155 - DNA, 595 bp, Homo sapiens
ttttaaaatttttttatttttattttttgtagagaaaagatctcgttatgttgaccaagctggtctcaatgtcccggcctcaaatgaccctcctgcctgagcctcccaaaggtctgggattacaggcatgaggcatcgagccacagttggtttttgtatgtcaatcttatattcttcaacttgctcaagtgagaagaaacaatctgcctgatctcaaggcctattccataattatggtatttaaaactatatgggattagcagaagggtggrcacatagatcagtgaaacagtagagaactcagaaatagatccatataaacatgccctagtgatgttttaaaaataaattttattgtgtatatttgaggtttacaacatgataggtttttttggtttggggtttttggggtttttttttgaaacagggtctcactctgttgtccaggctggagtgcagtggtgcaatcacagctcactgtagcctcgaccttccaggctcaagtgatcctctccctcagcctcccagacagttggggctacaggtgtgcaccaccacgcccagctaatttttcatatatatatatatatatata

SEQ ID NO: 17156 - DNA, 1419 bp, Homo sapiens
acccttggctggttcacagccatctgctgctgttatctctaccactttcgaccacaaaaacttatccccatcttctttagtaagcatgacacaatgacatctcataggtgtcagatgcctaagagattgaaaacatagcacaggaaggaagctgttgcaccatacaaccattgtgtgtgtgtgtgtgtgtgtgtgtgtgtgcacrcgccacaaactaaagtggaaaagtgtcacaggtatatcatttaggagaccttaatcacttctcctgaagcatctgccaacatataatcaacaaagttttgagattgggcgcagtggctcactcctgtaatcccagcactttgggaggccaaggcaggcagatcacttgctctgaggaattcgagaccactttaggcaacatggtgaaccccatctctacaaattaaaaacaaaaaacaaaaattacccagtagtggtggtgcaagcctgtagtctcagctactcaggaggctgaggtgggaggatctattgagctcgggaggtcgaggctgcagtgagccgtgatcacgccactgcactgcagcctgggcaacaaaaaaaactgtctcaaaaaaaaaaaaaaaaaaaccaaaccaaaacaaaaaacaaacaaacaaacaaaaccccaaaaaacaaaaaagttttgacgaaaggcatttctgtttcttaatacttctttcccccctcattttgcaaaacagaggtattccctaaaaagtatctgcacaggaggattgcttgagcccaggagctcaaggctgcagtgaactatggtcatgccactgtactccattctgagcgacaaagtaagaccttgtctttaaaaaaaaaagttatctgcaagggtacaatgtatattattcaggtgatggttgcactaaaagcccagacttcatcactaagcaatatatccatgtaacaaaactgcacttacatcccttaaatttaacaacaaaaagttatctgcaaaatgtactcctataaatctagtcccttccacctacttccattagaaaattaaaagctacatttccatagtgggaaaaatctgctagctcaacaataaccacaattaagaagacaacaaacctacaatactatttaagtgaaaaatgcacagcaggctgggcgcagtggctcacgcctgtaatcccagcactttgggaggtcgaggcgggtggatcacctgaggtcaggagttcaaaaccagcctggccaacatggtgaaaccccatctctactaaaaatacaaaaaatttattgggtgtggtggcaagtgcctgtaatcccagctaatcggaaggctgaggcaggagaatcgcttgaaccctggaggcagagattgcagtgagccgaggttgcaccattgcactccagcctgggcaacaaaagcga

SEQ ID NO: 17157 - DNA, 1419 bp, Homo sapiens
acccttggctggttcacagccatctgctgctgttatctctaccactttcgaccacaaaaacttatccccatcttctttagtaagcatgacacaatgacatctcataggtgtcagatgcctaagagattgaaaacatagcacaggaaggaagctgttgcaccatacaaccattgtgtgtgtgtgtgtgtgtgtgtgtgtgtgcacgcgccacaaactaaagtggaaaagtgtcacaggtatatcatttaggagaccttaatcacttctcctgaagcatctgccaacatataatcaacaaagttttgagattgggcgcagtggctcactcctgtaatcccagcactttgggaggccaaggcaggcagatcacttgctctgaggaattcgagaccactttaggcaacatggtgaaccccatctctacaaattaaaaacaaaaaacaaaaattacccagtagtggtggtgcaagcctgtagtctcagctactcaggaggctgaggtgggaggatctattgagctcgggaggtcgaggctgcagtgagccgtgatcacgccactgcaytgcagcctgggcaacaaaaaaaactgtctcaaaaaaaaaaaaaaaaaaaccaaaccaaaacaaaaaacaaacaaacaaacaaaaccccaaaaaacaaaaaagttttgacgaaaggcatttctgtttcttaatacttctttcccccctcattttgcaaaacagaggtattccctaaaaagtatctgcacaggaggattgcttgagcccaggagctcaaggctgcagtgaactatggtcatgccactgtactccattctgagcgacaaagtaagaccttgtctttaaaaaaaaaagttatctgcaagggtacaatgtatattattcaggtgatggttgcactaaaagcccagacttcatcactaagcaatatatccatgtaacaaaactgcacttacatcccttaaatttaacaacaaaaagttatctgcaaaatgtactcctataaatctagtcccttccacctacttccattagaaaattaaaagctacatttccatagtgggaaaaatctgctagctcaacaataaccacaattaagaagacaacaaacctacaatactatttaagtgaaaaatgcacagcaggctgggcgcagtggctcacgcctgtaatcccagcactttgggaggtcgaggcgggtggatcacctgaggtcaggagttcaaaaccagcctggccaacatggtgaaaccccatctctactaaaaatacaaaaaatttattgggtgtggtggcaagtgcctgtaatcccagctaatcggaaggctgaggcaggagaatcgcttgaaccctggaggcagagattgcagtgagccgaggttgcaccattgcactccagcctgggcaacaaaagcga

SEQ ID NO: 17158 - DNA, 1012 bp, Homo sapiens
gatcctttttgaaatttccttgttttttattgttgcattttagagtttttgagtttattctgttttgtttactgtagtatctccagagtctggaatagcacctgccacaaaggaagctatttcctgaggaaatgagggaataaatgaagggatggataaatgaatgaatgaatgagacagactatgcctcgtggtaggatttatataaaatragaataatataaaaataatgcaattttatatatgcatatcactcattccatatatgtgattgtgagatgtatcccatcctgtgtggtgtgtgtctgtgggtatgtatgtgtgagtggtgagtttgtgcatgctgcttatgtggatctagccaattgaccactgtgcaggaggaagaactcagaacttggagtcaggaatccggcttcacatccctgctcggtcacttgttaactatatgacagtaagtatgtttctcgacttttccaaacctgggtttattcacgttaacatggggataaaagtacctctttcatagatttgttatgggggtgaaatgagacaacatacaacataattaaaacaccttacaaatgagaaatgcttagaaaaaactattttttatatgtatgcttttcttttgatttcctaatttttaatttacataaggtaatattcaccgattttagtgtatagttgtatgattttggatcccaatcaagttttggtttttttttttggagatggagtctcgatttgtcacccaggctggagtgcaggggcacaacctcggctcactgcaagctccgcctcctgggttcacgccattctcctgcctcagcctccccagtagctgggactacaggtgcctgccaccacgcccggctaattttttgtatttttagtagagacggggtttcaccgtgttagccaggatggtctcgatctcctgacctcgtgatctgcctgcctcagcctcccaaagtgctggaattacaggcgtgagccaccacacctggcc

SEQ ID NO: 17159 - DNA, 1012 bp, Homo sapiens
gatcctttttgaaatttccttgttttttattgttgcattttagagtttttgagtttattctgttttgtttactgtagtatctccagagtctggaatagcacctgccacaaaggaagctatttcctgaggaaatgagggaataaatgaagggatggataaatgaatgaatgaatgagacagactatgcctcgtggtaggatttatataaaataagaataatataaaaataatgcaattttatatwtgcatatcactcattccatatatgtgattgtgagatgtatcccatcctgtgtggtgtgtgtctgtgggtatgtatgtgtgagtggtgagtttgtgcatgctgcttatgtggatctagccaattgaccactgtgcaggaggaagaactcagaacttggagtcaggaatccggcttcacatccctgctcggtcacttgttaactatatgacagtaagtatgtttctcgacttttccaaacctgggtttattcacgttaacatggggataaaagtacctctttcatagatttgttatgggggtgaaatgagacaacatacaacataattaaaacaccttacaaatgagaaatgcttagaaaaaactattttttatatgtatgcttttcttttgatttcctaatttttaatttacataaggtaatattcaccgattttagtgtatagttgtatgattttggatcccaatcaagttttggtttttttttttggagatggagtctcgatttgtcacccaggctggagtgcaggggcacaacctcggctcactgcaagctccgcctcctgggttcacgccattctcctgcctcagcctccccagtagctgggactacaggtgcctgccaccacgcccggctaattttttgtatttttagtagagacggggtttcaccgtgttagccaggatggtctcgatctcctgacctcgtgatctgcctgcctcagcctcccaaagtgctggaattacaggcgtgagccaccacacctggcc

SEQ ID NO: 17160 - DNA, 1012 bp, Homo sapiens
gatcctttttgaaatttccttgttttttattgttgcattttagagtttttgagtttattctgttttgtttactgtagtatctccagagtctggaatagcacctgccacaaaggaagctatttcctgaggaaatgagggaataaatgaagggatggataaatgaatgaatgaatgagacagactatgcctcgtggtaggatttatataaaataagaataatataaaaataatgcaattttatatatgcatatcactcattccatatatgtgattgtgagatgtatcccatcctgtgtggtgtgtgtctgtgggtatgtatgtgtgagtggtgagtttgtgcatgctgyttatgtggatctagccaattgaccactgtgcaggaggaagaactcagaacttggagtcaggaatccggcttcacatccctgctcggtcacttgttaactatatgacagtaagtatgtttctcgacttttccaaacctgggtttattcacgttaacatggggataaaagtacctctttcatagatttgttatgggggtgaaatgagacaacatacaacataattaaaacaccttacaaatgagaaatgcttagaaaaaactattttttatatgtatgcttttcttttgatttcctaatttttaatttacataaggtaatattcaccgattttagtgtatagttgtatgattttggatcccaatcaagttttggtttttttttttggagatggagtctcgatttgtcacccaggctggagtgcaggggcacaacctcggctcactgcaagctccgcctcctgggttcacgccattctcctgcctcagcctccccagtagctgggactacaggtgcctgccaccacgcccggctaattttttgtatttttagtagagacggggtttcaccgtgttagccaggatggtctcgatctcctgacctcgtgatctgcctgcctcagcctcccaaagtgctggaattacaggcgtgagccaccacacctggcc

SEQ ID NO: 17161 - DNA, 1012 bp, Homo sapiens
gatcctttttgaaatttccttgttttttattgttgcattttagagtttttgagtttattctgttttgtttactgtagtatctccagagtctggaatagcacctgccacaaaggaagctatttcctgaggaaatgagggaataaatgaagggatggataaatgaatgaatgaatgagacagactatgcctcgtggtaggatttatataaaataagaataatataaaaataatgcaattttatatatgcatatcactcattccatatatgtgattgtgagatgtatcccatcctgtgtggtgtgtgtctgtgggtatgtatgtgtgagtggtgagtttgtgcatgctgcttatgtggatctagccaattgaccactgtgcaggaggaagaactcagaacttggagtcaggaatcyggcttcacatccctgctcggtcacttgttaactatatgacagtaagtatgtttctcgacttttccaaacctgggtttattcacgttaacatggggataaaagtacctctttcatagatttgttatgggggtgaaatgagacaacatacaacataattaaaacaccttacaaatgagaaatgcttagaaaaaactattttttatatgtatgcttttcttttgatttcctaatttttaatttacataaggtaatattcaccgattttagtgtatagttgtatgattttggatcccaatcaagttttggtttttttttttggagatggagtctcgatttgtcacccaggctggagtgcaggggcacaacctcggctcactgcaagctccgcctcctgggttcacgccattctcctgcctcagcctccccagtagctgggactacaggtgcctgccaccacgcccggctaattttttgtatttttagtagagacggggtttcaccgtgttagccaggatggtctcgatctcctgacctcgtgatctgcctgcctcagcctcccaaagtgctggaattacaggcgtgagccaccacacctggcc

SEQ ID NO: 17162 - DNA, 1012 bp, Homo sapiens
gatcctttttgaaatttccttgttttttattgttgcattttagagtttttgagtttattctgttttgtttactgtagtatctccagagtctggaatagcacctgccacaaaggaagctatttcctgaggaaatgagggaataaatgaagggatggataaatgaatgaatgaatgagacagactatgcctcgtggtaggatttatataaaataagaataatataaaaataatgcaattttatatatgcatatcactcattccatatatgtgattgtgagatgtatcccatcctgtgtggtgtgtgtctgtgggtatgtatgtgtgagtggtgagtttgtgcatgctgcttatgtggatctagccaattgaccactgtgcaggaggaagaactcagaacttggagtcaggaatccggcttcacatccctgctcrgtcacttgttaactatatgacagtaagtatgtttctcgacttttccaaacctgggtttattcacgttaacatggggataaaagtacctctttcatagatttgttatgggggtgaaatgagacaacatacaacataattaaaacaccttacaaatgagaaatgcttagaaaaaactattttttatatgtatgcttttcttttgatttcctaatttttaatttacataaggtaatattcaccgattttagtgtatagttgtatgattttggatcccaatcaagttttggtttttttttttggagatggagtctcgatttgtcacccaggctggagtgcaggggcacaacctcggctcactgcaagctccgcctcctgggttcacgccattctcctgcctcagcctccccagtagctgggactacaggtgcctgccaccacgcccggctaattttttgtatttttagtagagacggggtttcaccgtgttagccaggatggtctcgatctcctgacctcgtgatctgcctgcctcagcctcccaaagtgctggaattacaggcgtgagccaccacacctggcc

SEQ ID NO: 17163 - DNA, 991 bp, Homo sapiens
tttttttttttttttttttttttttgagatagattcttgctctgtcacccaggctggagtgcagtggcacgatcttggcctcacagcaacctccacctcccggggtcaagtgattctcctgcctcagcctccccagtagctgggactacaggcaagtgccaccacgcccagctaatttttgtatttttagtagagatggggtttcacatgttggccaggatgatctcgatctcctgtcctcatgatcctgcctcggcctcccaaagtactgggattacaggtgtgagccatcaagcccggcctatgaattttttaatgtaacaaaatttgagtggagaaggtacctttttattaaattctctcaacttaaaaatttatatagagtttgagagatcacrcaggtatgataatgagtattgtcattgagtaaaaactatttagaaatgatttagaacattcaataaaattgcaattagaggcataattcatacaactgtgcaaagaaatgcaactgtgtgtgatttttacttgaataaattattaatagagaattacaaaatagtgcttttctcactctattacttattctacacttttcatttctcatgttgctgcaaagaagagcttttgtccttcccccatttaagtgtgtatgtatatagtattttcttagtaacacctgactcatggattttttttaattcaatatattaaattgacaaagttaaacatatatttttaacttgtatttatatctttaacatataaatatgttttaacatataaatatatttaacttagccagtgtgaacttcctgaagtctggctcctatgtacttttgaaattatttaccaatattttacaagtatggtatggtttggctctgtgtcctcacccaaccctcatcttgaattataatccccaagtgtcgagggagagacttgtaatccccatgtggtcaagggagggatgtgattggatcatggaggc

SEQ ID NO: 17164 - DNA, 570 bp, Homo sapiens
taagctgtaaattgaggagtttatcatgggaactacatcaatgtgaaagacagaagatattttaccttcatttatagtcccagttgaggataatttaagacacaatgatgcacctaatccaaagaacagagaaatggcaattttgtggaaactgcaggtgctgaaaaattttgaccagccctcagtgaagctgataggataatggagaggtaaaaaaataagagataaagatggtgatactgggcacagtgaaaatgatgcctgctgcaatgaaaaccatsaactcactgacgtaggtgctggtgcaagagagctggagcagatgaagggtgtcacagaagtagtggttgatggtgtttgcctcacaggaggtcagtttcagcatgcacctggtatgggccatggccccagaaaagggccagaagtaggaaccaagcatatggctggaacacactttaggggacatggcaatgttatacagaagcgggttacagatggccatggccactagtgatcagagaccattgacgtcaaaacatagcattcagaaataacaaaaaaaaaaaaaaa

SEQ ID NO: 17165 - DNA, 554 bp, Homo sapiens
tgttctcttggtatatgattctatgggctagaggacaccacaagattgtgacttatgtgctaacgtacaaagaaagttttgctgagtgcaattcaagttccatcctatccatttgtccatgtgcaaatttcaagagctatgtggctggaactattcacccttcttaaagagtttggtctgtggctatccacggtaaactggatctccagacttctaaataatccctacagtctgctatagggcattagacaaatctgtgatgtttttactttctgagaaactaattgmtaagcattatgttaaaattcatattagtagctggttttttttggatataaacacagtatggctgattacataaaatttggaaaattagaaaaaaatacatagagaaaaagtcaccaaaaactaataaataagtgacaatctttgctgccattttgatatatttacctctcagtctgtttttctatgaatacaaatatatacagtgatatgttgcttaacaacaaagataagttctgagaaacgcatccttgggcgattttgtcatt

SEQ ID NO: 17166 - DNA, 1011 bp, Homo sapiens
tgtgttctttggttcaaaacttgaccaagaattgttgaccatttcataaaattacagcaccaatggcaacactaatcatgacattagagttgtcgatatagtatacctgtattgcctaccactgtagttgtctcagccctgtgattttttgataagatgcaaacatctgacatttcattttgtgttctagtgaagttgtgcccaaggtatttgcacactgaaatacacactgtattattttctctcttttttataatatagtcaaggcattttattttaattatgtatataggtaatttgtattatttatgaatttcatgataataaaaaagacattacaaaatatgtgttttaaaaggagcattaggtctgagaatcactgctctaggacaatgagacagaggctggtgcaagatatttgagagttgactacatagaagtatagctgccgggcacggtggctcaagcctgtaatcccagcactcagggaagctcaggtgggtggatcacttgacgtcaggagtccaagaccagcctggccaacatggtgaaagcccatctctactaaaagtacaaaaaagttagctgggcgtagtggtgtgcacttgtagccctagctacttgagaggctgwggcaggagaatcacttgaacctgggaggtggagagtgcagtgacatgacctcagctcactgcagcctgggtgacagagcaagactccgtctcaaaaaaaaaaaaaaaaaaaaaggaagtatagctgaagccacagggaagactcagctgcttatgagatgtctagtttggagtgccatgcttttaaaaatgatacaggggccaggcgcggtggctcacgcctgtaatcccagcactttgggaggccgaggcgggtggatcatgaggtcaggagatcgagaccatcctggctaacaaggtgaaaccccttctctactaaaaatacaaaaaattagccgggcgcggtggcgggcgcctgtagtcccagctactggggagg

SEQ ID NO: 17167 - DNA, 1011 bp, Homo sapiens
tgtgttctttggttcaaaacttgaccaagaattgttgaccatttcataaaattacagcaccaatggcaacactaatcatgacattagagttgtcgatatagtatacctgtattgcctaccactgtagttgtctcagccctgtgattttttgataagatgcaaacatctgacatttcattttgtgttctagtgaagttgtgcccaaggtatttgcacactgaaatacacactgtattattttctctcttttttataatatagtcaaggcattttattttaattatgtatataggtaatttgtattatttatgaatttcatgataataaaaaagacattacaaaatatgtgttttaaaaggagcattaggtctgagaatcactgctctaggacaatgagacagaggctggtgcaagatatttgagagttgactacatagaagtatagctgccgggcacggtggctcaagcctgtaatcccagcactcagggaagctcaggtgggtggatcacttgacgtcaggagtccaagaccagcctggccaacatggtgaaagcccatctctactaaaagtacaaaaaagttagctgggcgtagtggtgtgcacttgtagccctagctacttgagaggctgtggcaggagaatcacttgaacctgggaggtggagagtgcagtgacatgacctcagctcactgcagcctgggtgacagagcaagactccgtctcaaaaaaaaaaaaaaaaaaaaaggaagtatagctgaagccacagggaagactcagctgcttatgagatgtctagtttggagtgccatgcttttaaaaatgatacaggggccaggcgcggtggctcacgcctgtaatcccagcactttgggaggccgaggcgggtggatcatgaggtcaggagatcgagaccatcctggctaacaaggtgaaaccccttctctactaaaaatacaaaaaattagccgggcgcggtggcrggcgcctgtagtcccagctactggggagg

SEQ ID NO: 17168 - DNA, 538 bp, Homo sapiens
ccaacagcaaaacgctgtatttcctgttaaaatacaagttaataaagaaaatagagaaactaaatactaacatatcatgttattttaataactatttaaatatgaggtgtggtggctcacacctgtaatcccagcactttgggaggctgaggcaggtggatcacaaggtcaggagatggagaccatcctggctaacacagtgaaaccccgtctctactaaaaaaaaaaatacaaaaattagccgggcatggtggcaggtgcctgcagtcccagctactcgggaggctgaggcaggagaatggcgtaaacccgggaggyggagcttgcagtgagccgagatcgtgccactgcactccagtctgggcgacagagcgagactccatctctaaaaaaaaaaaaaaaaaaaagagtaaaacataatgaaaagcatatgcttgcttggtgctaatgacgttttacagtcttatagatgaagcaacatgtgtaatttcaaccagatgttgaaatggtttaggattagtatctaaagacaagtatt

SEQ ID NO: 17169 - DNA, 592 bp, Homo sapiens
atgtatcaatttttttatgctataaaatgacagtttagtcctatgctctgaaaactagttaaaaaggcaggttcctcctaagataatcaacatgtaaaatagggattcattcccaaacagtcctcattgtgacagaattctcattgcccagcaggaatggcactccagaacacagccagccttctgaccaagtcactcagagcaacactcttctgtgaattttagttcctttctattgggaaatatttcatgtagttatcatcaatcatcttttagttaagtragtaattaacagcccacacagttagacccacagctacccaggtcatgtctctgctgtctaagacccacaacacaagaactaattaatctaggctgaactatctgatcttcattcatgtcccagaggtacgtacaaatgagcagcaaaagcgaggcatggtggcgcacatttgcaatcccagcactttaaagacggaggcaggcggatcacttgaggccaggagttcaagaccagcctggccaacatggcaaaaccctgtctctactaaaaatacaaaaattagctgggcatggtggtgggcacttctta

SEQ ID NO: 17170 - DNA, 605 bp, Homo sapiens
cactggccttgactctcctgccttccgttgggtgaactcagtgcagakcatggagcaggtcacgatgctctcaagttggttccctctgagcgaggagctcttggtgagcaaccccgtgtgtggtccggttgcactttttagatacttcatgcagaagcccaaagccttagtcactggtctctgagcccatagccaccgtatttggaatcttttgggattacaatcagggtaccaatgattccttttactttacactatttgcataaatatgtgattattaatacatagctcaactcttaagggttttgttgacggaagtaactctaacttcttcgtggatatttcaaagccatgtttcttttttgtgtgcgttttgtacacttgtatgtataatacaagtggaatagggatgtgactagtggccaaaacattaacttcttttaataatggccgccattcaatgaacacagtctttgggccaggctctttgtgaggtgccttacaatctgtttaattctctgcaaacttattttacgtattgggacattgaggctatgagaaggtaagtagcttgcgaagcgggtagagctagacctcaaacccat

SEQ ID NO: 17171 - DNA, 566 bp, Homo sapiens
tgcccagagcaggccacttaycagttgcaggttagcagagaaagcctgatgttcccggacggccttcccagaagggaggccctgggatatcacacacacatggatctccataagttgctgtgcctgcatgcctggcgctcctgtgtggcagccatcggggctggggtaacactagaggctgagggggtgggcagtgctaaaataggaacatggttgggaacctaaaagaagcccacactgtcaggggcatcgagacaaaagccgagttccctggggacttaccagaacattccagccccacccccgacctgagctcccccaaagagaacccttccccactggaggcatggccccttcaggggagcagtgagaagctttgccagctgcaagtcccctggatcagctcacacctcagaacatcttgtccccagtgagctggcaggggcgccggcccagggcggggggcgctgctgtatctaaccggatcgattgtgcataaccgtctaggccggttcgtggaatgttcgtggggccccctgcccctccctcagcctccccccgcatcc

SEQ ID NO: 17172 - DNA, 566 bp, Homo sapiens
tgcccagagcaggccacttatcagttgcaggttagcagagaaagcctgatgttcccggacggccttcccagaagggaggccctgggatatcacacacacatggatctccataagttgctgtgcctgcatgcctggcgctcctgtgtggcagccatcggggctggggtaacactagaggctgagggggtgggcagtgctaaaataggaacatggttgggaacctaaaagaagcccacactgtcaggggcatcgagacaaaagccgagttccctggggacttaccagaacattccagccccaccccygacctgagctcccccaaagagaacccttccccactggaggcatggccccttcaggggagcagtgagaagctttgccagctgcaagtcccctggatcagctcacacctcagaacatcttgtccccagtgagctggcaggggcgccggcccagggcggggggcgctgctgtatctaaccggatcgattgtgcataaccgtctaggccggttcgtggaatgttcgtggggccccctgcccctccctcagcctccccccgcatcc

SEQ ID NO: 17173 - DNA, 566 bp, Homo sapiens
tgcccagagcaggccacttatcagttgcaggttagcagagaaagcctgatgttcccggacggccttcccagaagggaggccctgggatatcacacacacatggatctccataagttgctgtgcctgcatgcctggcgctcctgtgtggcagccatcggggctggggtaacactagaggctgagggggtgggcagtgctaaaataggaacatggttgggaacctaaaagaagcccacactgtcaggggcatcgagacaaaagccgagttccctggggacttaccagaacattccagccccacccccgacctgagctcccccaaagagaacccttccccactggaggcatggccccttcaggggagcagtgagaagctttgccagctgcaagtcccctggatcagctcacacctcagaacatcttgtccccagtgagctggcaggggcgccggcccagggcggggggcgctgctgtatctaaccggrtcgattgtgcataaccgtctaggccggttcgtggaatgttcgtggggccccctgcccctccctcagcctccccccgcatcc

SEQ ID NO: 17174 - DNA, 549 bp, Homo sapiens
ccagcagcaacgtgcccagcctctggggttaagattcagctgagccgttcttggcaatgccttttgccggggttgtttgtaatctgggcgtgtttcccagctctggccagcaagcttgaaggggtcgggtgtttctggacaagggagagagaggccttgttgcccccttcccttccttactgcttcttatgaggacacaatgccaggggcttctgcagccatcttgtggccaggaggagcaagttaagagagcacactcaggctgggcgcagtggctcacrcctgtaatcccagagctttaggaggccgaggcaggagggttgcttgagtccaagagttcaagaccagccctgagtgacatagtgagaacttatctctacaaaaaaaaaaaagctcgtcagggtgacacacgcctgtagtcccagccactcagggaggctgaagtgggaggatcacctgagcccaggagttctaggctgcaaggagctgtgattgtaccactgcactccagcctgtttttctgagcctggttttccagccttctcatca

SEQ ID NO: 17175 - DNA, 601 bp, Homo sapiens
gaagccccttgctctctcactaggcagttccatctccccagattcagctgttttcaggctcccttcatttgccctgtacacaggtacccctcccaggttctgctgtttctaggcttcccgatttcccttgtatacgcatcagtttctagcttatgttgatcccagctgcctaagggattcagcaggtttagggagagtggaaggaagaagagagtcagaaagaggaggagaagaaagatggtcatcagggaagctcyggatttctcttgtgaccctaagcagcttgcatatgacagcctctgggcctctgcctctacaaataggtcccttaaggccatctgccctgggataccccaatcccctccccattgctgctgcccaggatctgagctttaagttggacatcctccggagggcccccgtcttggcaggagtgcttatgcttgcatgaggtgggacaggcaagagccttcccaagccaggagttcccttgtctctcctctgctatttccttcttgccttcccagcacccacgcccgcccccttttttttttctttttgagttggagtttcactgtgtcgcccaggctggagtgtagtg

SEQ ID NO: 17176 - DNA, 740 bp, Homo sapiens
ttactacctaagcagttcataaatatgcatggatttttgtcaacaaacaaagaaactagcgaatattttgataaaaatgcaccaaaatatgtcaggattatagtaaacattgatgttatctttcctataaaagctgagctccttttccttagtaaaataaattttctttaaaattcatcatgggtggaaatatcttcaaatatttgcatagagaactgtgctaaattgtgtttgaaggttgaaaaaatgcattgtaggtatttgagttgcctatctgacaacaaaaattcactaatgtaaagtaatattatacatcaaaagagtttctaatattttactaaggtatttcactgcttcttctttaagatgatctggtccatgagtaacccattctctctcctgaggctgatagtagcaaaggaggagacagttttctctggctgtgtctgaatcttctgaatacagcttggcctgttaattactgcagtttttcaactggcacaaatgaggcattaggaagtagcaaaagctttgcaagacataggtctgcttttactagttagagattttcaaaatagayccaccttgattatcttaaaatatttttataatccaaatagtggtactcaggaagtcaagaagttaaatgtttttcatgctacattttctttcatgacatcttcagtaatgcatcatttcagtatttggtcataaaagataaatttttcattcaaaggtaa

SEQ ID NO: 17177 - DNA, 641 bp, Homo sapiens
ggagtcttgcactgtcgcccggggttggagtgcaatggcgtgatctcagctcactgcaacctccacctcccgggttcacgcgattctcctgcctcagcctcgcgagtagctgggattacaggcgcacaccaccacacctggctaattttttgtatttttagtagagacaaggtttcactatgttggccagactggtcgcaaactcctgaccccctgatccacccgcctcggcctcccraagcattatttttaatctatggttcagagtcagtgacattgcctctctgaagcaggttttccaaacgaaaacgacaatgaaagccccaattcataagactgcaaaatgtcttcatttatcttggtgaactgggaggaggaggggacctgaggatagagacagtatatacgtaaatgtaagaagcacttttgagctttctatattgtacacgatggggaaaaagcacgttgttcagggatctctggctcattgtataagatggggtagacaataccatgtaattctttattcgaattgctttgtcttgctgcatggctttgtcatcagctgattttgcaattaccttaacaagcaaaggaaatgccagtcaagttcagcatctgggacctcctcaccattgcaa

SEQ ID NO: 17178 - DNA, 601 bp, Homo sapiens
ggagcggcttggagccgaggaggcggcggcagaggtggtttgggcagccccgcgcggcggataggcccaggcaaacaacacccattccccctcctcctcgctcagttcaactcccactcggccccggccacgccctgccgccaccgccccctcgggcagctttccgctcggcagccaggcctcggtcgggggcgggagagaggcggtgcctcgaagaaggcaccgcgaccgccggaaactacgagtaccgacagccttcgcggtagtgccccaccccctttctcccaccactcagcgcgcgtcaccctgggctcagccaatggagacagagccagggaaaaagggcgcccgggtccggatgcgcctcaggaaagccatgctccctgcgcgggggcagcgggcagttcacccagcgcgccgacctgtyggtggtccgcgcgcgcccacgtccgccgctctcgcttgcctggatcaagggccctacttttttctttagtggcaattggagggattgctggagggggtttttgagtggagggcgctgggaaatgagtagggggcgggatatcctgagacaacaagtttggctgtatggagggcc

SEQ ID NO: 17179 - DNA, 633 bp, Homo sapiens
acacacacayatatatatatatagagagagagagagagaagcaagaatgcaaacaattagcagtgccacacccaacgggtgcatagtcaaagcaaatataaaataaagacagagatttacctgacctaaccacactgatatcctcctttaatccttctccaataagtaagatatcacgtatggaaaggtttttaaactattaagcactagaccaatgtacactttaattacatacgtgggctgcctcaatgctgagagagtggcagatcctcatttaattcccacctgtgcctgactttgaccactttctctgagctttctcttcatttctgatttcaaggaaaggtgtaaggaacaaaaatagaaataatgatgtttaatacgatttagaagaagttcagaaataattgtgcttataccccctacaacttaactccctttcatgttctttggatgaatttatttaatccctaaatcttcttccttctctggagctaatactcctaaaataaagcttctttcctgttctgattacctggaatttaaatctctttttacagatttatccttccccctttttccttcaggggctctaactctttccctgactggaatttcttgggtcacagaagt

SEQ ID NO: 17180 - DNA, 633 bp, Homo sapiens
acacacacatayatatatatatagagagagagagagagaagcaagaatgcaaacaattagcagtgccacacccaacgggtgcatagtcaaagcaaatataaaataaagacagagatttacctgacctaaccacactgatatcctcctttaatccttctccaataagtaagatatcacgtatggaaaggtttttaaactattaagcactagaccaatgtacactttaattacatacgtgggctgcctcaatgctgagagagtggcagatcctcatttaattcccacctgtgcctgactttgaccactttctctgagctttctcttcatttctgatttcaaggaaaggtgtaaggaacaaaaatagaaataatgatgtttaatacgatttagaagaagttcagaaataattgtgcttataccccctacaacttaactccctttcatgttctttggatgaatttatttaatccctaaatcttcttccttctctggagctaatactcctaaaataaagcttctttcctgttctgattacctggaatttaaatctctttttacagatttatccttccccctttttccttcaggggctctaactctttccctgactggaatttcttgggtcacagaagt

SEQ ID NO: 17181 - DNA, 633 bp, Homo sapiens
acacacacatatayatatatatagagagagagagagagaagcaagaatgcaaacaattagcagtgccacacccaacgggtgcatagtcaaagcaaatataaaataaagacagagatttacctgacctaaccacactgatatcctcctttaatccttctccaataagtaagatatcacgtatggaaaggtttttaaactattaagcactagaccaatgtacactttaattacatacgtgggctgcctcaatgctgagagagtggcagatcctcatttaattcccacctgtgcctgactttgaccactttctctgagctttctcttcatttctgatttcaaggaaaggtgtaaggaacaaaaatagaaataatgatgtttaatacgatttagaagaagttcagaaataattgtgcttataccccctacaacttaactccctttcatgttctttggatgaatttatttaatccctaaatcttcttccttctctggagctaatactcctaaaataaagcttctttcctgttctgattacctggaatttaaatctctttttacagatttatccttccccctttttccttcaggggctctaactctttccctgactggaatttcttgggtcacagaagt

SEQ ID NO: 17182 - DNA, 606 bp, Homo sapiens
tacaggcctgagccactgtgcctggccttgattgcttgcttttgacagttttagtacaccrcagtttttttctctgtagatattgcaacattgttctttcctataaattaatcagtttttctttactatttttcctcctttaactgttaaattcatgttatagtctacagaaatgcttgttttgtttgtttgtttgtttgtttgtttgttttgacaaagcctagctgtagcccagactggagtgtaatgacacaatctcggctcactgcaatctcttgcctcccacgttcaagtaattctcctgcctcagcctcccaagtagctgggattaagcgtgcacaccaccatgcccagctaatttttttgtatttttagtagagatgggtttcgccatgttggccagtctggtcttgaactcctgacctcaggtgatccacctgccttgtcctctcaaagtgctgggattacaggtgtgagccattatgctcggctgtttttgtttttttaattattctatcaaaaccagcagtggtaagaccatatcactttatttctgctttgaatggtctttaccttatgagttgacttctgcctgtgatctgcatg

SEQ ID NO: 17183 - DNA, 2099 bp, Homo sapiens
tgaattaagaaaagtgatttttgttttacatcattgggcatcttctattgcttctttaaaaaatgattcttagaagtcttgtgtacctcaccccagttatgctgttatatctgagatatttttcctctccaaaactaaactgagtcttttaaaaaggaatagagacctttgtagaaaaaaaaaaaatctatggtcccaagaatgggtaaacattccagagaggttcttgtttttccccctacaggtctgcccatccctacaaattgcattcttgtaagaatactctcaaagtgagtcacaacaacaaagtaaacagagggtttctcaacgtgacagaggaagaatttttttrtttgaatttgcatgttgtttatattttcaagcaggaactggaagaaagaggtttcactctcattgaggatatccagtcatgagttctttttaagctttgctgttggctcaattcccttcagcagtgcatatttggactgggggactatgactcaatttcccttcctttcacctcacttactctttcatccatctttcccaacacgccatgaggagattctttgccaatgttcattccaaacttctgttgtagccacatctctccaccaatctattcctaccttcaaaagtccaagtttccaccctttcaaagttcctcatagcccttcctcattctctgctcatacgcatcctctgttgctcccctcgcacactgctaccccagctaacctcctctgtgtgtctttcttcttgcctaaaacaatatttttctaaaattcctaattcctttcccctttattatttggtctccaggtccataaataactattctgaatttcacctctaagaataattcttagagcaacacctttgccctcaattattatatttttcatatttttgccaagtacataaaatactgccttttatggctaggcttcccatatttcttaaatcaatatataaataaatcatgtttgtccttgttgttgccaattttatcaacaattctctctccttgggtcaagaataatgagaattctgattgtatatcctactgccaagatcgacgtgtaaggaacacatttggtatgttatagtgaagcatggctatgtagtagcccagaagacgagaaaaaaggagttctgtacctggtcagatttgagagaaaagggaaaggaagggaggtgttagatagagaagcaggaggacaggatgagagcaacatggtgggaaaatgactcaatctaaaataattgtaattcccagtctcattttagtcaagtgatctgtgccagagttgcaagatgtagtagaaggacatcaacatgtaaggaatcctggtgaggcatcaggcataggagcccaattcaaagtatagaagaactgcagcagagagaagtataacatgggggaaattctgggtcattcaaaatagaaaactttaggaagcctcacaggttatgttggggtggatgggattgggactggcatttatttaaatacttcttaggtcaatatcaatattagggatgtacagtgagactggtcctatatatgagaaaattagtaagcccagctttggaactaggaagcatagagaaaaaaagagagtgagactgacagtaactttgattactcagacatttcatgtgcaatgtgtgaaagagaagaaaatcttctgtgtcattcaagccctagctgccatgcgtttgtggtttagttttggggagattaccactagggcctcagttttctcattggtcaaatctggttgttgagtcaggtattctccaagggttttctaatttctagagccctctaagtctgtgaagagtctctctagccctgtttacacctcaatccaattcaccatctcagccaaactaaattagtgcttagaaaggctttgctctttctttgactattctttggtatacatggtcctgcctagtgttgtgttggtaaacacttaacattacctgatttaaaatgtttcccaacttttatggtgtgaagattcccatcatagccaatgtcaagctaccaacgtgaggtcaactgactgcatggcagtgccccacca

SEQ ID NO: 17184 - DNA, 586 bp, Homo sapiens
aatgaaatcttgtcatttgcagtgtcatggatggaaattaaggacattatcatgagtgaaataagccaggtkcagaaagacaaatactacacgttctcactcatatgtaggagctaaaaatgtagatctcatggagacaatgagtagaatggtgatcaccagaggctgacaagggtatgtgggagatacggatgaagaaaggttggttaatcagtacatgcaattacatagaaggaataagttctggtgtttaatagcatagtaggacaactatatttatcaataatgtattgtgtatttccatatagctagaggacaagttttggagtgttcccaacacaaagaaatgataaatgtttgaggtgatggatagcccaatcactctgactggatcatgatacattgtatgcttgcatcaaaataccacatgtaccttgtaaacatgtactcttatgtagataaaaaattaatttcaaggggaagaaaccagaaaataaaagatgacaagaaaataatgtaaaatgaatatctaatatgtattgattacttactaaatatgagatacaatgataattatgtacatgca

SEQ ID NO: 17185 - DNA, 586 bp, Homo sapiens
aatgaaatcttgtcatttgcagtgtcatggatggaaattaaggacattatcatgagtgaaataagccaggttcagaaagacaaatactacacgttctcactcatatgtaggagctaaaaatgtagatctcatggagacaatgagtagaatggtgatcaccagaggctgacaagggtatgtgggagatacggatgaagaaaggttggttaatcagtacatgcaattacatagaaggaataagttctggtgtttaatagcatagtaggacaactatatttatcaataatgtattgtgtatttccatatagctagaggacaagttttggagtgttcccaacacaaagaaatgataaatgtttgaggtgatggatagcccaatyactctgactggatcatgatacattgtatgcttgcatcaaaataccacatgtaccttgtaaacatgtactcttatgtagataaaaaattaatttcaaggggaagaaaccagaaaataaaagatgacaagaaaataatgtaaaatgaatatctaatatgtattgattacttactaaatatgagatacaatgataattatgtacatgca

SEQ ID NO: 17186 - DNA, 650 bp, Homo sapiens
tgcatttcagatgtagtacatataggctccatttggtcatatatgaatatattgtggatcactttttggcaaagaattgtgatgctgtgattgaacaatgatgattaacttatggatttgggggacctgagggtagagtatacattactaggtttaaactcctggtgggcttttcaaactgaaaccaccctttctaaccccacccacggggtttttaacccatwaggatttccatagtcctaatctctttcactctaatccccacctcagggggggaaaataaaaaacccctttccattgcttaatgacaaaccagtcatggagccaagacaaagagtaatggaatgtttgtgctaagggagcccgatgtgccatttccacagcagtgatggcagggctgtaggaatcgaattctaggatgcctcaggtaagttttctccactaagcagaacttgcattagtcttgtcaacctttgtagtctccttttccctgcttttatgcccaattatgccattttctttcattccgattgatatttgtattcttttagtcacattttcaattagattatatattgttagattctattcacatcttaaaagtctgagaaactcctctctttaaggtgactttgtaattgctcagattt

SEQ ID NO: 17187 - DNA, 650 bp, Homo sapiens
tgcatttcagatgtagtacatataggctccatttggtcatatatgaatatattgtggatcactttttggcaaagaattgtgatgctgtgattgaacaatgatgattaacttatggatttgggggacctgagggtagagtatacattactaggtttaaactcctggtgggcttttcaaactgaaaccaccctttctaaccccacccacggggtttttaacccataaggatttccatagtcctaatctctttcactctaatccccacctcagggggggaawataaaaaacccctttccattgcttaatgacaaaccagtcatggagccaagacaaagagtaatggaatgtttgtgctaagggagcccgatgtgccatttccacagcagtgatggcagggctgtaggaatcgaattctaggatgcctcaggtaagttttctccactaagcagaacttgcattagtcttgtcaacctttgtagtctccttttccctgcttttatgcccaattatgccattttctttcattccgattgatatttgtattcttttagtcacattttcaattagattatatattgttagattctattcacatcttaaaagtctgagaaactcctctctttaaggtgactttgtaattgctcagattt

SEQ ID NO: 17188 - DNA, 354 bp, Homo sapiens
ctctgtggtgtcctaaacagcttccatatgcataattttcagatgaaggactgaagcttaagcagtttaagggacttctctgcaaaaaacacagctagcaaatggtacatctggaactagaaccagggcctccggtacgcaccttgtgtatttaaggggtaggcagcatcgtgggcttcytggatgcctgggccaatcctaagagaggactgcacacacagaatttagggtccacacaggcaaccgcctgagcatggtttctgcacaccatgatttcctgctgctcctctggtaccaggggagtattcatcccttgaaacctacccctggtattagagctcctcacctttgtcc

SEQ ID NO: 17189 - DNA, 354 bp, Homo sapiens
ctctgtggtgtcctaaacagcttccatatgcataattttcagatgaaggactgaagcttaagcagtttaagggacttctctgcaaaaaacacagctagcaaatggtacatctggaactagaaccagggcctccggtacgcaccttgtgtatttaaggggtaggcagcatcgtgggcttcctggatgcctgggccaatcctaagagaggactgcacacacagaatttagggtccacacaggcaaccgcctgarcatggtttctgcacaccatgatttcctgctgctcctctggtaccaggggagtattcatcccttgaaacctacccctggtattagagctcctcacctttgtcc

SEQ ID NO: 17190 - DNA, 914 bp, Homo sapiens
cacaaaaaggattttattttggcagctccaggaactactggatgaagcaaagaaagctagaattgggataaaccacattgactaattacttctcttcgttactattaggcataagacatatcttttgttgatttttgttataaaaattagataaacttgaatatcaatacattggcttcattcatccaagtgctatctcatggctaaaatagctatttaatgaatatgatttagaggatagcataatcctcctaatgagacaaaaacaactataatgttgagttcatcaactgactcttaaaatggttcacaggcgtgaaccaccgtgcctggcctaaaaatataaggttttattcagatgtttctacttttacattttgatactctgaagtttccaatttggaatttcaatagtttttagagatttaaagagatcaattttgacactgtaaaatatttgttttgctttaaaagtcaattcaaattatggccactttggtctcatatattgtgaggctggtttgttattaggggcataaagacttaggattgttatgttttgttgattaactgaaccttttactattgtgacatgacatttgttatttattgmtagaattttttttttttttgctatgaaatctactttgttattaatacagccactcctgctctgctgcctttggcaactgttagcatgtatctttttccatccttacaaccaatttgtgtctttacatttaaagtgcatttcttataggcagcctgcagttgggtcttgctttcttgctgagcctgacagtctgtattatagttgaggttcttagacaagtgtcgtttataatgtgactattgatacagttatgtttgtctagtagctgtttgattgctattagtcccaactgttctttgtt

SEQ ID NO: 17191 - DNA, 914 bp, Homo sapiens
cacaaaaaggattttattttggcagctccaggaactactggatgaagcaaagaaagctagaattgggataaaccacattgactaattacttctcttcgttactattaggcataagacatatcttttgttgatttttgttataaaaattagataaacttgaatatcaatacattggcttcattcatccaagtgctatctcatggctaaaatagctatttaatgaatatgatttagaggatagcataatcctcctaatgagacaaaaacaactataatgttgagttcatcaactgactcttaaaatggttcacaggcgtgaaccaccgtgcctggcctaaaaatataaggttttattcagatgtttctacttttacattttgatactctgaagtttccaatttggaatttcaatagtttttagagatttaaagagatcaattttgacactgtaaaatatttgttttgctttaaaagtcaattcaaattatggccactttggtctcatatattgtgaggctggtttgttattaggggcataaagacttaggattgttatgttttgttgattaactgaaccttttactattgtgacatgacatttgttatttattgatagaattttttttttttttgctatgaaatctactttgttattaatacagccactcctgctctgctgcctttggcaactgttagcatgtatctttttccatccttacaaccaatttgtgtctttacatttaaagtgcatttcttataggcagcctgcagttgggtcttgctttcttgctgagcctgacagtctgtattatagttgaggttcttagacaagtgtcrtttataatgtgactattgatacagttatgtttgtctagtagctgtttgattgctattagtcccaactgttctttgtt

SEQ ID NO: 17192 - DNA, 817 bp, Homo sapiens
cggtgactcacatctgtaatcccagcactttgggaggctgaggcaggcagatcacctgaggtcargagttccagaccagcctggccaacatggtgaaatcttgtctctcctacaaatacaaaaactagccaggcttggttgcgcactcctgtaattccagctacttgggaggctgaggcaggagaatctcttgaacctgagaggcagaggttgcagtgagccaagatcatgccactgcactccaactggggcaacagagtgacactccatctcaaaataaataaataagaaagcagaaactaataaattagaaaacagaaacatagaactaatttataaatcaaagcactatgccttgaaaagagggagaaaaattgtgaattaaggaagggaagagatggttggagaggaggtgggagaaggcagagataattgaaggagcaaaagcatctggagaagcaaagccactgaaagatgaacagggctctgaaagaaatgcttgattgctatcttttcaaatgactgcagttcccagtgacatcatttttctcctccctggaagtctgaggggcagttcacttatctactcccctcccctactcctcaccccacactcaaaacctgtctatgctcctttcattctcatatgacagatttcagatggcattcttatttccctgatttctttttgagatagcttgcatttccctactctatataaagccaccgtttatcaaatgcctacatggaccaagcagtccacaagggcttcacagacagttttactaaactcatgccaaaactttcaggttttata

SEQ ID NO: 17193 - DNA, 1438 bp, Homo sapiens
tgttttcctgaaaaaccactcaaattaatcaactgttctcatcgacctcacatccttgctcccattccaatccagctttcatttcacctgatccatggaaacagccttcattgagcttattgatggcctatatttgttaatattttgccagtgccagggggcaattctctctctctgtttacttggcctctcatgcttttgcaatcctgcatatgcagttccaacaggcttggactctcctctttgaatggtaaaggtcctctaactccggggcccaagtgtgatgatgtgcagatattatctggcaggactcaagtaaattgttccagttcctgccttacytctcagcacacatctggccactgctgaacagagacatgacagagcatcaacagcaagaccctttgacgaattcactgttcatcgcaatgctcctccaaatagtaaagaattggaaataacctaaatgtccaaactcaatggaatagtgagtcaaaatgtatcaaggtacaaggcctttaataaaggtgacctttccttgtcttcccagcctgggggctgatgttagctccttccctgctcctgtcccatagagcctgaggcacacccttggctacttcatgcctttaggcccatttcctggcagagttactccaataagtctccactcagtgttatagagggtgggaagagatgacatagtagagagagagggctggaggttcaggtgtggggaggagtcagccagtggcctcactgcgagggcaaaggtgcctgtgcaaggctgttgagggagaggttccatctaggcagggtttggggcccaggacactcagttaagggtccagttttagctccttcagcagagctggctggctgaaagtatcatgatcttgggccaacagagggagtctacggtcaattctggcatgttgaagtggccttgagaaaacaaaaaaacatggtaaatatgaaattacttcagagtgactggcaaacttggtacaagcagcccatgggtgttgcggaccctccacagtatttctggacaaattcactacttacccaaagtccttgtgagcttcgtggactttattggagactgtctatgggagagaagatggatgaggtgaggcattgggaagggttgataggtgagttaaagccttttttggcttgtctaccagtggtggtggggtctcttttggctctgccccccatgcaggacccagctgttcagatgggagtaagctcccgcccctactgcctccctattcttgctgcccatgcagagccacccgccctctgaaacgaatcttgaaacccagcctccataccctgcgtggctcacagctattgaccacagtgtttccccagccccccgatcaattttcttcttaagggaatctgaagctgttcaccttatttcttctcaata

SEQ ID NO: 17194 - DNA, 1438 bp, Homo sapiens
tgttttcctgaaaaaccactcaaattaatcaactgttctcatcgacctcacatccttgctcccattccaatccagctttcatttcacctgatccatggaaacagccttcattgagcttattgatggcctatatttgttaatattttgccagtgccagggggcaattctctctctctgtttacttggcctctcatgcttttgcaatcctgcatatgcagttccaacaggcttggactctcctctttgaatggtaaaggtcctctaactccggggcccaagtgtgatgatgtgcagatattatctggcaggactcaagtaaattgttccagttcctgccttacctctcagcacacatctggccactgctgaacagagacatgacagagcatcaacagcaagaccctttgacraattcactgttcatcgcaatgctcctccaaatagtaaagaattggaaataacctaaatgtccaaactcaatggaatagtgagtcaaaatgtatcaaggtacaaggcctttaataaaggtgacctttccttgtcttcccagcctgggggctgatgttagctccttccctgctcctgtcccatagagcctgaggcacacccttggctacttcatgcctttaggcccatttcctggcagagttactccaataagtctccactcagtgttatagagggtgggaagagatgacatagtagagagagagggctggaggttcaggtgtggggaggagtcagccagtggcctcactgcgagggcaaaggtgcctgtgcaaggctgttgagggagaggttccatctaggcagggtttggggcccaggacactcagttaagggtccagttttagctccttcagcagagctggctggctgaaagtatcatgatcttgggccaacagagggagtctacggtcaattctggcatgttgaagtggccttgagaaaacaaaaaaacatggtaaatatgaaattacttcagagtgactggcaaacttggtacaagcagcccatgggtgttgcggaccctccacagtatttctggacaaattcactacttacccaaagtccttgtgagcttcgtggactttattggagactgtctatgggagagaagatggatgaggtgaggcattgggaagggttgataggtgagttaaagccttttttggcttgtctaccagtggtggtggggtctcttttggctctgccccccatgcaggacccagctgttcagatgggagtaagctcccgcccctactgcctccctattcttgctgcccatgcagagccacccgccctctgaaacgaatcttgaaacccagcctccataccctgcgtggctcacagctattgaccacagtgtttccccagccccccgatcaattttcttcttaagggaatctgaagctgttcaccttatttcttctcaata

SEQ ID NO: 17195 - DNA, 1438 bp, Homo sapiens
tgttttcctgaaaaaccactcaaattaatcaactgttctcatcgacctcacatccttgctcccattccaatccagctttcatttcacctgatccatggaaacagccttcattgagcttattgatggcctatatttgttaatattttgccagtgccagggggcaattctctctctctgtttacttggcctctcatgcttttgcaatcctgcatatgcagttccaacaggcttggactctcctctttgaatggtaaaggtcctctaactccggggcccaagtgtgatgatgtgcagatattatctggcaggactcaagtaaattgttccagttcctgccttacctctcagcacacatctggccactgctgaacagagacatgacagagcatcaacagcaagaccctttgacgaattcactgttcatcgcaatgctcctccaaatagtaaagaattggaaataacctaaatgtccaaactcaatggaatagtgagtcaaaatgtatcaaggtacaaggcctttaataaaggtgacctttccttgtcttcccagcctgggggctgatgttagctccttccctgctcctgtcccatagagcctgaggcacacccttggctacttcatgcctttaggcccatttcctggcagagttactccaataagtctccactcagtgttatagagggtgggaagagatgacatagtagagagagagggctggaggttcaggtgtggggaggagtcagccagtggcctcactgcgagggcaaaggtgcctgtgcaaggctgttgagggagaggttccatctaggcagggtttggggcccaggacactcagttaagggtccagttttagctccttcagcagagctggctggctgaaagtatcatgatcttgggccaacagagggagtctacggtcaattctggcatgttgaagtggccttgagaaaacaaaaaaacatggtaaatatgaaattacttcagagtgactggcaaacttggtacaagcagcccatgggtgttgcggaccctccacagtatttctggacaaattcactacttacccaaagtccttgtgagcttcgtggactttattggagactgtctatgggagagaagatggatgaggtgaggcattgggaagggttgataggtgagttaaagccttttttggcttgtctaccagtggtggtggggtctcttttggctctgccccccatgcaggacccagctgttcagatgggagtaagctcccgcccctactgcctccctattcttgctgcccatgcagagccacccgccctctgaaacgaatcttgaaacccagcctccataccctgcrtggctcacagctattgaccacagtgtttccccagccccccgatcaattttcttcttaagggaatctgaagctgttcaccttatttcttctcaata

SEQ ID NO: 17196 - DNA, 531 bp, Homo sapiens
ctggccttttgcctaasgccccaaaccttagcacaagcctccaaaggactggcgctgaatttacctttctcttgcaaaaagaaagatagggatcaaaattaagttaatttatagaaaatgttgaaaagtgatatttactgtgcatatacatcttttaaaaatttaaactgttgatacatacatgagatgttcacagatgaggaagtccacaaaacatgaaaatatatgaaaaactggaacagataatttgtttttcaaacctccaaaatgcttactttacattactgtatttcatttatacattattgtatttcatttatatctgacacggctaaatgactggattgtgacataatatctcattatcacacaaaatgcatacacatttgaaaatacatgttatttccatacaaaatataagtatttgaaaatccatgagaataataagaaaaaatagcataaatatcgaatcatgtagtttaaaatttaagtaatgcatatgaaaatactttgcaggtactaaagcacaat

SEQ ID NO: 17197 - DNA, 536 bp, Homo sapiens
aggagggagaggaagagaaaagataaattattgggtactggccttaatacctgggtgatgaaataatctgtacaagaaaaccatgtgacatgagttagctatgtaacaaagccttcaaatgyacccccacacctaaaagttacaaaaaaagagcactaccaagtagcacttgttaactattttatattctattagatgggtacatttatcttggtttgatctttgaaaattgcctaagtagtacacatcaattatttaaatgtgatgtagattagatgacaatatctgaaaggatattaaagtgtttgtaattctagataattttgtaaagattgctatatagacatgttaatgatgtggtttataatttcccattgatattgagaaagcagtcaagaaatatgacttttctcgctatcatctcagtgttactatataaaataggaataatgatgatacctgccttgtaaggttgttgtgaagattaaatggcaataaatgttagctacagctattactggaacattcaaccattt

SEQ ID NO: 17198 - DNA, 548 bp, Homo sapiens
tgcataaagaagacaatttttgaaaggctctaactatcccaactctgcacagatcattaaaacttaacaagacaggctgggcgtggtggttcamacctgtaatcccagaaatttgggaggccgaggcaggcagataacttgaggttaagagttcgagaccagtctggccaacatggtgaaacccctctctactaaaaatacaaaaattagttgggtgcggtggcaggtgcctgtaatcccagctactcgggaggctgaggcacaagaatcgtttgaaccagggagggggaggttgcagtgagccgagatcgcaccacttgcactccagcctgagcaacagagtgaaactcagttttcaaaaaaaaaaaaaaaaaaaattaacaagacattaagtcttacctatttgaggatacacagcttttataaatgtgtctaccctttaaatacacaacttttttataatttgaacaactcaataataaacggtctcttttaacatggtgcatataaagtaatatgcgtaagtacttacaggtttctgctgtgga

SEQ ID NO: 17199 - DNA, 2018 bp, Homo sapiens
cggccaggcatggtggcttatgcctgtaatccaagcactttggaaggccaaggcaggtggatcacgaggtcaagagatggagaccatcctggctaacatagtgaaaccctgtctccactaaaaatacaaaaattagctgggtgtggtggcacacgtctgaagtcccaggtacttgggaggctgaggcaggagaattgcttgaacccgggaggcagaggttgcagtgagccaagatcgcaccactgcacaccagcctggcaacagagygagactctgtctcaaaacaaaacaaaacaaattaaacctcatttttaatattgtcataataccgtaaactgattaaaatttaacactatcctcaaacatccagtctgtgttcaaatttccccaattgcctcataagtgtcttcttttcctcctccttcctttaatattttgcattcctatgggcaatgtgtgagagcaccggcttccccacagcctggccaacaggacatgctgttaaacttttggattttgccaatttaatgagcaagaaatgatactttatgcaggtttaatttatatattattatgggtgaggataaacatcttatatgtttattatccatttgcatttatttttggcaaaattattgttcatatctcttgcccatttttctgtgattttgagtcatattgaggaacttttaccttttcttaagttgtaaaggaattcatccatgttttgctctaatatccacatagttgtattcttgccgtctttctttcctttttgtgtttattcctttaagaaaacatcttacctgtttggaatgcatcttggtatagcagatttaggttttgtaaccttcccatattgctcaccagttactccaaaaccatttagtcggctgggcacagtggctcacgcctgtaatcccagcactttgggaggctgacgcaggcagatcacttgaggtccggagttcaagagcagcctggccaacattggtgaaaccctgtctctactaaaaatacaaaaattagccgggcgtggtggagcatgcctgtaatctcagctaccgcagaggatgaggcaggagaatcgctggaactggggaggtggaggctgcaatgagctgagatctcgccactgcactccagcctgggtgacagagcaagactccatctcaaaataaataaataaatgaataaatataataaaaccatttagtctactccattggtctaccagtctaaacagtcatacactctgtttaatgtcagaggcttggatctactgatatccttcccactacctggcatttttggagatacttgcttatctttccaaattaaatttctaaaattaagatgttttagcttcagggaaaattatttttattggaatcatattacatttataaattaaattatgaagacatgacatttttctgaggctgcattttttttcatacaagaacaggatatttttccatttttttgagtctactttcatatttaccaggatcgtttaacaactttcttcatataattgtggacaaattttgctaatattttcacctaggtgttctattatcattaattactcttctattatgtcatctgactccttttgattgtatatgggaagtttattaagtttttatattgacattttacatgctaattccccaacttctcttcatatttgtagttttttcattctttgggattttctaggtatgtagttacatcatctacaaatattttttatttgtaattttatctctagaggtagatataagaatagtttcatctctaccttttcaatttttattccccatttatattctcttttttaattacattgacttccaacacaatcccaaatcaaatagtaatggggagattgggcaatgcagagattctaggatttccattaagtaaagtgctggtgttcagctgagatacgtgtgtgtgtgtctgtgtgtacgtgtgtgtgtgtatacatatccatatacacataaaaagta

SEQ ID NO: 17200 - DNA, 2018 bp, Homo sapiens
cggccaggcatggtggcttatgcctgtaatccaagcactttggaaggccaaggcaggtggatcacgaggtcaagagatggagaccatcctggctaacatagtgaaaccctgtctccactaaaaatacaaaaattagctgggtgtggtggcacacgtctgaagtcccaggtacttgggaggctgaggcaggagaattgcttgaacccgggaggcagaggttgcagtgagccaagatcgcaccactgcacaccagcctggcaacagagcgagactctgtctcaaaacraaacaaaacaaattaaacctcatttttaatattgtcataataccgtaaactgattaaaatttaacactatcctcaaacatccagtctgtgttcaaatttccccaattgcctcataagtgtcttcttttcctcctccttcctttaatattttgcattcctatgggcaatgtgtgagagcaccggcttccccacagcctggccaacaggacatgctgttaaacttttggattttgccaatttaatgagcaagaaatgatactttatgcaggtttaatttatatattattatgggtgaggataaacatcttatatgtttattatccatttgcatttatttttggcaaaattattgttcatatctcttgcccatttttctgtgattttgagtcatattgaggaacttttaccttttcttaagttgtaaaggaattcatccatgttttgctctaatatccacatagttgtattcttgccgtctttctttcctttttgtgtttattcctttaagaaaacatcttacctgtttggaatgcatcttggtatagcagatttaggttttgtaaccttcccatattgctcaccagttactccaaaaccatttagtcggctgggcacagtggctcacgcctgtaatcccagcactttgggaggctgacgcaggcagatcacttgaggtccggagttcaagagcagcctggccaacattggtgaaaccctgtctctactaaaaatacaaaaattagccgggcgtggtggagcatgcctgtaatctcagctaccgcagaggatgaggcaggagaatcgctggaactggggaggtggaggctgcaatgagctgagatctcgccactgcactccagcctgggtgacagagcaagactccatctcaaaataaataaataaatgaataaatataataaaaccatttagtctactccattggtctaccagtctaaacagtcatacactctgtttaatgtcagaggcttggatctactgatatccttcccactacctggcatttttggagatacttgcttatctttccaaattaaatttctaaaattaagatgttttagcttcagggaaaattatttttattggaatcatattacatttataaattaaattatgaagacatgacatttttctgaggctgcattttttttcatacaagaacaggatatttttccatttttttgagtctactttcatatttaccaggatcgtttaacaactttcttcatataattgtggacaaattttgctaatattttcacctaggtgttctattatcattaattactcttctattatgtcatctgactccttttgattgtatatgggaagtttattaagtttttatattgacattttacatgctaattccccaacttctcttcatatttgtagttttttcattctttgggattttctaggtatgtagttacatcatctacaaatattttttatttgtaattttatctctagaggtagatataagaatagtttcatctctaccttttcaatttttattccccatttatattctcttttttaattacattgacttccaacacaatcccaaatcaaatagtaatggggagattgggcaatgcagagattctaggatttccattaagtaaagtgctggtgttcagctgagatacgtgtgtgtgtgtctgtgtgtacgtgtgtgtgtgtatacatatccatatacacataaaaagta

SEQ ID NO: 17201 - DNA, 533 bp, Homo sapiens
ctagaagtttctttgcatcctttgtaatccttcccttcygactctccctaccactggatgggtatagatagatttgtaaattaatgttttttgtctttcattattttaaagatgttgctccactatctgcaggttcttgttgttttggataagaaatctgatgccatcctcatctttatttctttacgttatataatgtctgtttttctctgcttttaaaatgttgtctttatcactagctttaggccatatgattatgatatgcttggtgaagatttaaaattatgcgtctttcgacctttgggtttgttgaactttttcatactgtgcactatagggttttttttttctgtttttaaaatcaaatttgtaagatattttagtcacaacctctttagctttttttttctgtaccatttctctcctttcctcctgggatactaatcacacataaggtaggctgcttgaagttgtcacgctgttcccttatcttctcttcattattattttttagggttttgctgtttcatatt

SEQ ID NO: 17202 - DNA, 533 bp, Homo sapiens
ctagaagtttctttgcatcctttgtaatccttcccttccgactctccctaccactggatgggtatagatagatttgtaaattaatgttttttgtctttcattattttaaagatgttgctccactatctgcaggttcttgttgttttggataagaaatctgatgccatcctcatctttatttctttacgttatataatgtctgtttttctctgcttttaaaatgttgtctttatcactagctttaggccatatgattatgatatgcttggtgaagatttwaaattatgcgtctttcgacctttgggtttgttgaactttttcatactgtgcactatagggttttttttttctgtttttaaaatcaaatttgtaagatattttagtcacaacctctttagctttttttttctgtaccatttctctcctttcctcctgggatactaatcacacataaggtaggctgcttgaagttgtcacgctgttcccttatcttctcttcattattattttttagggttttgctgtttcatatt

SEQ ID NO: 17203 - DNA, 533 bp, Homo sapiens
ctagaagtttctttgcatcctttgtaatccttcccttccgactctccctaccactggatgggtatagatagatttgtaaattaatgttttttgtctttcattattttaaagatgttgctccactatctgcaggttcttgttgttttggataagaaatctgatgccatcctcatctttatttctttacgttatataatgtctgtttttctctgcttttaaaatgttgtctttatcactagctttaggccatatgattatgatatgcttggtgaagatttaaaattatgcgtctttcgacctttgggtttgttgaactttttcatactgtgcactatagggttttttttttctgtttttaaaatcaaatttgtaagatattttagtcacaacctcttyagctttttttttctgtaccatttctctcctttcctcctgggatactaatcacacataaggtaggctgcttgaagttgtcacgctgttcccttatcttctcttcattattattttttagggttttgctgtttcatatt

SEQ ID NO: 17204 - DNA, 1196 bp, Homo sapiens
aatactggttatttggtgtgaaattaaacaaattctattggaaagaaaatgacctgtatttgtatggaaaattagcactgagttattgtaactttttgacttagttaagaacctatagactacttaaaaatggtattggaaacattgacaagtatttggcaaaactagaattatataccttcttcacttcaatcacaaacatacaattctaattggattaaagatctaaaatagaatatacaaaatcataaaatttgtaaaagaaaataatttcagaactgtgagttattgaagctttctataaactaaaattataagccataaagctarattaacaaatttcactatgttaaaattaaaaatgtctctgccatcaaaaaaacttcaccattaacaatgttaaaagataaacgacagatgagaacaagtgcacataaaacagccattggattaatattaaaatacgtaaaggtttaccaaataataaaaataataggccaatggaaaacagagcagaaaatataaacaactgtagcatttaacaacagaaaatacatataaccaaggacatatgaagtagagtcaagcattttaaaaatacacattggtggccgggcgcagtggctcatacctgtaatttcagcactttgggaggctgaggcagtcggatcatgaggtcaggagatagagactatcctgaccaacatggtgaaaccctatctctactaaaaatacaaaaattagctgggcgtggtggcgtgtgcctgtaatctcagctacttgggaggctgaggcaggagaatcacttgaaccagggagttggaggttgcagtgagccaagatcgcgccactgcactccagcctgacaacaaagtgagactccatctcaaaaaataaaaaaaaaagaaagaaaggaagaaagaaagaaagaaagaaaaagaacgaaaagaaagaaaaaattggcaaaaattagtttgttaatatcaaatgtaaagctatgggaaataagtagccccccccaaatttaaacattacatgtctaatgaccagttttatttcttattattatacactcagatttaataccacggttaagaacaagaggaataaacagagattttcatggcaatattgtttattataaaaaatttgaaaacaaattatatttccatcattgggaaaataactaaactaca

SEQ ID NO: 17205 - DNA, 601 bp, Homo sapiens
taaattagcttttaggattttattttgctgaacagtcttcagaggtcataataaaatttgctgctgtttgcctacttaccaacaacacatggtgatatttgcttaagagcataggaaaaagcagggaacgtgctctcagtcctggcttgacatttttttaggatctgtatcagtaggtctgtgtcagtttgcatagtacataaayatgcactgttgagtttggggaaagatgaaaaatctagtttcaagtctgatcatttgaaagaattctccaagaaggtagcacttgtctggctatccgcacacaatagtttgatacacatctcaagaagggaatggaagaagccagatcctatatttttgaatgctaggatgccttggtgggcatgggaaagtggggagtgataggaggagtgtgaagaggggtagattgtgggaagatgctgtccatgaagtcatccattacagtgttccttaactgcaaaccgccccaaattctattacatggttaaaacattttgggaactcttgctcaataataagcagcagcatgataaaaaattttttcttgaagccatttctcgcttatcatcctcttcaa

SEQ ID NO: 17206 - DNA, 601 bp, Homo sapiens
taaattagcttttaggattttattttgctgaacagtcttcagaggtcataataaaatttgctgctgtttgcctacttaccaacaacacatggtgatatttgcttaagagcataggaaaaagcagggaacgtgctctcagtcctggcttgacatttttttaggatctgtatcagtaggtctgtgtcagtttgcatagtacataaacatgcactgttgagtttggggaaagatgaaaaatctagtttcaagtctgatcatttgaaagaattctccaagaaggtagcacttgtctggctatcckcacacaatagtttgatacacatctcaagaagggaatggaagaagccagatcctatatttttgaatgctaggatgccttggtgggcatgggaaagtggggagtgataggaggagtgtgaagaggggtagattgtgggaagatgctgtccatgaagtcatccattacagtgttccttaactgcaaaccgccccaaattctattacatggttaaaacattttgggaactcttgctcaataataagcagcagcatgataaaaaattttttcttgaagccatttctcgcttatcatcctcttcaa

SEQ ID NO: 17207 - DNA, 595 bp, Homo sapiens
gtggccatggtggctgtaatccccagtactttgggaggctgatgcaggaggatccctgaagcccaggagtttgagaacaacctggacaacatggcaagaccccatctctacaaaaaataaaaatactatttgggcatagcagcacacacctgtagttccagctgcttgggaggttgaggtcccagctactcaactcactgcattgaggatgcagtgagctgtgatcacaaaccactgtactccagcctggacaacagagtgagaccttgtctcaaaaaacaacataataaaagactaggagtggtgtttcttcttttatttcatttattcatgcattcattcaacataattttatgagcactcactatacctgagtctagacccttggaagacaaagtgaaagaaagtaggttcctcccttggagaaaagagaggggaagatgaacaccctttaatggagttttgtttgatgcctagtgatagatgaagacagaaagaygaggagctccaaaattttccagtgtggtcatgagagatttctcaggaggtgagatgcttgagctgagactcccaagataggcaaggggacatgggg

SEQ ID NO: 17208 - DNA, 631 bp, Homo sapiens
tgaaaacactcgactgactccttgatgcctgtggaataaaacagctcttctaggcagcactcaggacttctgctttctgtcgtaacagtggtcccctgcattgcgcctacactgtatccagacttcattctttggctctcgttggaatgcactttcttgtctttgcgtacrcaaattatcggtgtcatcttctctgtgacatggcccttgatgactcatgcagaagagtatgtgtttggtattcatttagtaattgcttcttactccttcagcaaacagtctcaaaggatgtgctagggatattacattaatgaaacacagaccctgctcttaagtcaagtcacttgtggaacttgccatataaacaatggtttgcaatgtaatgtgttgaagtataaaatagagttgtgttcaaagtactggggtcacagactctacacaaacaccttgtattcaggccattttttttaaattctctttatatcatgttgggtgtttggtactattagttgcttttttgttaagtgcagttattgaattgttctgcattattcccttgcaataatccagtgacttggtcattctgcttttctttctctatcactctttcttttgtatctttgttggatat

SEQ ID NO: 17209 - DNA, 631 bp, Homo sapiens
tgaaaacactcgactgactccttgatgcctgtggaataaaacagctcttctaggcagcactcaggacttctgctttctgtcgtaacagtggtcccctgcattgcgcctacactgtatccagacttcattctttggctctcgttggaatgcactttcttgtctttgcgtacgcaaattatcggtgtcatcttctctgtgacatggcccttgatgactcatgcagaagagtatgtgtttggtattcatttagtaattgcttcttactccttcagcaaacagtctcaaaggatgtgctagggatattacattaatgaaacacagaccctgctcttaagtcaagtcacttgtggaacttgccatataaacaatggtttgyaatgtaatgtgttgaagtataaaatagagttgtgttcaaagtactggggtcacagactctacacaaacaccttgtattcaggccattttttttaaattctctttatatcatgttgggtgtttggtactattagttgcttttttgttaagtgcagttattgaattgttctgcattattcccttgcaataatccagtgacttggtcattctgcttttctttctctatcactctttcttttgtatctttgttggatat

SEQ ID NO: 17210 - DNA, 605 bp, Homo sapiens
tctgaggctggccagccaggcttctttgttggttgaatgactgtgatgcagtttaaatggtatttgtaacccaaaaattctttcttttttattttgtagtctggttctggattcttcctaggtacttattcaattctatgtgtagttattaaaaaatctacaaccctcaaactgtaaatattttaacttggttttaaatgagaacaaaagggggaaggaagatgagttgctgccaacacagtggcaactctcagctgttctggggcaggagagctaggtcacctgagaaacttgtgtacttcaagtacaggagtggtgaactggactagagagtgggtgggtctggtccttttcactatctgttcccggtatgaaaacattaaatggttttactgtttcaatgaaggaagtcctctcttctcacttttaagcaaaagccagcagcctgtctggtaattaatatgatatttccatttgctaatggggactgaaattttcagcgtcttaatttttgtytcttttattttacatttaatgtttattttgcattactttgttttaattctgaactagtttttcattatatgtttagtaatcattgtttc

SEQ ID NO: 17211 - DNA, 548 bp, Homo sapiens
caaagtttgtaagggtctcatcacttttccaggagaaaatgtaagcccacttgcatggtgcagaagactttctccactgcttccctgttgatatagtttggatatttgtcccctccaaatctcatgttgaaatttgatcccccatgttggaggtggggcctgatagaaggtgctttggtcatggaggtggatgcctcatgaatgacttgatgccttacctgcataatgagtgagttctcactctattagcacatgagagagctgaytgtttaaaagagtgcagcacctctcccctctctctccattgcatcatttcctcaacttccttctgcttggctccctttttctctttattattgccccaataccttctatgtgcctcacccatccttctatggcagagactagctcacccgattacaattatccaatggaaataaaactaggaattgaaatggggttgcatgataggcagaattctaggctctagaaacaccatttggtcacattcaataaaatgcaccacctggcttttcacaaccacctgg

SEQ ID NO: 17212 - DNA, 564 bp, Homo sapiens
ctagcaaagtaytgtgtgtgggtccccattctaggactcacatcattcagaggctcagcatagctgcttgtgggctagccggcccccacctcaggaaggggctgtactcatgaatggtctgcatccctctggccccttttggctcagcccttgccaggcataggtactcatcaatggatctgaggctgcaaccataccaggagctatttggccagagccccaaggctcaaaaagaaagcccctggaatttctcagggtatttggcattctagagtgagtgacatcttggtccccaccacctaggccttaagaaataaggcctgggagtaagctatgaactttgggaaattggcaaagatcagaggccatgcaatgtctctttgaaattctgatgggggctccctagcccacagaagaagggagagtgctcctctgtggtttgccctatttaaaatggttttcttattcaatttctaatagtctaccctattccccttgtttcctccagcacccctcttccctcactcaaggggagaaaacaggctagaaaggctggctcagcca

SEQ ID NO: 17213 - DNA, 553 bp, Homo sapiens
atgtatagaagatccctggggaagtacctgtggtgcaaaaggaagaaatgaggcatctttgggctggctttggcagagagtgcaggagcccatggactctcaggaagagtcattccacacaaatttactgagcagcaaccatgtattaccaaaatagaggttaaggcagtaggttctggagccagactgtatttcagatctgctgagtgctggctttgggccttgcgcaacttgtttaatctctttatccctccgtttccttatttgaaaaatggggatactgatggagtcatggtaaggcatacagaaagagctcattggacatttgctttcattattttccatgttgtgctatggggactatgtccggtgtgraataagactgctgtggcccctgccttaggttttagaggaggaggcagacattactaggtacagttgtgacaggtgctatgccagaagagctgggaactatggaaacaggtaagagagaagctagacttagaaagcaattaaggaatacttcttatgtaattgacctttgcttgtgatc

SEQ ID NO: 17214 - DNA, 503 bp, Homo sapiens
ctatgggagactgtgtcgggcaatttgagctaattcccagggggatcctatgggagactgtgtcgaacmcacacctgacattcatcccaagggtaggatgaaaagtcttgagggtatttagccaccaaataaccaaccatacttcttaaaggacttcccccaggggtgatataaatctctgtcacctccagttggccttgggtcaagtccagcatgctctaagggtgagacaaaaggcctccaaggcagagagtcatggcaattgccataagcaaccttgtagatgcaaaggtgagacatagctccgcagggccagagtctaaatatgtaagtcagtgtcagaatctttttggcactgtctattccttaaataagtcaatactcaccatttgtgaaaatcttcattgaactggagctacatttcctctctataggtagcatgttttaaatgttttatcaattatcaattttaattggaaactggttgtaggaactctgtccca

SEQ ID NO: 17215 - DNA, 508 bp, Homo sapiens
agcattttcgttttctttttcttttwtttttttgagacagggtctcattctgtcacccaggctagagtgcagtggcgtgatctcggctatctgcaacctctgcctcccgggttcgagagattttcctgccttagcctcccgagtagctgggacttacaggcacctgccaccacagctggctaatttttgtagttttagtagagacagggttttgccatgttggccaagctggtcttgaactcccgacctcaagtgatctgcccacctcggcctctcaaagtcctgggattataggcgtgagtcaccgcgccggccagcatttccattatctagacaagggaactgaggtcaagcattggagtgaaagtcacctaggtggctttttttcttttttaacctatttatttctttcaacccttagcccagatcctaaccttcggtaagtactcagtaaacatttagtctgctgggtgcatgaacgagcgaatgagcaaatgaatgacagcga

SEQ ID NO: 17216 - DNA, 508 bp, Homo sapiens
agcattttcgttttctttttcttttatttttttgagacagggtctcattctgtcacccaggctagagtgcagtggcgtgatctcggctatctgcaacctctgcctcccgggttcgagagattttcctgccttagcctcccgagtagctgggacttacaggcacctgccaccacagctggctaatttttgtagttttagtagagacagggttttgccatgttggccaagctggtcttgaactcccgacctcaagtgatcygcccacctcggcctctcaaagtcctgggattataggcgtgagtcaccgcgccggccagcatttccattatctagacaagggaactgaggtcaagcattggagtgaaagtcacctaggtggctttttttcttttttaacctatttatttctttcaacccttagcccagatcctaaccttcggtaagtactcagtaaacatttagtctgctgggtgcatgaacgagcgaatgagcaaatgaatgacagcga

SEQ ID NO: 17217 - DNA, 508 bp, Homo sapiens
agcattttcgttttctttttcttttatttttttgagacagggtctcattctgtcacccaggctagagtgcagtggcgtgatctcggctatctgcaacctctgcctcccgggttcgagagattttcctgccttagcctcccgagtagctgggacttacaggcacctgccaccacagctggctaatttttgtagttttagtagagacagggttttgccatgttggccaagctggtcttgaactcccgacctcaagtgatctgcccacctcggcctctcaaagtcctgggattataggcgtgagtcaccgcgccggccagcatttccrttatctagacaagggaactgaggtcaagcattggagtgaaagtcacctaggtggctttttttcttttttaacctatttatttctttcaacccttagcccagatcctaaccttcggtaagtactcagtaaacatttagtctgctgggtgcatgaacgagcgaatgagcaaatgaatgacagcga

SEQ ID NO: 17218 - DNA, 508 bp, Homo sapiens
agcattttcgttttctttttcttttatttttttgagacagggtctcattctgtcacccaggctagagtgcagtggcgtgatctcggctatctgcaacctctgcctcccgggttcgagagattttcctgccttagcctcccgagtagctgggacttacaggcacctgccaccacagctggctaatttttgtagttttagtagagacagggttttgccatgttggccaagctggtcttgaactcccgacctcaagtgatctgcccacctcggcctctcaaagtcctgggattataggcgtgagtcaccgcgccggccagcatttccattatctagacaagggaactgaggtcaagcattggagtgaaagtcacctaggtggctttttttcttttttaacctatttatttctttcaaccctyagcccagatcctaaccttcggtaagtactcagtaaacatttagtctgctgggtgcatgaacgagcgaatgagcaaatgaatgacagcga

SEQ ID NO: 17219 - DNA, 519 bp, Homo sapiens
tgccattggaatcagacagacttgggttcagtttccagctctgtacttaatactatttgtaactttgagggtggtatttctaagctttagttttctattcactaggtagggaccataatactcatctcaggtgaaatttggcagtgtattcaaagggttcacsacatggttaattattgttgttgaaagagagaataaaagaaggaggctagttgctgtccataccaaacaagacgcttgtttcgtgggctcttcctggaacctcttattttctgaaaacccgaagtagtcagactggaactggatgaatacagagagaaacacgttatctcatgaacttgaacttgtatgacttcattcattcagttcaagtaattcttgtattcattataattttgcttattcatttggtaaatatgtatcaagcagatgaagtatgaggcactgtcctaggtgttagagataaaggacaaaaagacatagtcctgcctctcaaattcattttgagcttccatatac

SEQ ID NO: 17220 - DNA, 519 bp, Homo sapiens
tgccattggaatcagacagacttgggttcagtttccagctctgtacttaatactatttgtaactttgagggtggtatttctaagctttagttttctattcactaggtagggaccataatactcatctcaggtgaaatttggcagtgtattcaaagggttcaccacatggttaattattgttgttgaaagagagaataaaagaaggaggctagttgctgtccataccaaacaagacgcttgtttcgtgggctcttcctggaayctcttattttctgaaaacccgaagtagtcagactggaactggatgaatacagagagaaacacgttatctcatgaacttgaacttgtatgacttcattcattcagttcaagtaattcttgtattcattataattttgcttattcatttggtaaatatgtatcaagcagatgaagtatgaggcactgtcctaggtgttagagataaaggacaaaaagacatagtcctgcctctcaaattcattttgagcttccatatac

SEQ ID NO: 17221 - DNA, 519 bp, Homo sapiens
tgccattggaatcagacagacttgggttcagtttccagctctgtacttaatactatttgtaactttgagggtggtatttctaagctttagttttctattcactaggtagggaccataatactcatctcaggtgaaatttggcagtgtattcaaagggttcaccacatggttaattattgttgttgaaagagagaataaaagaaggaggctagttgctgtccataccaaacaagacgcttgtttcgtgggctcttcctggaacctcttattttctgaaaacccgaagtagtcagactggaactggatgaatacagagagaaacacgttatctcmtgaacttgaacttgtatgacttcattcattcagttcaagtaattcttgtattcattataattttgcttattcatttggtaaatatgtatcaagcagatgaagtatgaggcactgtcctaggtgttagagataaaggacaaaaagacatagtcctgcctctcaaattcattttgagcttccatatac

SEQ ID NO: 17222 - DNA, 572 bp, Homo sapiens
catcctcactgattgggtgtgtggagcctctccccgccacccatacctgggctctgtctctcccttctctgtctctctcccctctcctatctctgtttttctttatacctctctctccccatcttcgtatatttcttttccttttttttcttygagacagggtctctctctgtcgcccaggctggagtgcagtggtgccatcatagctcactgcaacctcaaactcctgggctcaagcaattcccctgcctcagcctcccaagtagctgggactaacaggtaggtatatgccaccatgttcggctaacttaaaataaattttttataaatagagacaggggctgggcgcggtggctcacacctgtaatcccaacactttgggaagccgaggtgagccaatcacctgaggtcaggagttcgaaaccagcttggccaacatggtgaaaccccatttctactaaaaatacaaaaattagctgggcgtggtggtgcgcgcctgtaatcccagctactcaggaggctgaggcacgagaatcacttgaacctggggatcaggggtttccgtgagctga

SEQ ID NO: 17223 - DNA, 572 bp, Homo sapiens
catcctcactgattgggtgtgtggagcctctccccgccacccatacctgggctctgtctctcccttctctgtctctctcccctctcctatctctgtttttctttatacctctctctccccatcttcgtatatttcttttccttttttttcttcgagacagggtctctctctgtcgcccaggctggagtgcagtggtgccatcatagctcactgcaacctcaaactcctgggctcaagcaattcccctgcctcagcctcccaagtagctgggactaacaggtaggtatatgccaccatgttcggctaacttaaaataaattttttataaatagagacagggrctgggcgcggtggctcacacctgtaatcccaacactttgggaagccgaggtgagccaatcacctgaggtcaggagttcgaaaccagcttggccaacatggtgaaaccccatttctactaaaaatacaaaaattagctgggcgtggtggtgcgcgcctgtaatcccagctactcaggaggctgaggcacgagaatcacttgaacctggggatcaggggtttccgtgagctga

SEQ ID NO: 17224 - DNA, 1658 bp, Homo sapiens
ggaacgatcacagattggatgagactagggaaatatcataaacttagtccaaaatggatcctgaaccagaaaaaaaaagctggtgtgggagggaaagtaaacttgtgaaattttgataaagtttgctgatataatagtattgcrtcaatgtaaatttcctgatcctaagcatcgaatatggttatgtaagtaacatcaggagaaattggatgaagaatattttggaactctctgtactaatttttaggctgttctgggagtctgaaattatttaaaaagtgatttatgctatttggtatgagctattccaaagattcaatgctctttaaagttgatgtatctctgggtccggaatgattcagtggctgggtttgagttacattttacctgaatttgcaagagctataggatttttaacacagaatatgaaatggggtatgaatttatgtttttgttgctatggtgatttacattgttactattttaataccctcatcaaatgcaggcgttccgtggcaatatggcacctctacataatttaataccaaatcatgcataacgaagtgcggcaccatttgcaagataaaatgaggaaattaaaagcaaatagaagtatattacccaagtccaaaacctataaataattgaacagtaagtgtgaacactctataaaggagatttattgataggaattgatatgtataataaatagtgcaaaacttttattactaataaaggaaatacctttgaacatccacttttcaaaatctctaactctctactagaaagaaagtaaacacattttggttaattttcaggacatgtggcagggagaggttttacacagagtttagtgatgaatttttaatcattgactactggggtattagcttttgtgaagaatattgtcatataaacattatcatttactgcagactgaatctgtatcccaaaaatttccaaccagttaaatcagatgactgatgtgcattcctgtaattttcttattttacttactttttacttaattcaaatgtctatcattaagaaaactgcatcaacatttttctctgttgtttcattaacacagagaatcatgtggaagttgctttgctgttattaatggggaatttctactgctattggtgcttttctgggtcgtggtagctgcactgatgtaaccaaggaagcttgtttccccggaggcgaatttgagggggaaatgtggcctggaatgaatttcagaattagaacagaaaccagttctttatcattccatgaacaagtgcttttccaaatagcacgtcacaagccacattcatatatcgggctctcagtcagctcctgaatgcaagtatttcctatgagaagaaagttgtcaagggtaacaaactttccatatgcagacattttgaagtaggattttctaattgccctgtggtactgtgagaattgtcactgttggcatgcaaattaaagtaggagtgaattccaatattaattcatcaagccattgtgaaattgttactatatacaaggctgtaaacgtgatgattttggataagctcttaatctctctctacctcatttttcttagatatgaaatgataatagtaatacccaccttaatataagttaactgcttataacagttcctg

SEQ ID NO: 17225 - DNA, 653 bp, Homo sapiens
aaaaatcttaaccctgaggacggaaatctttacttcgtgttgtcacattttttaatcctctcagctttcactggcacttcctttttttcttgtgacagagaaaaaaaaaaacctgtcccatctgatccaataccgtcttacgcagcccctccaaaaaagcagcactccacctgttactgcgtttctcctgcgtgttcagcgttctcctcctcactttccctttttaaatgttgtctttaaaaaacaaaataacaaccttttcttgacaaaaacaactcacttaaactaccacccaacctacaacctttcttttataactaagcttcttgaaaaaaaaaagatactttttttcttttgttttcctacctcacattcaatattatacatttaaaacttaaaacatatgtattgagcaaccttcatgttccaggctctgtgaggtacacagcggtgatgattttgtacccttcagttgtttacaatctatggtgtgggagaaatgagtatatttagcctaaaagacagtgrggtacatactacaatagcagtaaccacagcgtgctgtgggggcacctggaaggggcatggaacccatatgcaatgagggcaagggtatcagttcgttctcacgttgctagtaaagacatatttga

SEQ ID NO: 17226 - DNA, 549 bp, Homo sapiens
attgaaagaaactaaagaagacctaaataaatggaaggaaatcatgttcatggattaaaagacttaatattattaaaatttcattacttcagaagtgatctacagattcaacacaatccctatcaaaatcccagctgtggctgggtgtggcggctcacttctgtaatcctggcacttcaagagccaaggtgggaggattgtttgagccgagaaatttgagaccagcctggcaacatgatctctacaaaaaatatagaaattagccaggcgttgtggtgccagcctgtagtcccagctacccaggaggctgaggaaggaggatcgcttgagtccaggagtttgaggctgcagtgggctatgatcacatcactgctctccggcctgggcaacagtgcaaggtcatgtctcaaaaaaaaaatcccagctggctttttttttttttttgagatggagtcttgctctgttgcccawgctggagtgcagtggcggacgatcagcctcagggcaggccatctagaagaattaccaaaaacaccaacccatttgtct

SEQ ID NO: 17227 - DNA, 356 bp, Homo sapiens
tgtcttgactatgtataaactttgactgtttcactttctccatttcattccctgaaacccatttcttcccatcacagataatggatgaacaatctaaaagagttcaagctccataacatgacaccactttctagttgctccaaaatctggcttccacctccctttcaaatctcagctcttgacacttctggcttgtgctttagtgcccattaatatcaaatggtggagtactcaaagtattaaaatatttgctaacagtaaayctatttccactacccatgtggtaactgttactcatccacctaagggcacagtttttctcatttcttcacctgcccaaactgggttatgtagtt

SEQ ID NO: 17228 - DNA, 651 bp, Homo sapiens
atggctgtctcttaaacttttcccatctctatccttatctctgtctccactaaattctcctgcactgcctccccgaccccatctaattgattgattcaygtccttgggtgacatctttgaaaaatagatggtaaaagtttgtatacacacgcatcttaaattcacatcctattgtgccgtagagtttgtttcttagttttcttcattcagcactatgctttggagagctctcaagggtgctgttggtttctctagttcattgccactgtgagttgtaactgatagagctctatcttcctgctcccattcgtaaatacacatcacgagaatagtctgtgtccactaaattcaagtaatttctcagtccactgggttaagataaatttccattgcccgaaatgtggccttagtagagataaacactccatttgcccacttatttttaactaatatttcaatttaattgaaatgaaacattcaagatccattttttcctaggcgtttaacttacaaacctcaatattatatttataaagctaatacattttacaatttaagctaaattaaactttttcaaatattttaaactgcattataaatttaatgttttgatttattttaaagctattgagatgctacattacaaaaact

SEQ ID NO: 17229 - DNA, 650 bp, Homo sapiens
tttttctctagctcctgatgttactatttattaggatatttgaaatatatctgagtttatttcaagatatagagagttctaaggaaaactgtaatggtgtgttggagttcttactatatttggaaagaatggaagtcagagtgataataggaaaaawaggatgcaagaaggctggttcctaaggctagaggaagaaaatgagtcagactgggaaacactggttccaaagatctctgtacttctaaaagcctctattcagtaccctcagctcccttttagcttgaccactgtgcaagaagactctccttgttgatgaacatagtaatcaacaatatggaagggagtaagttcccgtacctatcatgagcccgtttctcatcatcctacactgaaaattaagatggttcctcactaaaattgttattacttagtacttaagtttaagctgatttacactgggttgggcctggaggactaactgccagttaaaagctgattctacgaaatattattgtttaagtctatctaaatcaataaatgacattggaaggctatttttaagtggcaacagtctggtgcttttttttttttttaactgtattagatcaatagctgcagtttaaaaggtctattcattcaagttctttggt

SEQ ID NO: 17230 - DNA, 650 bp, Homo sapiens
tttttctctagctcctgatgttactatttattaggatatttgaaatatatctgagtttatttcaagatatagagagttctaaggaaaactgtaatggtgtgttggagttcttactatatttggaaagaatggaagtcagagtgataataggaaaaataggatgcaagaaggctggttcctaaggctagaggaagaaaatgagtcagactgggaaacactggttccaaagatctctgtacttctaaaagcctctattcagtaccctcagctcccttttagcttgaccactgtgcaagaagactctccttgttgatgaacatagtaatcaacaatatggaagggagtaagttcccgtacctatcatgagcccktttctcatcatcctacactgaaaattaagatggttcctcactaaaattgttattacttagtacttaagtttaagctgatttacactgggttgggcctggaggactaactgccagttaaaagctgattctacgaaatattattgtttaagtctatctaaatcaataaatgacattggaaggctatttttaagtggcaacagtctggtgcttttttttttttttaactgtattagatcaatagctgcagtttaaaaggtctattcattcaagttctttggt

SEQ ID NO: 17231 - DNA, 578 bp, Homo sapiens
tcccagtttcaagtgattcttctgcctcagcctcccgagtagctgggactacaagtgcacaccaccacgcctggctaattatttgtatttttagtagagacagggtttcactgtgttagccaggatggtctcaatctcctgacctcgtgatccacccactttggacttgtgtcacaatttttaattactataaaaacaatacttccagacctcctcatgggcattctgctgaataataagatagccaaacaagatgtttcaggagaaaagcaaaggaagaatcaaaacaaaagagatacaggtagttcactgtgtaaatcatcaacgtcaggatgagcaaaaattgccagtaaaatttctcaactctgaagtgttggctaaagtagaatacattttgtgtattttattgccaggcaaaactggcagagtgccacttaaccatcacaggtaatgattaaaacaaatagaacaaatmcaaactctatttaaaatttttatgttcatgcaataatttgagggaaatgttatattttaaagttgcacttccttaactaagggtaatcgaagtaagaactgtg

SEQ ID NO: 17232 - DNA, 536 bp, Homo sapiens
tttgctcaggatgcctttgccaggactcccagtcaggaaagtttatcatctatctccctctactggaatgtaagcaccaaaaggacagagatctgtgctttgttcactgatatattacgaacacacagaatggtacttcrcacatgaaacaccctcaaatatttgttgaataagtgaagagttgacaattactaaagcaagtctctttgtaaattaattcaatcatctattcattgattcaaccatctttactgacagtctagcacctgtcacgtcctgcagtagaaagttccatgagaaataaacaggtataagatgtgaattcagtcctcaaataaacctactatgcaccttgggggaaagccaacatgcaatggcataggctatagatgctgctagacatggctgccagatgatcgatttctaatatagatcagatgctcaatctagtaacatttttcatttaaaatctttccttgacatattttcacacagtaattaatttctatatgaaagtgtgacattaacaatgtacc

SEQ ID NO: 17233 - DNA, 536 bp, Homo sapiens
tttgctcaggatgcctttgccaggactcccagtcaggaaagtttatcatctatctccctctactggaatgtaagcaccaaaaggacagagatctgtgctttgttcactgatatattacgaacacacagaatggtacttcgcacatgaaacaccctcaaatatttgttgaataagtgaagagttgacaattactaaagcaagtctctttgtaaattaattcaatcatctattcattgattcaaccatctttactgacagtctagcacctgtcacgtcctgcagtagaaagttccatgagaaataaacaggtataagatgtgarttcagtcctcaaataaacctactatgcaccttgggggaaagccaacatgcaatggcataggctatagatgctgctagacatggctgccagatgatcgatttctaatatagatcagatgctcaatctagtaacatttttcatttaaaatctttccttgacatattttcacacagtaattaatttctatatgaaagtgtgacattaacaatgtacc

SEQ ID NO: 17234 - DNA, 534 bp, Homo sapiens
tgacagcaagcctgaactttccattctatctgaaagagacacttatttacccatatctaggatatagaaaaaaaaatacttaggggagaggggaaaaaatgaagaaagtcctcgtttaaattcaggttttgtttttttaactcaaaaacaaccataaaacccacctagaacaaagcaaaagagagttttctaattaccacttaaaaataactttgtattagactaatataaattagtacaggcacaggtttaagaggaaagactgaagtgaagacagcatcttatttcttttattatctacctttccttgcattcattacaagtattacagcaacacagcygccacattgtaaatgatgttttcttaattaaatgcacattttttccttcattatggaacaaattctagaatttacattcaaattcaaagcctatgggaaattcaacattacctagcagtttaaaggatttcaaattacagctcaaatttgtttaaatgtacattattcccaaatcagttccaagacactcagt

SEQ ID NO: 17235 - DNA, 543 bp, Homo sapiens
tatgtgtatttgaaaagattatatatgcataaggtattgaatgcagatttctatctatataaataaagttgtctgaaaatcataatccaaataatgtatattcttattaattttttgtctatttctaacagttgctcagtgagatgtataaaatcatacactttctttttgtttgccttttgtttgtttatgcaatcagtgttgtcatcagtttaaaataatgagttataaaatagtatttgcaagcytcatggtaacctcaaattaaaaaagaaaaatcatgcaatggatacacaaaaaataaaaatcaagaaagtaaatcacaccaccagagaaaatcaccttcgctaagaagaagacaggagggaagaaaacaaggaagtgaagaccacagaacaaccagaaaaaaaattaacaaaatgaaaggagtaagtccttacttatcagtaataacgttgactgtaaatggactaaattctccaaatgaaagtcatagattgcctgaatggatttaaaaaaaaatcagtgatctatggcctacaa

SEQ ID NO: 17236 - DNA, 1031 bp, Homo sapiens
atatttagaggttatgcaacaagcacaatgccctcccttcataactccccatcaaaagaacaattatattatcaggttgtcccctaacccaaacactcatgtcccacaccacagtacttgtaggcatgctgtcaatggtttgagaaaacttgaatagggagccctactgaaaaatatttgtgaaacggggttttaggcaaagattatcaatagttttattacttctttcttcaagtatatttacatgaggatttgaataatctaccttgaatatatagtcttggatcttaacagcaatttcacactaatgtctgtttgttagttttaatctcccttgatttacttttggaaacaaggaagtaagatggtcaggggaaaagcaaacaactttacaacttgatattgattcataatcaatttactgcagagttgcctcaaaaatgattacacttcagcaataagacaatgacaggtttaacacatttcttgtatgtataaatttaaaaaacaaaaaaacactttccaaggtaaaaataaaccttgggtatttaaattaaaaaatgtcaattctaaatgtttaaaattaagcctgccataattctactgcaattttttttttaagtcagtttttaacctagcttctctcctgtctaaatgtagccacaggattcctagagtccccttaggaaayaatcaccatgtgagttttccatgcaaatttaaattaatttgaaacagcttgaaacttgcagttaatcctccaagttgcatttataagaataaggttcaaatttatagtattcttatttcaaggaaaagcagcattacaatatacaaactatacataaaggattcaagaattctgacttctgatctcaccaattttctgccatctcagaaagtattcctgacaggtcccttaattcatcatccttaacatattcatagagtttaatctcatttataaataaacaacaatctccccccaaaaaaattatcactataatacaaatgacattgataaaaatttg

SEQ ID NO: 17237 - DNA, 1031 bp, Homo sapiens
atatttagaggttatgcaacaagcacaatgccctcccttcataactccccatcaaaagaacaattatattatcaggttgtcccctaacccaaacactcatgtcccacaccacagtacttgtaggcatgctgtcaatggtttgagaaaacttgaatagggagccctactgaaaaatatttgtgaaacggggttttaggcaaagattatcaatagttttattacttctttcttcaagtatatttacatgaggatttgaataatctaccttgaatatatagtcttggatcttaacagcaatttcacactaatgtctgtttgttagttttaatctcccttgatttacttttggaaacaaggaagtaagatggtcaggggaaaagcaaacaactttacaacttgatattgattcataatcaatttactgcagagttgcctcaaaaatgattacacttcagcaataagacaatgacaggtttaacacatttcttgtatgtataaatttaaaaaacaaaaaaacactttccaaggtaaaaataaaccttgggtatttaaattaaaaaatgtcaattctaaatgtttaaaattaagcctgccataattctactgcaattttttttttaagtcagtttttaacctagcttctctcctgtctaaatgtagccacaggattcctagagtccccttaggaaacaatcaccatgtgagttttccatgcaaatttaaattaatttgaaacagcttgaaacttgcagttaatcctccaagttgcatttataagaataaggttcaaatttayagtattcttatttcaaggaaaagcagcattacaatatacaaactatacataaaggattcaagaattctgacttctgatctcaccaattttctgccatctcagaaagtattcctgacaggtcccttaattcatcatccttaacatattcatagagtttaatctcatttataaataaacaacaatctccccccaaaaaaattatcactataatacaaatgacattgataaaaatttg

SEQ ID NO: 17238 - DNA, 1031 bp, Homo sapiens
atatttagaggttatgcaacaagcacaatgccctcccttcataactccccatcaaaagaacaattatattatcaggttgtcccctaacccaaacactcatgtcccacaccacagtacttgtaggcatgctgtcaatggtttgagaaaacttgaatagggagccctactgaaaaatatttgtgaaacggggttttaggcaaagattatcaatagttttattacttctttcttcaagtatatttacatgaggatttgaataatctaccttgaatatatagtcttggatcttaacagcaatttcacactaatgtctgtttgttagttttaatctcccttgatttacttttggaaacaaggaagtaagatggtcaggggaaaagcaaacaactttacaacttgatattgattcataatcaatttactgcagagttgcctcaaaaatgattacacttcagcaataagacaatgacaggtttaacacatttcttgtatgtataaatttaaaaaacaaaaaaacactttccaaggtaaaaataaaccttgggtatttaaattaaaaaatgtcaattctaaatgtttaaaattaagcctgccataattctactgcaattttttttttaagtcagtttttaacctagcttctctcctgtctaaatgtagccacaggattcctagagtccccttaggaaacaatcaccatgtgagttttccatgcaaatttaaattaatttgaaacagcttgaaacttgcagttaatcctccaagttgcatttataagaataaggttcaaatttatagtattcttatttcaaggaaaagcagcattacaatatacaaactatacataaaggattcaagaattctgacttctgatctcaccaattttctgccatctcagaaagtattcctgacaggtcccttaattcatcatccttaacatattcatagagtttaatctcatttataaataaacaacaatctccccccmaaaaaattatcactataatacaaatgacattgataaaaatttg

SEQ ID NO: 17239 - DNA, 1403 bp, Homo sapiens
ctgattctcttcaactcaactcagatagccacaggtgatagactagcaagtccactgcatgaataagcatttaagtacggaattagatatccattgccccttcttaaagtcgctgccaatttctaagggaatctctactagcactttctttacttgatatttggagtgaggaagctacttctgtcttcacagggaggagaaggtagagccacggtcctatccacttcaggccccaaactctcgaacttatgtgttttttttttcttcctccatctccctccttattctttatgcctaaaagatggggttaggcttgtgtgatgatggcagttattggaggtagtttagctgccacttactaagcctgagagatagtgagcatctggtctccagttgcaacaattctctttactcttcagaatgcagattgttcctggtttgggtctagttagcagaaaattctgctcaacattttgtaacaactgttaaggtcttgcagggcactgatttcagtgcaagccagttcagcaaatgctggattggaagtttcatgaaaacaggaactgtaattgtattgttaaattttgtttccttcagttcttaacaggagctcagtgaatatttgttgaatgaacaaataaatgaatgaatgacctaacctattcattaaactgtagcatggataagaatcactttgggaacttgtttttaaatacagatgcccagacttcaatggcagatattctcacttagtagatctggggaggggtggaatatgctctgagaaatattgcctagtccatggatagattaaccttgtatgattgagtaactgctggttaatgattgcttaaatacacatttcaaatgcattttttcagcaattctctttcgcctgcatataaataaatatcaacagaygtattcaggcacaaacacacacatgccctttaggaaagagtgaagaggaaataaggcataggattgatagttgaatcaatgctttgggactcatgaatatatagcttcatggaaaatgtctctgggaaaccctataaccatttctgacttttacatgtaggtgaaagttcctttctttattatgattaaatcatatgtttatatgctacaaatcaagattccttagttccctaggtccttgtctgtggcaaaatccaggaaggagccatgaatgggaactgtggtgcttccatttagcaggtgctacctgttatgagaataaattatagatttgattctctagagttttcagtgcaatggattttacaagaacagaatacaaattgtaaccccagtacttccccataatggtcatcctcattgcaggtgaagaaaatacttttaaactatacacctggggtatgtgaactcatagaacttga

SEQ ID NO: 17240 - DNA, 540 bp, Homo sapiens
agcacagatctgatttttgttgtgtgaaaaatttgtaagggagtgtattcatmagggttctctagagggacataactaataggatatatgtatatatgaaagggagtttattaaggagaattgacttatatgatcacaaagtgaagttccacaataggccatttgcaacctgaggaacaaggaaggcagtagtggctcagtccaagtcccaaaacctaaaaagtagggaagccgacagtgcagccttcagtctgtgggcaaaggcccaagagcccctggcgaaccgctggtgtaaatccaagagttcaaaggccaaagaaccggattctgatgttcaggggcaggaagcatacttcctggatgaaaagagtaggagaaagatgaaggccagaagattcagtaagtcagctcattccaccttcttctgcttgctttttctagccttgctggcagccaactggatggtgcccacacagactgagtgtgggtctgcctcttccagtccactgactcagacgttaatcttttctggcaacaccc

SEQ ID NO: 17241 - DNA, 560 bp, Homo sapiens
aggggattatggctagttctcagcataggaattaaaggatgcttttgttcagtgtctactaattgaggagaaagcccagttgtttttgcacttgaatggcaagatctggagactagggcaaacttccaaaactgctagactgtactgcccaaatatttaagtattcctttaccatttttgaaaaaaatcttactaaaagatttgagaagcttgcaattaaacaggggaatactattacaatgcatgggtaatttactcattgctagccccacttatgaagactgtttataccagtttttgtttgattgttttgaaacaaggtctcactctgccacccatgctagagtgcagtggtgtgatcatgggtcactgcagccttgccctcctaggctcaagcgagcttcccaccttagcctcccaagtagctgggactgcatatgtgtgccactgcacatggctaatttttaaaatgtatttgttgtagagatggagtctcacagtgttgtccaggctggccttgaacttttrtgcttaagcgatccttcaactgtggcctccca

SEQ ID NO: 17242 - DNA, 530 bp, Homo sapiens
tgtagtttatcactgttttctggatagtgcttttggtgtcatatataacactttgcataactttgtgccatgaaagttttcccttgggttttcttctacaaattctgtatctttgaattttacctttaggtccatacttaattttgagtgaaattttttataagatgctaaagtgtacattgaggtatatatttaagtacatacccctattcaattgtttagcacaatttcttaaaaaaagactatattttctccaattgagcgtgcacctttgtcaaaaatcattgttcatattcgtgtggtctacttctgagctgttctgttacagtaatctaatttttgatctttctgccaatactgcattgtagtgtgatcattgtagctttatggtaagtcttaaaatcaggtagtttgattcctccatcttcattcttatttttttcttttctatcaattattaatttatttacttaaacttattttggttattgtgttttttwgttctaatctttccatttggttcttctttc

SEQ ID NO: 17243 - DNA, 525 bp, Homo sapiens
tgaatttaagattccaggtctyatccaggaggatccactgtcagaacaattatagacaaagagaagcagaaacaaaggtgaaagtgatttaaaatgtacgctgatttgacatgaaagagggtcctgaaattgcacatgaaccaacagcccacaagtcaagcaatggaagggacctataaacatgggaaggtccagaatccaatggtcgtcaaagcaacaagacaggaacaaaccctgccctcaccatgatcttacccaaatgagacctgcttcaaacttgtgagaagatacagatttgattaaaacttggtggtcatttgttagagcaggaacaaaattgtacagatactctgttctctcagtcttttcagaaaaatccagtaagccactttagtttcatatgagaagcctcagaagtattctttccctgggaagcatgatcaaggaaaacagctgcgtatcttcttacccttaccaaataaagatgtgggtattatccagtgttcaatctaagtttccaatgaa

SEQ ID NO: 17244 - DNA, 542 bp, Homo sapiens
atgctggttattgaagtatgatcaggagttagctgattggaaagaatattccagatggaagaatacaaaggagtgaatctccagtaacatggtgttatggactgaaccrtgtcccccaaattcaatactactgccctattctgggaatagagttcactacaaatcctggtattagagactaggaatattaaattttagtcgcttaaatttcagcctcttaaattttatttaaagatgttatttcatttaaagagataacttcttttttttttttttttttttttttgagatggagtttcgctcttattgcccaggctggagtgcaatggcacaatgtcggctcactgcaacctctgcctcctgggttcaagcaagtgattctcctgcctcagcctcccaagtagctgggattacgggcatgtgccaccaagcccagcaaattttgtatttttagtagagatgggatttcaccatgttgatcagcctggtttcgaactcctgacctcaggtgattcactggccttggcctcccaaagtgctga

SEQ ID NO: 17245 - DNA, 542 bp, Homo sapiens
atgctggttattgaagtatgatcaggagttagctgattggaaagaatattccagatggaagaatacaaaggagtgaatctccagtaacatggtgttatggactgaaccatgtcccccaaattcaatactactgccctattctgggaatagagttcactacaaatcctggtattagagactaggaatattaaattttagtcgcttaaatttcagcctcttaaattttatttaaagatgttatttcatttaaagagataacttcttttttttttttttttttttttttgagatggagtttcgctcttattgcccaggctggagtgcaatggcacaatgtcggctcactgcaacctcygcctcctgggttcaagcaagtgattctcctgcctcagcctcccaagtagctgggattacgggcatgtgccaccaagcccagcaaattttgtatttttagtagagatgggatttcaccatgttgatcagcctggtttcgaactcctgacctcaggtgattcactggccttggcctcccaaagtgctga

SEQ ID NO: 17246 - DNA, 565 bp, Homo sapiens
cttgagctctgcctcctgtcacttcagcatcagcattagattcttatagaagcatgarccctattgtgaactgcacattcaagggatctagtttgcgtgctcgttatgagtctccttatgaacctgatgatctgaggcgtgacagtttcatcctgaaaccacacccctgaccctcaccatctgtggaaaaatttgtcttccatgaaaccagtccctggtgccaaaatggttggggaccactgctttaaaatacataaacttatataagatgataattagagcaatgtagtgtgtgtgtgatatatattgatgtaatatgtagagtaataagattacaaagcatgggagaaagggataagctataaagcagtagaatttcgatatcacactcgagttaagctagtctaaatttgaagcatatctgataagatgcatataatataagcatagaacaaacactaagaaaataactaaaactatgatggaacaataatttgatgaattaaaatgttatactagaaaatattcacaatgcaaaagacaatagtaatggtggaagagaaga

SEQ ID NO: 17247 - DNA, 542 bp, Homo sapiens
cactggggccgccctgatggagcgctcctgcatgggaggcaggaccccaggctttgaggggagagctggcaaaagggaagcatgctctactgggaggcacctggggtaccctgagcctcttagtggttaagaacacagtgttttattagctgggcatgggggtgggtgcctgtagtcccagctactcaggaggctgaagcaggagaatcccttgaacctgggaggcagaggttgcagtgagctgagattstgctactgcactccagcctgggtaaaagagtgagactctgtctcaaaaagaaaaaaaaaaaagcaagaacacagtgtttgatgctagctgggcatgagttcaggccgcagctctgggtctcttaagctgtttgatcttgggcaagtcacttaatgtctccgagcctcagtttcttcatctatgaggtggggtgacaacagcaacccccagttggtgaggctgctgggtagatcaaatgaggggatgcacatgatgggtccagcccatgacctggttcagagcgagtgcccgg

SEQ ID NO: 17248 - DNA, 256 bp, Homo sapiens
tgaatagagtgagactcccatctcaaaaacaaacaaacaaacaaaacccctttatctgggcacacaatttgtgagcagtaaatattgttgttgttgtcactcctacctccaacctctgtaaaactcctaaaggttttatatccccttctccagagwggaagctgagttcagaaactcagcgttatttgcttaaggtcactcagctaataagtcgatttgatttcaggacacttgcttttttcatcacaacttaaag

SEQ ID NO: 17249 - DNA, 613 bp, Homo sapiens
ccagtctctggaccacacttggagtagcagctccagaaggcactctgggattctagtcatccacgtggtcactggctactctagccagaggcctgggagtcacctctctccttcatcctctcctcatcttctccctttcaagcccttggtcatcagatcttgtcagttccatcacactgcttctaggagctcctctcctttcctaacggactggcacaatattttcctccctgttccccaccatcactcactgccctggctgtgctctttgctagaccgcctcctgaaggctttcttattccgtcttccctctgtccaagcttttattttgattctgtagaaggctctttcactccgtgacccatctcttaagagaccaccgcaacccgggacctgttctctccctgcactcttcccctatgacgattgtataggaacagggtgtccctctrgttgtttctgcgtttccagcccccagctgagcgcccatcactctcaataaaatacttgttgattttaacaaacaaaaccccaaccctgaaagagaaaggccaaacagaggcctcagctgcatttcttccgataaaaatgaacattccttcgagattatgca

SEQ ID NO: 17250 - DNA, 1323 bp, Homo sapiens
ggtagagtaactttcatatgttggggaagggggttgccctttcagatccttatatgtaaatgatctattcatatattttgcacatatttctattgatttgccttttttcttatccacatatagaaggtttactgtggtatggacataagggttttgtttgtttggttgtttggttgttggttgttttttttttttttttgagacagagtttcgcttttgtcacccaggctggagtgcaatggcactatctcggctcactgcaacctctgcctcccagtttcaagtgattctcctgcctcagcctcccaagtagctgggattataggcgcccagaaccacgcccggctaattttttgtatttttagtaaagacggggttttgacatgttgggcaggctggtctcgaactcctgccctcaggtgatctgcccacttcggcctcccaaactgctgggattacaggcgtgagccactgcacccggccaaggtttttgtttgtttgtttgtttgttgtgagaccgggtctcactgtgtcacccaggctggagtacagtggcacgatcatggctcactgcagcctctgcctcccaggctcaagtgatcctcccatctcagcctcctgagtaactgggactgtgggtgtggtggttaatttttgtatcatttgtaaagagggggtttcgtcatgttgcccaggctggtctcgaactcctaggctcaagtgatccgcctgccttggcttccaaaagtgctgggatgacaggcatgagctggacacaagttttttgttatgtatataacatgtctacttctattcagttgcttgtcttaatttttttcatggtgttgtatagttccgacatcatgtaatcaaattatcaatctatcaatatggctttttgcctttctgcctcttctaataatcatagactcttctagggttttaatttcacttctattaatatttgcmaatggtaagaagtagaaatttagcatcttcctccaaatggaaggccaattatcctaatgtctttcctagaagtcccagtgaatgtcttctcatctcccgttggctctggccatgcccatttataaactagtcactcccaacagggtaactggatatactgacgtcaaggcagcccgagctgcagacggggtcagtcccttcaacacacttcaataaggctaaatgaatgaagagtaatatctcaaataaattttgtgaaactgtccttgtaggaagtgcgataaatgccggcagcagcaacaacaacaacaacaaaaacagatatctattgcataaccttatgaattatcccat

SEQ ID NO: 17251 - DNA, 584 bp, Homo sapiens
ttttgtaggtatgggagacacatcaactctaaaagatcacaaccaaatatgctgtaccacgccaaggttaattgagcaggtaaggataactgtggaagaatcccgcacaactgcctcataatctgactgggtgctcttctggggagtgaggctaggctcatggataccagctttaatgttattctgctcagcgttttagtattataggcattaatctgatttaatctgtcaccttggatcaaccctgagmgtcaacacttcacaattaatatattaaaatataagaaaaacattctgctttagattaatttcataaccactaaatacttgtacatttttgtggtgatgccaggaatctgaagtctgctcaatgatccacttatttatcaacttcaatgctgacaaagtttcaggttagcaaagaaagttagataatttttgaagttatttgcaagtaaatttattactttttgattataataaggtttttaacgtaaggagttaggagccatagtctttattgtcaccaaaagccttaactgtcgtctcttatataactgtgattagaaaatgacctcaaaata

SEQ ID NO: 17252 - DNA, 595 bp, Homo sapiens
aaatacaaagcagaattgccttgttttccagctgcaaaattgctaatctgtgaccccggtttacatcaccacaattctgaaggggagaattaggttatgaatgaatgtggctgagaaatagaggttgaagagaaaggatatgacacttctcaatcaagcccagggtgttatgaaaatgcataatgtagtgtgaggtccttcctaataaaccagtgaccagtacaactgaaatacatacaccagggcccatggttggaggccaggcaaaatagtcatgaagaaattatcttcttaggtaaacatcacattgcagattatatttatgtgtttttactrgagttgataatagactaaggtgtatgcacattgtaaacactcaggatatgcaattatttaaacgtgacattctgtgctccagggaaatagaacagttacgtgaaggtaaaaatcgggaaaatgtactgatttttaaaaagtttaaaaagtttaaaacttcaccaacttttgttttatactagtgtagtactaagattttaaattaaaaaaaattaatgatcaagatagcgatgctataatataacaaaatcaacccttg

SEQ ID NO: 17253 - DNA, 533 bp, Homo sapiens
tttcgttgctctgcacagcagatataagctcagatatgcttattttgagtaatctaaaataaacgtgagatagataaaaaacaactatttttccttgtctttttttttttttttttttttttgagacacagtctcactgtgttgcccaagctggagagcagtggmgcgatctcggctcaccgcaagctctgcttcccaggttcataccattctcctgcctcagcctcccgagtagctgggactacaggtgcctgccaccacgcctggctaattttttcctatttttagtagagacagggtttcaccatgttagccgggatggtcttgatctcctgacctcatgatcctcccaccttggcctcccaaagtgctgggattacaggcgtgagccaccacacccggccctacttttccttttctatacctgcactccacacacttctgtgaccagggattgaagcgatgtcaaggaatactctgacaccagctgaatgacaccagccgagtgtcccacaattcaattcaattctgat

SEQ ID NO: 17254 - DNA, 555 bp, Homo sapiens
tggggcaatgtttagcaacttctgcagagtgtttcctgggatgtccagcatwtcctgggattctgggctttgggtatggcaaaggcagcaactgtaggtagttaatgtgagacagcattgcccactaatcacctggaagctaggcatccccgttacatgagcatgcaatcccagctttgcccagtgttagccctcatgaaattgctcttggcttcttggcagagagaaccgccccccattccccagagtgttattaaatgagtattaaatgccccatctatggtggttctggcctcttcccctcctctgccgcagcatctctcagtcctaactccttctctggcctccttctctagagtctctttcccttctttcccatctatcccaataataaaaacacctcatctgttttaaaaatgaagagagtaggagataattgttttccaatgattgtacttttagaagaacatcaaggaaaaaggttggtcctttttaaaaattagggggatatttgaaaagagcaaacttgaagaaaccaaatgcatgccagtttta

SEQ ID NO: 17255 - DNA, 594 bp, Homo sapiens
attctgagatgaagggataattcattggatttcattcatttttgtcccgttaattcatgttgttttctttacagcctaatatatggttaatttttgtaaatatgtttttacttctctgcatgttaatgatggaaataattattgaatagtcaatattgaccgctttctttagtctttcaattctgaattgttcaagaaatattcccctttatcttgctgtcaccaatactggagtgctgtggtgtgatcacggttcactgcagcctcaacctcttggactcaagcgatcctcctgcctcagcctcctgaatagctgggattacaggcgcacaccaccactcctagcaaatttttaawttttttatagagacagggtctcgctattgctcaggctggtcttgaactcctggcctcaagcaatcctcccaccttggcctcccaaagtgctgatattacagaagtattctgatgtaacactactatgtgtgtaaatagttaggactgttagattttcatcatggattataaacttcataaataaaaaatgtgtactctaagtggtttatcacttgaattctgtgcaacactgcttta

SEQ ID NO: 17256 - DNA, 594 bp, Homo sapiens
attctgagatgaagggataattcattggatttcattcatttttgtcccgttaattcatgttgttttctttacagcctaatatatggttaatttttgtaaatatgtttttacttctctgcatgttaatgatggaaataattattgaatagtcaatattgaccgctttctttagtctttcaattctgaattgttcaagaaatattcccctttatcttgctgtcaccaatactggagtgctgtggtgtgatcacggttcactgcagcctcaacctcttggactcaagcgatcctcctgcctcagcctcctgaatagctgggattacaggcgcacaccaccactcctagcaaatttttaatttttttatagagacagggtctcgctattgctcaggctggtcttgaactcctggcctcaagcaatcctcccaccttggcctcccaaagtgctgatattacagaagtattctgatgtaacactastatgtgtgtaaatagttaggactgttagattttcatcatggattataaacttcataaataaaaaatgtgtactctaagtggtttatcacttgaattctgtgcaacactgcttta

SEQ ID NO: 17257 - DNA, 594 bp, Homo sapiens
attctgagatgaagggataattcattggatttcattcatttttgtcccgttaattcatgttgttttctttacagcctaatatatggttaatttttgtaaatatgtttttacttctctgcatgttaatgatggaaataattattgaatagtcaatattgaccgctttctttagtctttcaattctgaattgttcaagaaatattcccctttatcttgctgtcaccaatactggagtgctgtggtgtgatcacggttcactgcagcctcaacctcttggactcaagcgatcctcctgcctcagcctcctgaatagctgggattacaggcgcacaccaccactcctagcaaatttttaatttttttatagagacagggtctcgctattgctcaggctggtcttgaactcctggcctcaagcaatcctcccaccttggcctcccaaagtgctgatattacagaagtattctgatgtaacactactatgtgtgtaaatagwtaggactgttagattttcatcatggattataaacttcataaataaaaaatgtgtactctaagtggtttatcacttgaattctgtgcaacactgcttta

SEQ ID NO: 17258 - DNA, 497 bp, Homo sapiens
ggtgttaaaaacctcttatgaacccttgcatcaactttaccctaaatggattataatgttagtaattcatacttctcatttttacatgatgccctgaagtatctactttagactgtaaaatgaaaaggccatgaaaaaattaaaaatttatcatttctttcagtcaagagaccgtaaatgattccttcattaaaccaaactctttcctcagtcttcagtttttttttyccaattttcaaagagcttcaatagtcagtggcaaaggatgaggtgcgggatagagttctgtgtttcagcataaatcacagcatcttctgtttagaaggagccttaacacccctcctttcgccagcttttcttcctcaccatgcagccatctcatccttgaagttcctggcaagtgacttacaagccttttctggacacaatactgaaaagcagctcactcctttgaatgatgccaaatccactgatgggtcgggttatatgaaaattgc

SEQ ID NO: 17259 - DNA, 1742 bp, Homo sapiens
agggcctcacattgtaaaataaacaaacagcccagaaagacacagggtgaaaaatgaaagtcccctttcaccttctgctacaaatcctactcctctattaacatagtgtgaattcttccagaaggttttttttaaaaacaaaaaacatatggataatttaaagtaaaaccattagaacactatgagatgcctcactaccccctgcacctgctccccccataaaccttaaggaatgtcattgtttctcatgggataagatccttaccactgaaccctttgcagaagctgcagaagcagagatgcctctaactcctaatcctgcttcattaaattagttaaccaatgccatctgcttaccagccattgagaatattaacaagaagtcattttaattgatttttttaaagasagggtcttgctctgtcacctaggctggagtatggtggcatgttcatggctcactgcagccttaaattcctgggctcaagtgatcctcctgcctcagcgtccaaagtagctgtgatattgtccggctgtccccccacccaaaatctcatcctgaattgtaatccccataatccccatgtgtcaagggagagaccaggtggaagtaattgaatcatggggatgtttttccccatgctgttctcgtgacaatgagttctcatgagatctgatggttttgcaaggggctctttcccctgcttcgctccgcacttcttcctgctgccttgtaaagaaggtgccttgcttcctctttgccttctgccatgattgtaaagttcctgaggcctccccagccatgctgaaatgcaagtcaattaaacctctttcctttataaattacccggtcttgggcagttctttatagtagtatgaaaatggactaatacactgggattacagacatgagccactgtgaccagctaattttttaattttttgtaatgatggggtctcactatgttgcccaggctggaagcagtcatttaaaaaaaattgaggtctggcatgatggctcacacctgtaaacccaccattttgggaggctaaggcaggaggattgcttgagcccaggagtttgagacaagcctgagtaacattttttgtagagacaagggtctctacaaaaaaataaaaacattagctgggcatggtggcatgtgcctgtagtcccagctacttgggaggctgaggtgggagatcccttcagcctaggaagttgaggctacagtgaactgtgatcatgccactgcatgccagcctgggtgagagagcaagacctgtctcaaaaaaaaaaaaaaaaaagtagacactgccattggtgtaattctagatggattactggttatactgttaaagcataaagtctcagggagcagacagtatataaccctaatcactaaaggaaggagtaatctcaagtcacctgctatatttttaaaaagcactttacatgtttcacttcttcaatcttcacaaagaccccactaggtaggtagcactgtcagtcctacttcagagatgaaggataagaggcgcagagaggctcagtggcttgtcacacactggaagtggcagtcagtcctttaaaacccacgtggtagatgctccccaagcagtctgtggaaaatataaacagctcccatcacagaagcctaatgttcctccaagaccacctgcatcaaaatccccagggacttaaaactgcagactcctgggccttatcacaaacctgtgga

SEQ ID NO: 17260 - DNA, 529 bp, Homo sapiens
aagaaaagcctaaataaccgatgaattcattttctgctatgccttatccttttgaagtattctctaatgggccttgggatttaggcctatgacattcagcaatgccaagcacatgyatattaccaagggccagagagatcatattggtaatatagcaagtatctactgacttcctaccctggttgtttctcattctctgtactaatcatacaaaaacttgtattgctacttagggaattatttaactgggattaaagagcgactacgtttaggataatcctgttggctttctctgagtcttgaagctttcaggttaactaacatcatattacaaataatagttctaagcagttagactgttagtttatttctaagcactaatagacagtgtggctgacagcatgcttagctgttttctaggaccccctatctgaagccggctccgggaagggttcagtaagaatctcttgccatggtgtgaggtgatgggggtggaggatagaaaagatccaagttgctcacaggaaac

SEQ ID NO: 17261 - DNA, 541 bp, Homo sapiens
ttgcctgtagataaccctttctgcatttatctcactgctactgtaattatttgtatacatatatttcagaggagggtactttatactcccagcacctaactcacagtagtagctcacagaaatgattcaatcaagtaactaattagcaagcttcctgaaatgaatcactgtgcttctcaagcttgtgaaaaaccctccaatgacagaaaaaattatactttggaaaccaagttatacaaaggcagtaggaagaaaaaaatgttgatataaaatattcaaaaagaaaaactaaaaatcataaatatggcacgttaacctcatctaaatggatagaaaggtagcacgattcacagcatgcatatttayaatgttgtctttaactgtgtcagtcaatgcggtgttcattagaggaaaaaaattgaaaccttctgatgttcccagaccaagcttatcagactttcttccatgttattaaacctctcatgtatttccattactgctgtcattgcactgaattataattatttatttatgtgtcttg

SEQ ID NO: 17262 - DNA, 588 bp, Homo sapiens
ccgtgaggcagagagcctgcagtgagctgagatcactccactgcacctcagcctaggcaacagagtgagactctgtctcaggaaaaaaaaaaaaaaaagtcctccagacacaagagtactattgcttgattccctttattatcacgttcaagaacaggcaaaatttatctcaggttgacagaagtctgaatagtggttataacataacagggaatggtattgactggaaatgggcatgaagaaactgatttgttggaaatgttttatatttttatctgtttagtggttatatggatgttatacatatgaaaaaattcatcaagctgtatatttgagatgagtgaagtttgctgtgtgtatgttatacctcaatttttttaaaaaaaagtatatgaacaagagctcaagacatggcaaattacagatttaattatttcaatgtttcttaaaattcaggataaaataattcatctttttctttaaaagagtgtccatgaatggcattttacttactactaccctaagtgccttaattggaaatgcatacagtattttaaaatcctaaaactgcatttttttatttwaaaa

SEQ ID NO: 17263 - DNA, 1378 bp, Homo sapiens
caggtgtcctggtctcaagtatacacacttctcccagggaggggctgagggcgcagaaaggcaggtgtcctcatctcaagtacatgtttctcccagagagggactgagggcacagagaggcaggtgtcctggtctcaagwacacacgcttctcccagggaggggctgagggcacagagaggcaggtgtcctcatctcaggtacacgcgcttctcccagggaggggctgagggaggagccagccccaccatctctgtgccttgctgacccccagcgtcctgccctgaatgagcaggctggagctgacagggctgaaggggatgtctgcctgcgggagcagaaggcatgcataaaaatgcaaatgccaggctcctttcctccctgcgctctgctcgtttatccctctcagacagataaaaaggaaactgtgccactgaggacagagcccctctgggtaaaaaagcaatagcaaagtgacaaatgtcatgtgggtttaagctaagtcccccatcgttacaaacccacagggaaataagcctgacaaatgcgcagccccgctcgctgcaccctcttcctttgaaataacttgagccctgaaaagggagaaagaaggaaataactcaaaaatgttaaaagcaaagtttctgtctgcaaaccaaatgggctgaatttttataggctcgtttggaagagcatgaaaaatccagttgtcagaggagcctctctctgccagacagcctcggggagagacacaaagggactacctaaaacctaagctgctctgctcccctgctcccatcccagggctcagcccgctctccccagcccctacccttgtcctgagggctgctgagccaaaagggagggctcctgtgcagggccaaggtgacctggagccgctctgatcccaggctcgcggagggcactgtggaggaccgtgcaggaagacaggttgctcctgccagttcaatgcactaagaccacacggctcccctccgcacagccctcgctgagtgccaggcactgctctaagcccttggcatgtcctttctccttcaatcctcacagcaactctatgagggaggcattatgattatcccacttcccagatatggaaactgaggcagggaaaggttcaggtgcgcaaatggaagtggaggatttgaacaaacacaggctctaaagctccctgccacagatgctggcagggtcccacccggtgctcctctttactggacagtccacagcacagcacaactgctaacagatcacagctaccccttccgagagaatccactttatccagagatgcctgggagatcgggaccacacgccagggggcttacagccaagcactgactgactggtatacaaaagcc

SEQ ID NO: 17264 - DNA, 609 bp, Homo sapiens
tttacttttctcatttactgggctctgattattttactaagccccaactggccctgtgggagctgcctacatgctttcagaagcctaagggacaatcggtgtatttcagatcctgtacattcatctgaaaagcaaaagtacaggacggacctcacatgggccattgacaaacttcagggcaattctgctggtctcctagaggctaattgctttgactaagcagttgccttcagccataacttyaggtaactgggtagattccctaattggagcataacctaaatattttgtaaataagaagttttcatagtcatcaagtaatttgtaattggcccttgaaaggataacgcagtttgttaactccatgaggtcagatttctaaaaattgggaaactggaaagtaggactcaaggtcttgtatgaatacaacagaatggcacaaatagatggggtgcagtggctcacgcctgtaatcccagcacttcgggaggctgaggtgggagaattccttgagcctgggagttcaagacaagccctggcaacatagtgagaccccatctctataaaaaatttttaaaaattagctgggcttgtggtacacgcctgtat

SEQ ID NO: 17265 - DNA, 2048 bp, Homo sapiens
ccctgaaatgggagataagggtcaacygctgataagaactcattgaattgaaaagaaaaagtcaggctgtaatcccaacactttgggaggctgaggagggcagatgatgaggtcaggagttcgagagcagcctggccaatatggtgaaaccccatctctactaaaaatacaaaaaagtagcctggcgtggtggcgcgcgcctgcagtcccagctactcaggaggctgaggcagaagaatcgcttgaatccaggaagtggaggttgcagtgagcgaagattatgccactgcactctagcctgggagacagagtgagactcgtctcaaaaaaaaaaaaaaaaaaaaaaaaaagaaagaaagaaagaaaaagaaaaagaaaaagaaaaagtcagaggaatataaagtgatcaagtgatcgtgtgtgtgtgtgtgtgtgtgtgtgtgtgtgtgcgtgtactcaccttcttgcagagaggtcaaagagcttttccaacatcatttcttctttagggctcaatgctttctgtggcttggtaaaggaggaaatatttgagcagtacaagataaatctgaatgagaatgaaggtaaccaaataattacttttatatcgaagttttccgtgcaagacagtatttagttgcctagagctggtccttgactcctgggctgattggactctgattagacttctaccacctggtatatccagtcaacaaacatcttctgggccccagcaaggcatcaggaactgtgctatgtcttaaaataaggagttgagtggagacacaaagaaataatggaaatgacccatcttcttgagaactgtgcatctaatggagtgaatacatatgtccagacactttcagttcaatgtattaagggaccagatgaaagtaggcagtggatgctgtgggagcccagaggggaaacacctcatccggcctgaggtaaggatgttggaaagggccagggagggttatctaaaggagctgacacatcagtacaattagcatcttccagtggttggtccagctttaaaatcacagcacctcaaagctggctatccctgaggtcaccgcatctgtcaaacttaatagtcatcacctgtttaattatctgatgttcctctcagcttcaaagaacaaagatggtttctgttttgcttattatgtgtccccatcacataacagtgtccaacacctaataggcaccttaaaaatatgggttgtgtgtcaagggataaatattagcacatgaattttcaccttctttccaagtgttaaggggaatcctgttgtaatatttaatgacagcctactgcattcttaactctgagccaagtctagaaggaaacaacaaaatcaagagaaacatagtagaatgtttggacacaagaaaacttggacatcagctgtttctataactcatttctaccataaaaaacaagttcagaaaagttgccttgtaactactagcacaaggtcatccaggtaattagtagcaagcaagtctgaaatccaagtatcctgaatttcagtcctcagttccttcctttgagccatgggtattgtatcagttacagacatgtgcagaggaagcacaaaggagtctggaaaggatgtacttcttttgctggcatacagagtatgtctgaattctaatgcagcctcatcttgcaagtaaggctttgtttaacagaatattttatgtgatagaattatgttctacaaaacccaaaattttaaaggatgttttctttgcgcatctgtaattgcttctggcgggtgcgccttctactttataaaaaagattcctttccctctttcatctgtctcagagaggctccagagggaaatgtaggaaacaaatgcttgttcaacccgtaatgttcccttgaaaagtgaagcttgaaatcctgtagggatctctgtgttctttcagaattgattttgacactgtagaactacatcctaactagctttcatgccaaaatatattgtgactagtgattggatagcttaaaaactattaaaaaatatactttttca

SEQ ID NO: 17266 - DNA, 2048 bp, Homo sapiens
ccctgaaatgggagataagggtcaactgctgataagaactcattgaattgaaaagaaaaagtcagkctgtaatcccaacactttgggaggctgaggagggcagatgatgaggtcaggagttcgagagcagcctggccaatatggtgaaaccccatctctactaaaaatacaaaaaagtagcctggcgtggtggcgcgcgcctgcagtcccagctactcaggaggctgaggcagaagaatcgcttgaatccaggaagtggaggttgcagtgagcgaagattatgccactgcactctagcctgggagacagagtgagactcgtctcaaaaaaaaaaaaaaaaaaaaaaaaaagaaagaaagaaagaaaaagaaaaagaaaaagaaaaagtcagaggaatataaagtgatcaagtgatcgtgtgtgtgtgtgtgtgtgtgtgtgtgtgtgtgcgtgtactcaccttcttgcagagaggtcaaagagcttttccaacatcatttcttctttagggctcaatgctttctgtggcttggtaaaggaggaaatatttgagcagtacaagataaatctgaatgagaatgaaggtaaccaaataattacttttatatcgaagttttccgtgcaagacagtatttagttgcctagagctggtccttgactcctgggctgattggactctgattagacttctaccacctggtatatccagtcaacaaacatcttctgggccccagcaaggcatcaggaactgtgctatgtcttaaaataaggagttgagtggagacacaaagaaataatggaaatgacccatcttcttgagaactgtgcatctaatggagtgaatacatatgtccagacactttcagttcaatgtattaagggaccagatgaaagtaggcagtggatgctgtgggagcccagaggggaaacacctcatccggcctgaggtaaggatgttggaaagggccagggagggttatctaaaggagctgacacatcagtacaattagcatcttccagtggttggtccagctttaaaatcacagcacctcaaagctggctatccctgaggtcaccgcatctgtcaaacttaatagtcatcacctgtttaattatctgatgttcctctcagcttcaaagaacaaagatggtttctgttttgcttattatgtgtccccatcacataacagtgtccaacacctaataggcaccttaaaaatatgggttgtgtgtcaagggataaatattagcacatgaattttcaccttctttccaagtgttaaggggaatcctgttgtaatatttaatgacagcctactgcattcttaactctgagccaagtctagaaggaaacaacaaaatcaagagaaacatagtagaatgtttggacacaagaaaacttggacatcagctgtttctataactcatttctaccataaaaaacaagttcagaaaagttgccttgtaactactagcacaaggtcatccaggtaattagtagcaagcaagtctgaaatccaagtatcctgaatttcagtcctcagttccttcctttgagccatgggtattgtatcagttacagacatgtgcagaggaagcacaaaggagtctggaaaggatgtacttcttttgctggcatacagagtatgtctgaattctaatgcagcctcatcttgcaagtaaggctttgtttaacagaatattttatgtgatagaattatgttctacaaaacccaaaattttaaaggatgttttctttgcgcatctgtaattgcttctggcgggtgcgccttctactttataaaaaagattcctttccctctttcatctgtctcagagaggctccagagggaaatgtaggaaacaaatgcttgttcaacccgtaatgttcccttgaaaagtgaagcttgaaatcctgtagggatctctgtgttctttcagaattgattttgacactgtagaactacatcctaactagctttcatgccaaaatatattgtgactagtgattggatagcttaaaaactattaaaaaatatactttttca

SEQ ID NO: 17267 - DNA, 2048 bp, Homo sapiens
ccctgaaatgggagataagggtcaactgctgataagaactcattgaattgaaaagaaaaagtcaggctgtaatcccaacactttgggaggctgaggagggcagatgatgaggtcaggagttcgagagcagcctggccaatatggtgaaaccccatctctactaaaaatacaaaaaagtagcctggcgtggtggcrcgcgcctgcagtcccagctactcaggaggctgaggcagaagaatcgcttgaatccaggaagtggaggttgcagtgagcgaagattatgccactgcactctagcctgggagacagagtgagactcgtctcaaaaaaaaaaaaaaaaaaaaaaaaaagaaagaaagaaagaaaaagaaaaagaaaaagaaaaagtcagaggaatataaagtgatcaagtgatcgtgtgtgtgtgtgtgtgtgtgtgtgtgtgtgtgcgtgtactcaccttcttgcagagaggtcaaagagcttttccaacatcatttcttctttagggctcaatgctttctgtggcttggtaaaggaggaaatatttgagcagtacaagataaatctgaatgagaatgaaggtaaccaaataattacttttatatcgaagttttccgtgcaagacagtatttagttgcctagagctggtccttgactcctgggctgattggactctgattagacttctaccacctggtatatccagtcaacaaacatcttctgggccccagcaaggcatcaggaactgtgctatgtcttaaaataaggagttgagtggagacacaaagaaataatggaaatgacccatcttcttgagaactgtgcatctaatggagtgaatacatatgtccagacactttcagttcaatgtattaagggaccagatgaaagtaggcagtggatgctgtgggagcccagaggggaaacacctcatccggcctgaggtaaggatgttggaaagggccagggagggttatctaaaggagctgacacatcagtacaattagcatcttccagtggttggtccagctttaaaatcacagcacctcaaagctggctatccctgaggtcaccgcatctgtcaaacttaatagtcatcacctgtttaattatctgatgttcctctcagcttcaaagaacaaagatggtttctgttttgcttattatgtgtccccatcacataacagtgtccaacacctaataggcaccttaaaaatatgggttgtgtgtcaagggataaatattagcacatgaattttcaccttctttccaagtgttaaggggaatcctgttgtaatatttaatgacagcctactgcattcttaactctgagccaagtctagaaggaaacaacaaaatcaagagaaacatagtagaatgtttggacacaagaaaacttggacatcagctgtttctataactcatttctaccataaaaaacaagttcagaaaagttgccttgtaactactagcacaaggtcatccaggtaattagtagcaagcaagtctgaaatccaagtatcctgaatttcagtcctcagttccttcctttgagccatgggtattgtatcagttacagacatgtgcagaggaagcacaaaggagtctggaaaggatgtacttcttttgctggcatacagagtatgtctgaattctaatgcagcctcatcttgcaagtaaggctttgtttaacagaatattttatgtgatagaattatgttctacaaaacccaaaattttaaaggatgttttctttgcgcatctgtaattgcttctggcgggtgcgccttctactttataaaaaagattcctttccctctttcatctgtctcagagaggctccagagggaaatgtaggaaacaaatgcttgttcaacccgtaatgttcccttgaaaagtgaagcttgaaatcctgtagggatctctgtgttctttcagaattgattttgacactgtagaactacatcctaactagctttcatgccaaaatatattgtgactagtgattggatagcttaaaaactattaaaaaatatactttttca

SEQ ID NO: 17268 - DNA, 2048 bp, Homo sapiens
ccctgaaatgggagataagggtcaactgctgataagaactcattgaattgaaaagaaaaagtcaggctgtaatcccaacactttgggaggctgaggagggcagatgatgaggtcaggagttcgagagcagcctggccaatatggtgaaaccccatctctactaaaaatacaaaaaagtagcctggcgtggtggcgcgcgcctgcagtcccagctactcaggaggctgaggcagaagaatcgcttgaatccaggaagyggaggttgcagtgagcgaagattatgccactgcactctagcctgggagacagagtgagactcgtctcaaaaaaaaaaaaaaaaaaaaaaaaaagaaagaaagaaagaaaaagaaaaagaaaaagaaaaagtcagaggaatataaagtgatcaagtgatcgtgtgtgtgtgtgtgtgtgtgtgtgtgtgtgtgcgtgtactcaccttcttgcagagaggtcaaagagcttttccaacatcatttcttctttagggctcaatgctttctgtggcttggtaaaggaggaaatatttgagcagtacaagataaatctgaatgagaatgaaggtaaccaaataattacttttatatcgaagttttccgtgcaagacagtatttagttgcctagagctggtccttgactcctgggctgattggactctgattagacttctaccacctggtatatccagtcaacaaacatcttctgggccccagcaaggcatcaggaactgtgctatgtcttaaaataaggagttgagtggagacacaaagaaataatggaaatgacccatcttcttgagaactgtgcatctaatggagtgaatacatatgtccagacactttcagttcaatgtattaagggaccagatgaaagtaggcagtggatgctgtgggagcccagaggggaaacacctcatccggcctgaggtaaggatgttggaaagggccagggagggttatctaaaggagctgacacatcagtacaattagcatcttccagtggttggtccagctttaaaatcacagcacctcaaagctggctatccctgaggtcaccgcatctgtcaaacttaatagtcatcacctgtttaattatctgatgttcctctcagcttcaaagaacaaagatggtttctgttttgcttattatgtgtccccatcacataacagtgtccaacacctaataggcaccttaaaaatatgggttgtgtgtcaagggataaatattagcacatgaattttcaccttctttccaagtgttaaggggaatcctgttgtaatatttaatgacagcctactgcattcttaactctgagccaagtctagaaggaaacaacaaaatcaagagaaacatagtagaatgtttggacacaagaaaacttggacatcagctgtttctataactcatttctaccataaaaaacaagttcagaaaagttgccttgtaactactagcacaaggtcatccaggtaattagtagcaagcaagtctgaaatccaagtatcctgaatttcagtcctcagttccttcctttgagccatgggtattgtatcagttacagacatgtgcagaggaagcacaaaggagtctggaaaggatgtacttcttttgctggcatacagagtatgtctgaattctaatgcagcctcatcttgcaagtaaggctttgtttaacagaatattttatgtgatagaattatgttctacaaaacccaaaattttaaaggatgttttctttgcgcatctgtaattgcttctggcgggtgcgccttctactttataaaaaagattcctttccctctttcatctgtctcagagaggctccagagggaaatgtaggaaacaaatgcttgttcaacccgtaatgttcccttgaaaagtgaagcttgaaatcctgtagggatctctgtgttctttcagaattgattttgacactgtagaactacatcctaactagctttcatgccaaaatatattgtgactagtgattggatagcttaaaaactattaaaaaatatactttttca

SEQ ID NO: 17269 - DNA, 574 bp, Homo sapiens
gccactgagcactcacctcttcctggccttcagccagaagcccagacacgagacctctgaccacccgacggagggagccagcaacagtgaggccaacagcgcaggtacacagagctttccccaagatgggaagaccttgcgcagctctcatcccctgccacagccacagactgcattcctagagggtcccctgaacatagtaactgccccaacggtgcgaacatgaaccaagggacagggacgcctttcctcatagtgccttacgggaagccctgatgaacctctcagcaagaggaataaacaggaggcataattcctgccactatggatcaaaragcaggatggggaaagaggagacacaaaataatgtatggtgggggaagagagccttcagcaaaggctgacggtccacggatggagcacattcagcttctgtgtccaggctgggactagcttggaagtgttagaggagagggaagccatgatccctgtcttcctggagcttgggctataatgggggagacacagccaatcccaataagcgagcatgaacccagctgacacataaccccga

SEQ ID NO: 17270 - DNA, 598 bp, Homo sapiens
taattatattctaatttaaacattcattcacagttaaaattaagtattctatgtatacattatgaataagaagaaattaaagggtaaatttagaaataactttatgacctatatttattcacccaatcaacaattatttcttaaactaccattgtgttctgggtcagtgtttggctttggggacatagagaggttagagtattgcacaggcgagaccttgacatcctgcttatgactggatctcagatcctcacggattcatctatatcctgtgatatttctatacagtttttcaaagactcagatagacatacgttatggactgaatgtttgtgtcctcccaaaatrcatatatccaaatcttaacctccagtctgatagtattgggaggtgtggcctttgggagggaattagttcatgtggttggagcgctcatgaagtggaattagtgcccttataagaggagacaggagaattttttccctctgctgtctctcacttgctttctctctctctttctctctctctctttctctctctctcccccactctctctctctctccccctcctctctctgccatatgaggacatagtgaa

SEQ ID NO: 17271 - DNA, 537 bp, Homo sapiens
gctcctgcaccctccacagcagctgagcagccacccgcatcatcctggagcagcaggctaagggaggcagaactgacaacggggaaagtaggtcagaggacccatgcagacagtgatagagaaccctggcggtgatgccaaacatgacgacgtttttgtcttcttcccccaccccacccaatttgggaatcaagggagatcagcgatgctttattctgctccccaggacttcctaaaataactgggatgctgataatgatctcctcctgcagacctggcagagaggggaacagggcgattcccagaacgggcttcagccatgtgggcacagccctgtggggtgggcttggattgagatgtgtgtaatgcaattatagtcaaaaagaattcttgggatctgccaggaaggctgaggaaacctctccacagtgatgagtctcaattaagcagtgctttttagcacyggaggcaaagctgaaatgtcatttccagatgttggtggattgagtcttttcaggtggcataaaggacaggggt

SEQ ID NO: 17272 - DNA, 1810 bp, Homo sapiens
gcagctgtgagaagaggggtgggggcagaagcagagaggggcacgcctgctactttgctgtgatttgtttgttttgttatctgtgggcctgactgaactggaggcgccttgagagcagggcctgcactgcacatgcacaaccctaccgagagcccatgcaggccggaaccaggtgcagcagatgggagggggcatggatagggaagaactgtgtgaatcaggaaactgttccaaaggaaaaatgagccgctaagcaaggctgctggcaggtgcaggtaacacaccagaattcactgtgagcttaaagcctttcgccaaaggcttttaatttcaacacatgcaggacattttccaagaaaacactcagctttaatcttataatggaagtcaataacaaaacaggatttgcattgctgtatgcaaatgaaaaaaatatatattcattttccagactactttgctagaaaaatcactccctacaatttaaaaatgtctatatttaactcattttagctacacaggtggtgttacatacattgtctgtttacacagctttaacagacaaccataacatactttccagctcactggagaagactctggagaaaaaagctacttcttaattctgtattctagcaataataggctccacttggacacatcaaaggaattaatggtcagctcatctgagtggtaattacaaaaactagctttagaccagggcccaataagcgttttctgcaaagggccagatagaaaatattttaggctttgcaagcatcacacagtattgaatccatagtcttctttgcttttgggggctttctttcctgtgagttttgcttgtttgcttgtttgtttaccacgctaggaaaaaaatgtaaaaacaatctaacttatgagccaaacaaacaggccacgatttgccaaccccagctttcgaccacaatgagaagggggcacttggagttccaagctcctccttattaaatccaagggggcaggacccccacagttttggattacctctttcagtctctccagctcattctggagggcctgtttggatatttccacttcaatcatctgctgtcggagagtttcgttttcatcctcagctttagcgcgcttttcctccaccgtcttaagttcgtggtgcaatctgacagatacatctttggctacctgcatcgacccacagagatcattatcaggatatgaggctttttgtgtgctaagggtactatcagacaacatcagaggcaaaatcattaagtaatatattacaccacatagcaaagaccctggcaatacacaactgacttattgttaaaaggaggaggagattcatttaaaaatgaaatcaacatctgggctaaaaggccactctggctggtctgatggtggtgcattatcagaacgtgctaamcttagtgtcactaaagttggtatccaacccccccaaactgctaaatttaaatggctttaaaataaatagtttttaaagcccactttggataaccctcctccctcacagatgatcaccaaccatgccaattctgcccaagctcacgtgctttaagcgagaaattcgaataataataaacaaataaacatttatattcactaaagtaatactgaacccatctgctaacaaaacaagtaagttgcctgtaatcccagcactttgggaggcaaagaaaggagaatcacttgaggtcaggagtttgagaccagcctgggaaacacagtgagaccctgtctctaaaaaaattataaaaataaaaaataatccaggcatggtgatgca

SEQ ID NO: 17273 - DNA, 544 bp, Homo sapiens
gggtcggggtgagagggggactaagcagagggatcttagaagtgccttaatcagtctttcacttgccaagttccaaatgaggaacagcgtctggatgggtgtgtgggcgcttggcgatgagggtggcatggccaagttgcagagcgctatgcttaagggttcttgaaaggtcaaaggtcagccacaggggcgcctccccctccccattcccccccactgtagtcgatgaatacgatgaatactttgggtggaagggctttgtgtgccttgagggctgttaaaggaccttttctttatgatttaactattcaatgctcaaaacccatggagcctaaggaaccagacagaggaaagcttggctttgccaaagagcgttttctccaggtagaaagcataaagccctgaatgatttaaagtcagatgaggattttggttccttttaaayagatattgtttacttcatttaatggttcggctttttagtagactttttctttagtttcttgtcagcccagaactgacgacataaagtgtttttatcatc

SEQ ID NO: 17274 - DNA, 591 bp, Homo sapiens
caagaggctcttgtttattaagagccactatttatttagggaatgagggtgtcactcctttctggtactaaggatgtggtcgaaacagtgaaataaagaaaattgagaaacctggaagatgtgaatctaataaagttggcacttgaaatctgtaagatttttttctcaatacattaaagataaaatctgaaatccttattttgcctccatgccaatgcataacttgtcttttcctcttcattacacacaatataattagcaaatttccatgccttagttatattgacagatctctgtatacagagcaggtgtatatgaaaaatttactatgtgctaaatcaaaggaattcaagaattatgacatggcccctactctcaagccgtcaggtagagtggataagcacataaatgcttatggtatcgattgataagcacatgctggagaaatgagaatctctgcagaatcaactttggcacgttatattcttattggtcctaatacaaaaacagaaagattgtgataacttttcaatcagtgttttttacactctaaaaaaamcccataattctcagtaaaaaaaaaaaaaaaaa

SEQ ID NO: 17275 - DNA, 1394 bp, Homo sapiens
aaaaaatagttatcattactgagtgcttagaaactatagcaacaagtggcttagaattggaaggaaaactgtctgtatacaatacatgcatgcacataaatttacattatcagaacattactgatatttatatctgaagtcctaagtcataaaatatgggtatttggactctgttaaaaatatctcccttctattttgatgattaaagaaatgcagccataaatcttgtttagtttttaaaggcatataaagaaaagaaatgcatgtaataatgtagcccaaataagttcaattctatgaaacaacactgatgttttctaacgaggaaaattctacccattatgtttttggaatctgaaaaaaaaaatgatgaatttcctttcctatagacttgccatgtgggaaatgttctaactttatattgcagaagtgaaaccttcatgacttcacaaaaagaaatgtgcaatactgagtgaattacaataaactgaaaatttccctgtgctctttcctttatccttgagtagaatgaaatctaccatctaacagattcctgctgtgactttttacattggtatggagagccgattcttagggtattccttgccaagatggagtaatggttctaaaacctaatagaagactcctgatttaaaagaatttataatgtataaatatgaaaaaagagagtattcactcaaaaccaagactcccatgtgtagagtaaaaagtggaaacatactctaattacagtggggctgagagagagcaggaattacaagaatggaactgactaagtctttggataaacttcctgaaatgtatggattttagctacctttttaaaaaaaggaagctactcaagtgcatatgagacttagattcactacatcttgggccaagaaaaaactttaaaggtatggatgtagcagtggggcaagcgttttgcataaagaatagcaaactgatgagaattgctgctatgaggcattgtagaggagataaataggaattaatttggagatctctctaagagtgtgaatatttgtaacaatagcaaaagttyagttcttcgacgtgtggagcatgttcatatgtatcgcctgatgtgatacacaaaatcttctgagacagaagtatgactaccatttcattgtagagatgaaagcaccaacatgcttccctcttctgcaaaatgaaaataatatagtacctatctccctgagctgctgtaaaaattaaattagattatgcatgtgaacaacttatcagagtgcttggcacatttcaggtgttcaacgaatacttctgatactaaaaagaaaaatgaagttaaagataccattctatgaatacatagctataaagtaacaagactgagactgtattaaagc

SEQ ID NO: 17276 - DNA, 579 bp, Homo sapiens
tcagagaaggaatttgatttccctgctcataccactttctaactccttagatcaattactgcggccaaggcaatgggatattatcctggaccacacctgagtcatgtgccagatgtgaagggctagggagtgttatcagataaaagaagatggggaagctttctggatagaagacaaaatacacctctcactgtgccttctaacctgttttagttaaaccttataaacttggagaagacaaccatccactgttttatcttgtcaggaaagtacaacatttctcttcttttttctccctatcatttttacactacttatttaggtccttcctttgcgagaggtctggaaatctatttattttgtaattaacaaagggcaaaaagatctaccctgaaatttttggttggggtccagtgttttctaactacaccagctgtgggaattcaatgatgtcaaggtcccctccctcctttgtttataagactaattttggaattataccattatcaggaaatggtgttcccttccttctgtccattccttaggaayggtactttttgtttgtttgtttaaaaaaaa

SEQ ID NO: 17277 - DNA, 560 bp, Homo sapiens
ttcaagatgagttttggatggggacacagccaaaccatatcatcttataagtaaagtaatacattttctggtactttcattcaatattcatttcatcttaaataaatccagagaaattcaacaaaaattcacaattcagtcactggcttaagccacatatcttatttatgtggaataagccagatttacataagcaaatccaaatttctagcttagtattatattctattacatggaacactgcatatttggaatgagcaatttttaaatagattttagccaatctattaatactctgtcactaatggtttttactgtatcagtcccattggttactgagttaacttggttttattttttcttgttttaattcattttcaatttagtcccattggagaccatayaaaaacacaaaaatgttaatgtttttatgctgaaaactacattgatgagaatgctagaaggtgtatgttattcttcatccagtgcctgatgttaggtcacttataaaataaaacataacatcttggaatactaaaggatgtttgaagaatataggt

SEQ ID NO: 17278 - DNA, 590 bp, Homo sapiens
gacacggctaggaatgatcaaaaaagatagagcatatcttagtataagtaagaaaattaaactattcttgccatttgtttgtgaggatcataaaacaggagacatgcctaccatatgagaaaatggactgcttgcaggtatctgctttgataagtgcagagcttttgttaggaaatcaaatcccacattaatrggcttgccctctttctaggtcacatagggaagtatagaattgggccatggaagtttttctattcttttaaattattgaaaatttgtgcatttatctttcaaagacaaaacagaatatactaagaaatgccagacaagtagaaaataaatggtactgcaagattttttctctgtattgacaactgaacggaaattgaaataaaacagggaggtagacagtttagccaaatgatatgagcatgattaatgttctaagcgatgtctaaccaagtcaaagcatgtattttactatttgttaacacccccaggacccttggtccagttagttttgacacattccagccaaaatccttaaaaataaacaaaatcccatggcctgagctagaaacaacatattt

SEQ ID NO: 17279 - DNA, 550 bp, Homo sapiens
catttgcccttgcagcttaacattccaagatggacagtgctggctaagggatgggagacatggactcatctggctctcatctccacaccattgagatctagacaccrgtttccagtttcttttgaggctcaataaaaagaggaatgctttgtgtagtatatcccctgtgcttgcatggtcagaccagctagttggtacagactgggtcacaatgacagtaatagcatggacttcctagctcaggtagccacatgctcacatggcccagctccttgaaaagttcccgtcatagtccttggagttttgacaggttgtctattttgaatacaccaacattctcttgcctgcttcttccttctctcactaacggttactgcagtttcagtaggcactgtggtctcttcccaactgcatcactaggaggctgggtccctgatgcagcccagtcttgggggtggtgtgtgaagaaatggatggattcatcttctttgcggtcctctctagccccatcttaatcctgcttgcgtgcctgtatctcacatgatcctca

SEQ ID NO: 17280 - DNA, 550 bp, Homo sapiens
catttgcccttgcagcttaacattccaagatggacagtgctggctaagggatgggagacatggactcatctggctctcatctccacaccattgagatctagacaccagtttccagtttcttttgaggctcaataaaaagaggaatgctttgtgtagtatatcccctgtgcttgcatggtcagaccagctagttggtacagaytgggtcacaatgacagtaatagcatggacttcctagctcaggtagccacatgctcacatggcccagctccttgaaaagttcccgtcatagtccttggagttttgacaggttgtctattttgaatacaccaacattctcttgcctgcttcttccttctctcactaacggttactgcagtttcagtaggcactgtggtctcttcccaactgcatcactaggaggctgggtccctgatgcagcccagtcttgggggtggtgtgtgaagaaatggatggattcatcttctttgcggtcctctctagccccatcttaatcctgcttgcgtgcctgtatctcacatgatcctca

SEQ ID NO: 17281 - DNA, 550 bp, Homo sapiens
catttgcccttgcagcttaacattccaagatggacagtgctggctaagggatgggagacatggactcatctggctctcatctccacaccattgagatctagacaccagtttccagtttcttttgaggctcaataaaaagaggaatgctttgtgtagtatatcccctgtgcttgcatggtcagaccagctagttggtacagactgggtcacaatgacagtaatagcatggacttcctagctcaggtagccacatgctcacatggcccagctccttgaaaagttcccstcatagtccttggagttttgacaggttgtctattttgaatacaccaacattctcttgcctgcttcttccttctctcactaacggttactgcagtttcagtaggcactgtggtctcttcccaactgcatcactaggaggctgggtccctgatgcagcccagtcttgggggtggtgtgtgaagaaatggatggattcatcttctttgcggtcctctctagccccatcttaatcctgcttgcgtgcctgtatctcacatgatcctca

SEQ ID NO: 17282 - DNA, 928 bp, Homo sapiens
tttagaattactgatatagtttggatatttgtccccatccaaatctcatgtcaaattgtaatccactatcgtggaggtggggcctgttaggaggtgtttggatcatgggggcggctytcttgtggcttgatgctgtcttcatgatagtgagttctcatgaaatttggtcgtttaaaagtgtgtggcacctccccccacccccacacttgctttctctctctctctttctctctccctctatctcttgctcctgctttcgccatgtgaagtgccaggtcccgctttgccttctgccatgattgtaagattcccaaggcctcatcagaagctcagcagaaccatgagccaattaaatctctcttttttaaaataaattacccaacctcaggtatttctttataacaatgcaagaatggtctaatgaagttagtcatcttttcttttttccatttaaatgggaatttaaaaaaaccttttttgatgatttgagttgtaaagttggatcctcagcttgtgaacctagaaagaaatagcaggaaactagaatcctcatttttatctctattgtagaatttgaagttttttctaactttgaagagtaaaatgcatcatgaagaaaactgatgtcatgatcaaaatgaaaatgtaaagtatgtaaatttaagaattttgatgtaaaaatgtaaatgcctaagcttcttattcaatgtacagattcgaattaggcacattatagacatttaataaatatgaataggttaattctgcacattaattcccaatccaatatttttagggtcactcatgatagaatttatgaaattaattatatgttagatatgcaaaaagatatgcaaaatatgcaaaaagaaatctgccaattgaacattactatctacagagaagaaaatactcttaaagtatgtca

SEQ ID NO: 17283 - DNA, 928 bp, Homo sapiens
tttagaattactgatatagtttggatatttgtccccatccaaatctcatgtcaaattgtaatccactatcgtggaggtggggcctgttaggaggtgtttggatcatgggggcggctctcttgtggcttgatgctgtcttcatgatagtgagttctcatgaaatttggtcgtttaaaagtgtgtggcayctccccccacccccacacttgctttctctctctctctttctctctccctctatctcttgctcctgctttcgccatgtgaagtgccaggtcccgctttgccttctgccatgattgtaagattcccaaggcctcatcagaagctcagcagaaccatgagccaattaaatctctcttttttaaaataaattacccaacctcaggtatttctttataacaatgcaagaatggtctaatgaagttagtcatcttttcttttttccatttaaatgggaatttaaaaaaaccttttttgatgatttgagttgtaaagttggatcctcagcttgtgaacctagaaagaaatagcaggaaactagaatcctcatttttatctctattgtagaatttgaagttttttctaactttgaagagtaaaatgcatcatgaagaaaactgatgtcatgatcaaaatgaaaatgtaaagtatgtaaatttaagaattttgatgtaaaaatgtaaatgcctaagcttcttattcaatgtacagattcgaattaggcacattatagacatttaataaatatgaataggttaattctgcacattaattcccaatccaatatttttagggtcactcatgatagaatttatgaaattaattatatgttagatatgcaaaaagatatgcaaaatatgcaaaaagaaatctgccaattgaacattactatctacagagaagaaaatactcttaaagtatgtca

SEQ ID NO: 17284 - DNA, 1282 bp, Homo sapiens
cagctagctgggagaggaaaaaagccctgatttgtggtgtttgccaatttctgcaatacaaatattttcaccgtgactgatttcaagctatcaatcatttgacaacaggcctgcaaaagtcctaaatatttaacaataagcttttataagccagtccaagccagtaccagcacactactgaaccactgatacttttacatactgaattcttatgttggaataatgttacttctttagctgtcccacaaatatgttcattcaattaaaattcatccattargagagtatctttatgtaagacttaagtgcactttacaatagaggttataataatttgagtcacagactactttgaggagctaagcaaggctatatacattttctctccaaggggggaaaagtactaagaattttgaatataatttcaggagattcttggatctccttacatttgttcatgggtgtcagctttaaaacgcctgctatttctttgagctagagaaactaatgtgacaggcaacattctgaatgtcattgcttcagttcactaagcttatagattactggagtgctaaaaagtcactatctcattgcaaaagagttaagttaccaatacagtcatgtgtcacttagtgatgaggatattttctgagaaacgcatcattaggcaattttgttattgtgcaaacatcatacacaaaatagctggtatagcctactacacacttaggttatatggtaaagcctatgtctcatagggctacaaatttttacaggaatgttcttgtattgaatactgtaaataactgtacacgatagtaagtatttttgtatctcagacatatctcaacatagaaaagttacagttacatatgtgatattataatcttatgggaccaccttctacatattagtctgtggtctactaatgactgaaacattgttatgcagcacatgactatattttattaatcatgtttactgtgtggactcttctatcattattctaaaactcagagatcacaaggaattcataaaaagatcatgaggtcaatttaattaacctcattagaagcattaaacaatttaattttgttttctccctttgttctatgaattttatatgaaccattacataagctaactctagaacttgtgatattttaattttcattttgaaatacatacttcctatatgtatatatgtacatgtgtagatgtatgtataaacaaaaactcagccaacattattttattctttttttttctttttgaatcttat

SEQ ID NO: 17285 - DNA, 1086 bp, Homo sapiens
gacaagacttatctctgccagtgatacacggtccacaagcctgggacaagaattgctgagtcagaacatatcctcatcatctctctttttactaccataatagtaatttaccaycatctagttcttttgtgggcatcggcatattcaaggtctcacagccactatatttcgcatgacttccctcagctctgtcattttgctttctctaaaataaaagttggtttcaagttcattatgctaaccactttaggtcttgggcatatcttctccgtccttgatttaaactatccttagaaaagcctcatatatctgatttatgtctttatattactaataaataagttaaagaaagctagaatcactgccgtttttttgcacccaccattgggcaatttttatgcaattgaaatactgcttatttccacctcactggcacagcacttcatgactcaggtctaaggaaagtacctaaggtattaaaatccagaaaaattacatcaagggccgcaaaaatgaaatcttttctaatacaacttgaaaatggcaaagaaatatagaatttgaaggtagtctcagttctgtctcttgacaaattttggtaagctcaccgttacaccacggagagcatttatcccaagcagctctgctgtctctgtctctaaatcattccatatgtcaagaaaggcttatctatacatcacaaaaccactctgaaatatagcttactcaggggaaaaaagtgctatcttaacgtattatgtgataattaatcacacacagttcaggaagataaagattctcttgcaaaacaagaacaataaaataaaggggttaagatccaataataaattggtactctgaaggagtttagagtctttctttttctgatgtttcttaatctagaagcctagaggatacttttgtaatcactaaaggaattttattcttcctactagagctgtttctcccggcaaaacaattaggtgattaaagaggtttacacagagcatcactgtggtctactaaggatttgtacttgacattaccagtaaatgaaattcacaggggaaaatctgactcatatgg

SEQ ID NO: 17286 - DNA, 581 bp, Homo sapiens
aaaaaatttaacttacaatggagttataagatataatcccattataagtcaagcggcatctgtattctcttacagttctgcagatcagaagtccaaaatgggtcttaaaaagcaaaaatcaggaagtcagcagckggtttctgtagatggcttcaagggagaacctgttccttgccttttccacttacagagactaatttgcattctttggctcctggctttatcactgccatctgtgcttccttagtcaccttgcctcctccttttccagagcatttctgcttcaatcttgtatgaatagttgtgattacattcagagcttctgaagagatgggacaaactaaagtgttttctttttctattctcacatactaaacacagaatatttcacctccagtcaccaaaatgtgtgggaatttctccccagcagaaattaatcagttctccagcagacaccaactgggtgtcctacaatttaattcaattctgatattctacctggaggtagtatcaggtcctataggttaagggctcaatcccacaaggctattcttctcttgagatgccaattgcaagcccta

SEQ ID NO: 17287 - DNA, 581 bp, Homo sapiens
aaaaaatttaacttacaatggagttataagatataatcccattataagtcaagcggcatctgtattctcttacagttctgcagatcagaagtccaaaatgggtcttaaaaagcaaaaatcaggaagtcagcagcgggtttctgtagatggcttcaagggagaacctgttccttgccttttccacttacagagactaatttgcattctttggctcctggctttatcactgccatctgtgcttccttagtcaccttgcctcctccttttccagagcatttctgcttcaatcttgtatgaatagttgtgattacattcagagcttctgaagagatgggacaaactaaagtgttttctttttctattctcacatactaaacacagaatatttcacctccagtcaccaaaatgtgtgggaatttctccccagcagaaattaatcagttctccagcagacaccaactgggtgtcctacaatttaattcaattctgataytctacctggaggtagtatcaggtcctataggttaagggctcaatcccacaaggctattcttctcttgagatgccaattgcaagcccta

SEQ ID NO: 17288 - DNA, 591 bp, Homo sapiens
taaacaacagtcacagtctgttaattatacctgcttcagggaaaacagtagaattatttcatgagtgactaaaaatctttaagctcttatgaaggatttgacaaaagattctcataaccagggtaatcataatttatcatcacaaccagggggctgtgggagtgaagggagtttgtgctgggaacactggcataaactaggactattctgatcaaaccaggacataatcactttactgtgcattaaaacaaataactggggttacgatagaggccctgccctcacaaaattcaaaggcataggtcattagatgtcaccatggtgcaatatggtaagtaataagataaaggaattgtagagaaggggctaaggwcccaaaaaccctgtgttgggggtcaggggtaataaaagaaaaccatgtgtcatccaatagttccagaaccctgtttattatcagaatcacttagggaacttattggagaatacagattcctgcctgcccccatcccctgccagagtctcatttaatgggggaatggtatcccagggagaggaaatagcatatacagagagtctgagggaaatgaacac

SEQ ID NO: 17289 - DNA, 481 bp, Homo sapiens
tgcattggaaggagaaatactattaatttcrttttatatgctgaaattttctatggcacattttgccatagaaaattcatgtcaataatctctaacgggttttaagattatgaagttttttcatgacactctgatttgattctatagaatttaagagtttttaaatctgttaatataaagtccattagctactttaagtcattaacagatcattgatgtacacaagggaatcttaaatatttctaaaataattaagaaaagatagctttaaggctactggcaacaatatataattaaaagaataaaaaatgatggaaataataaactgaatattgcatacagtggacatgaagtttgtttttatttggcttttacagatgccttaacattattttcctccagatcaatctaaaggctctggcatactgtgcttgaaagaaattttcatttctccttcttgaaagagaagagcaaaatccaa

SEQ ID NO: 17290 - DNA, 641 bp, Homo sapiens
atactataattttgacattatgggccactattaatatttattagttaggagctggcctgtgaattgtgaggtgtttaacagcatacctctacttactacatgctagtagcaccccatcctcagctgtgacaaccacaagtgtctctagacgttgccaaatgttccctgtgaggcaaaaactgtccctgattcagaactattgttctttttttttttttttttttttttttgagatggagtcttgttcttgtygcccaggctggagggagtgcaatggcaggatctcggctcactgcaacctccacctcctgggttcaagcgattctcctgcctcagcctcccaagtagctgggattacaggcggctgccaccacgcccagctaatttttgtatttttaaagtagagacggggtttcgccacgttggccaggctgctctcgaactcctgaccttgtgatctgcccacctcagcctcccgaagtcctgggattacaggcatgagccatcgcgcccggcccagaactattgttctaagtggatgaattacagaaaattatttttgttgtttgttttccaaagatgttggatatgtgcatatatatgtattacatagtgagaacaataacaaaaaagttattaaa

SEQ ID NO: 17291 - DNA, 791 bp, Homo sapiens
tactagctgtgcgtgatggtgcatgcctataatcccagctactcaggaggctgaggcaggaraatcacttgaacccgggaggcagaagttgcggtgacccaagatcatgccattgcactccagcctgggcaataagagtgaaactcagtctcaaaaaaaaaaaaaaaaattagccaggcgtggtggtggtgggtacctataattcctgctactctggaggctgaggcaggaggattgcttgaacccaggaggcagaggtgcagtgagccaagattgcgccactgcactctagcctggatgacagagcgagatgactactgtctcaaaacaaaaaaaaaattaatttctattatttatttatttagagatgctgggggagggggggggtggtgtctcactatgttgcccaggctgatcttgaactcctggcctcaagcgatcctcccaatgtgctggattacaggcgtgagtcactgtgcccagccaaatttctactgtttctgtctatggtattttttattatagtagccagaatggattaagacagggcatggtcaccatgtagcagatggggaaactgaggctcagagggtacagtggcctgctcaaagctaggatgtggtggggggagggctggacccgggccttggtccaccatgcatcctctctgaccccgggctggagcccccctcacccggaaccttctccgcagcatgctgttgagggcgaagtcgtccttccaggcgctctgggcctcctggatgtggctcagtgtgggcagcgccttcttg

SEQ ID NO: 17292 - DNA, 791 bp, Homo sapiens
tactagctgtgcgtgatggtgcatgcctataatcccagctactcaggaggctgaggcaggagaatcacttgaacccgggaggcagaagttgcggtgacccaagatcatgccattgcactccagcctgggcaataagagtgaaactcagtctcaaaaaaaaaaaaaaaaattagccaggcgtggtggtggtgggtacctataattcctgctactctggaggctgaggcaggaggattgcttgaacccaggaggcagaggtgcagtgagccaagattgcgccactgcactctagcctggatgacagagcgagatgactactgtctcaaaacaaaaaaaaaattaatttctattatttatttatttagagatgctgggggaggsggggggtggtgtctcactatgttgcccaggctgatcttgaactcctggcctcaagcgatcctcccaatgtgctggattacaggcgtgagtcactgtgcccagccaaatttctactgtttctgtctatggtattttttattatagtagccagaatggattaagacagggcatggtcaccatgtagcagatggggaaactgaggctcagagggtacagtggcctgctcaaagctaggatgtggtggggggagggctggacccgggccttggtccaccatgcatcctctctgaccccgggctggagcccccctcacccggaaccttctccgcagcatgctgttgagggcgaagtcgtccttccaggcgctctgggcctcctggatgtggctcagtgtgggcagcgccttcttg

SEQ ID NO: 17293 - DNA, 791 bp, Homo sapiens
tactagctgtgcgtgatggtgcatgcctataatcccagctactcaggaggctgaggcaggagaatcacttgaacccgggaggcagaagttgcggtgacccaagatcatgccattgcactccagcctgggcaataagagtgaaactcagtctcaaaaaaaaaaaaaaaaattagccaggcgtggtggtggtgggtacctataattcctgctactctggaggctgaggcaggaggattgcttgaacccaggaggcagaggtgcagtgagccaagattgcgccactgcactctagcctggatgacagagcgagatgactactgtctcaaaacaaaaaaaaaattaatttctattatttatttatttagagatgctgggggagggggggggtggtgtctcactatgttgcccaggctgatcttgaactcctggcctcaagcgatcctcccaatgtgctggattacaggcgtgagtcactgtgcccagccaaatttctactgtttctgtctatggtattttttattatagtagccagaatggattaagacagggcatgrtcaccatgtagcagatggggaaactgaggctcagagggtacagtggcctgctcaaagctaggatgtggtggggggagggctggacccgggccttggtccaccatgcatcctctctgaccccgggctggagcccccctcacccggaaccttctccgcagcatgctgttgagggcgaagtcgtccttccaggcgctctgggcctcctggatgtggctcagtgtgggcagcgccttcttg

SEQ ID NO: 17294 - DNA, 791 bp, Homo sapiens
tactagctgtgcgtgatggtgcatgcctataatcccagctactcaggaggctgaggcaggagaatcacttgaacccgggaggcagaagttgcggtgacccaagatcatgccattgcactccagcctgggcaataagagtgaaactcagtctcaaaaaaaaaaaaaaaaattagccaggcgtggtggtggtgggtacctataattcctgctactctggaggctgaggcaggaggattgcttgaacccaggaggcagaggtgcagtgagccaagattgcgccactgcactctagcctggatgacagagcgagatgactactgtctcaaaacaaaaaaaaaattaatttctattatttatttatttagagatgctgggggagggggggggtggtgtctcactatgttgcccaggctgatcttgaactcctggcctcaagcgatcctcccaatgtgctggattacaggcgtgagtcactgtgcccagccaaatttctactgtttctgtctatggtattttttattatagtagccagaatggattaagacagggcatggtcaccatgtagcagatggggaaactgaggctcagagggtacagtggcctgctcaaagctaggatgtggtggggkgagggctggacccgggccttggtccaccatgcatcctctctgaccccgggctggagcccccctcacccggaaccttctccgcagcatgctgttgagggcgaagtcgtccttccaggcgctctgggcctcctggatgtggctcagtgtgggcagcgccttcttg

SEQ ID NO: 17295 - DNA, 606 bp, Homo sapiens
tgctttcctttactgagattttttggtagttgtatgtaattcactttgttgcaatttccttgtttattcccatggagcctaacatagtctccagcttcttagggtaagggcagcaaatccttctctgcatacccacagcaatagagtaggggagaggatggagagtttctttgttgtgatctagtcacctttctctcagattcctgattttatgtaataattgtgtatgcgtgcgtgtgtgtgtgtgtgtgtgtgtgtgtgttggagacatatggtttagtgttaatttaaattaatatgagattacccaaatactttttagaataatttgagtatactttatttatttttattttttaagayggagtcttgctttgttgcccacgctggagtgcagtggtgcgatctcggctcactgcaacctccacctccagggttcaagagattctcctgcttcaggctccccagtggctgagattacaggcatgcgccaacacacctggctaattttttttgtatttttagtagagacagggtttcaccatgttggtcaggctggtctcgaacttctcacctcaaatgatctgcccaccttggcttcccaaa

SEQ ID NO: 17296 - DNA, 628 bp, Homo sapiens
gtagaatcagctagagtgaaatgtgccaagtatgaaaatatggacctgccactacccctgaaattttatgatttccacttaatgtgtaaaaatgtaaatgaagctaagaaataaaagtaagttatgaaataaacgatcgatttttttttctttttttttttttgagacagagtctcgctttgtcrcccaggctggagtgcagtggcgcgatctcggctcactgcaaattccgcctcccgggttcacgccattctcctgcttcagcctcccgagtagctgggactacaggcgctcgccaccacgcctggctaattttttgtatttttagtagagatggggtttcaccatgttagccaggatggtctcgatctcctgacctcgtgatccgcccacctcggcctcccaaagtgctgggattacaggcgtaagccaccacgcccagccaaaagatggatttttaaatggtatatttcttctttctttccccttccttccttccttccttccctccttcgttccttccttcctctctttttctttccttccctccctccctttctttcttccttccttccttcctcccttcctcttccttccttcctttttttttcagggatagggtcttgct

SEQ ID NO: 17297 - DNA, 947 bp, Homo sapiens
ttggaatgagagataacaagataccatatgtgtagtaggtgcccactgtgtgatgactgaaatctccaccctgtaggtcacatatatgcaaaattctgctatgcacaattgcaatgaatgatgcagtacccagtcactgacacattcccattgtttgaacagaaatgctcaatgctactttggcagagatttatcagaaattgtttgcaaatttgttttgaagtacaagtctgttactatggttttctggtaaagtctcccacttctgctttctctaggtatgcaagaatcagagacttcatttttcttctccaagcccccaaatgtacaaatccatcttcatgagtttactgtaccaaaacccgggtgttttaactaatcaattatatttttaacctctcctaacctcaaaggcattgagggattactggaaagcactgcttcttctctgggagtaaacacaatagcaccatctgaagagaattgcctgcactagagttcctcgagctctggtttccctggggttctcacgcaggtcctctaagggcccagccctctccctgatttgatgagtctgctggaagtcttctgcattgccctctgcattgactgactttccagacttctcattccatcctgttgttcctattcccacatcctaatgcatgagtccatcagatacaaaatgactgctctcgcagaatggcaggggaagtggttcatgatcatcatccatataatccatrtctcctcacttcacatcctagcacaggacactgctgacccccaggggtgggctaatgaatgctagctaacactgtgcccactctacatgtggatgtggccttaaactctttaaatctccttctctctgaattcacccatggcttctcattgctgtcccttgtcctgaaaggtaaagaatgagaaaggtaaagacacttccc

SEQ ID NO: 17298 - DNA, 947 bp, Homo sapiens
ttggaatgagagataacaagataccatatgtgtagtaggtgcccactgtgtgatgactgaaatctccaccctgtaggtcacatatatgcaaaattctgctatgcacaattgcaatgaatgatgcagtacccagtcactgacacattcccattgtttgaacagaaatgctcaatgctactttggcagagatttatcagaaattgtttgcaaatttgttttgaagtacaagtctgttactatggttttctggtaaagtctcccacttctgctttctctaggtatgcaagaatcagagacttcatttttcttctccaagcccccaaatgtacaaatccatcttcatgagtttactgtaccaaaacccgggtgttttaactaatcaattatatttttaacctctcctaacctcaaaggcattgagggattactggaaagcactgcttcttctctgggagtaaacacaatagcaccatctgaagagaattgcctgcactagagttcctcgagctctggtttccctggggttctcacgcaggtcctctaagggcccagccctctccctgatttgatgagtctgctggaagtcttctgcattgccctctgcattgactgactttccagacttctcattccatcctgttgttcctattcccacatcctaatgcatgagtccatcagatacaaaatgactgctctcgcagaatggcaggggaagtggttcatgatcatcatccatataatccatgtctcytcacttcacatcctagcacaggacactgctgacccccaggggtgggctaatgaatgctagctaacactgtgcccactctacatgtggatgtggccttaaactctttaaatctccttctctctgaattcacccatggcttctcattgctgtcccttgtcctgaaaggtaaagaatgagaaaggtaaagacacttccc

SEQ ID NO: 17299 - DNA, 527 bp, Homo sapiens
cggcattttaattattcaatctgtaggataagtcaatgagggctcattatactatcatctctttacttgcgtgtatgtttgaaaatttttacaatgaaaacaacagaagcaaaagaagatgctgagaggaaattggtgagaggtgaaacataaaataacagcactgagctggagacaatggaatttagagattgtggccaggaaaggcctcctccaggaggggacgtcgatgctgaaggagccttcactaagaaagctggggaaatattggcggggagtgggaggcgtaggaacaggtgcaaacgcaccaaagaagcaaaaggcatggagtatcagagaaaaggggagtgagccaacaagccaggaacagaggggccrcaggtaaggaggcccaggaggagacggcactagcaccagcccagccagatggggcctcgtgctccctacaggagatgtggtgtgatcacaatcagtgggatgctgtcagagggttttaagaaggggcagatttgatgggatgtactttt

SEQ ID NO: 17300 - DNA, 563 bp, Homo sapiens
agagaggcatgaaaagcccattgtccacacatgttgcagcttctttttggagaatgttttccaggccttttatgttctgtctctgattctcggaactctgcaaggtcagtgtgaccaccctgctccaaatctaagaaaacagaggttwccagaggaaggagaaattgtgcccggggtcacacagcttgcaagaggcagagtggaagttgattccagctctgcctgcaggaccctctcatttcccctgtttcccttcttgataaaggatcttcttcactctggaggtgccacccatgagaacaaagagctctgcagagatgtggattcctgaagagctgcaggggaactgggagagggttttctgacagaacaatcttacctcaagaagtcagttaggcatggctgtaatatttcttttcactcccaggtaataccaaattgtaagtgcactaggacataaagaatacttttgtccatggaaaaatgaggtgggaattctaaacaaagcaagttttaaaactgtttcacttcaagtgtacaagtcccatcacgtgtaatcatag

SEQ ID NO: 17301 - DNA, 558 bp, Homo sapiens
agggcatgatgctgtgtgcctgcagtcccagctactcaggaggctgaggtgggaggattccttgagcccagaagtttgaggttgcagtgagctacctcaaaatgcagtgagtcatgcccatgcactccagcctgggtactgmgtgagactctgtttcagaaagaaatcccttcccaatctcaaattcctttgtgacctcttatatacgaaatgccaaaggactacttatagaaaaagggtacaactgagagatgggaaggaaaaagggaggaaaggaggacggcagagctggagaggacatttttgtactagagcaccggggaaataaaagctgaaggaaagcaaacatgggcccctgtaaaggttttcttttgagggatgagggtagagttgaagaaagagtatttacaatgtagtcgaataaaaaatgacctgcgtttgagcccaggcattcgaggttgcagtgagctatggtcatgccagtgcactctagtttgggtgacagagtaagacatagtctaaaaaaatttaaaaaaaaaatatcaagtttgaatattg

SEQ ID NO: 17302 - DNA, 603 bp, Homo sapiens
tgtctaaatcacaattcctaggatttgtgttttgaggcttatctaggattcagatccaaggtataatcaggcttacactatgcaacagggattttgctagatatattaactagttgtcttttaaccctcatgaaacctttgtgaggttgcattgccatgactattttcaagatgaaaagattgaaaagttaaattgacacataggggctggttattaattacaggtttagccatgctcaaacatttcagaagcttatatatttttataaatataataaggtcttttctgttatattcctgaattttgttwtattattttttcagttaatatcttcttgactttttaatttatttgttttccatgagagatttctgttacaagcaaaatacatatagattcaaatctattgttctgttttattcttgaatgttgtattgttagaaattatcagactttctttgaatttcctggtcttctattttgttcctctgaggaaatatgatgttactaactcatcactcactgaactgtattaaataccacattacatacttttgacattcatcataataatcaagcaacttgtactgcctagtatttta

SEQ ID NO: 17303 - DNA, 563 bp, Homo sapiens
tatctgtgtgtgtgtgtgtgtgtgtgttttatcaaggctacttaaagtgattttgctgatggagttggaatttgggaacagattactccacaatttatcaatataatgccaaaaggagtgatctcaactagaaaacagtctcacgtaaataaagtccactatatattttagttgttttgtaatccagattcaggcacaggttcagatttcagcaagctgaaacaaaaggacgcgggattaagttttaatttaattttaaaggtctggaaagagcacaatgatctattgtggaaaagacactaatcactgaggacygtaatgattgctgtttgaaaattttaatatgtaagggtacctgattaaaatttaaggggcatcttgagtttttccgaagataaattaacatttattgagaatttcttgatgccagaatctggactggttgctttgaacatgatatcccatttaagcctcatggcaactttagaagctaggtttcattagctaggaaaaggttacgattttagtgcaaataatgtgaagtttaggatcagatagttatg

SEQ ID NO: 17304 - DNA, 563 bp, Homo sapiens
tatctgtgtgtgtgtgtgtgtgtgtgttttatcaaggctacttaaagtgattttgctgatggagttggaatttgggaacagattactccacaatttatcaatataatgccaaaaggagtgatctcaactagaaaacagtctcacgtaaataaagtccactatatattttagttgttttgtaatccagattcaggcacaggttcagatttcagcaagctgaaacaaaaggacgcgggattaagttttaatttaattttaaaggtctggaaagagcacaatgatctattgtggaaaagacactaatcactgaggaccgtaatgattgctgtttgaaaattttaatatgtaagggtacctgattaaaatttaaggggcatcttgagtttttcygaagataaattaacatttattgagaatttcttgatgccagaatctggactggttgctttgaacatgatatcccatttaagcctcatggcaactttagaagctaggtttcattagctaggaaaaggttacgattttagtgcaaataatgtgaagtttaggatcagatagttatg

SEQ ID NO: 17305 - DNA, 614 bp, Homo sapiens
caagtccaaagttaaatcaacatacatctttaaaatctatccattaaaaaaataaaatgttttgtggggttcttaagaaaaatttgtgaatacagtacctggtacaatgagaatacaatgtgtagagcacagcatactgaatggcagggaagtgaacagccaggtcactgtgcacaatcatcagattcttactcagaagtgcaaagacagttggagatagcgcccacatctgatcatgtacaaaacaaagtaagtttatggcttctccaaaataagcacaagcatacagagtttatccttcaaaacaggggtatttggactttttttatttggacatttttaaattaaaattacagattggaagggatctagtacactacaccttggacaaatacttttttgtgaagtcagtaaagcctttgcgtgcaatatagcatctctatgcaatgcagcaactccttgtctatcrctacagtaagaaaacagccacaggtcaggtgttgtggctcacacctgtaatcctagcactttgggaggctaaggtgggcagatcacttgagcccaggagtttgaaaccagcctgggcaacacagcgggaccccatctcttactaa

SEQ ID NO: 17306 - DNA, 556 bp, Homo sapiens
acatgggcatattgcatgatgctgaggtttggggtacattaggagtcatcaatctcttcctttagggtttgtgtttcatgtttaagaaatctttccctaccttggggtcatgaaaatcacctcctatgttattttctgaaagtcttaytctttaaaaactatagcttaaagactcattaagaactgtaatgcacctgatattgatttctgcatatagtataagataaaggtacaattccaatagacttacaatacagagttaacaagttaaaatactaataaaatgaatactaataaaatgctgctcttctttctattcagattaagaaatagagcatggccacttagggactcctgtgtctccaccatcaaatcacctactctccctcagaaggtaacatctatcctaactcttgttttggttattgttttaccacctgtgtgtctatacccagacagcatattgttccatatggctactttgagtctttatagaaataaacacatactgtatgcattcttagagtgaagtgcttcttgcaatgcaagtctgaaa

SEQ ID NO: 17307 - DNA, 556 bp, Homo sapiens
acatgggcatattgcatgatgctgaggtttggggtacattaggagtcatcaatctcttcctttagggtttgtgtttcatgtttaagaaatctttccctaccttggggtcatgaaaatcacctcctatgttattttctgaaagtcttattstttaaaaactatagcttaaagactcattaagaactgtaatgcacctgatattgatttctgcatatagtataagataaaggtacaattccaatagacttacaatacagagttaacaagttaaaatactaataaaatgaatactaataaaatgctgctcttctttctattcagattaagaaatagagcatggccacttagggactcctgtgtctccaccatcaaatcacctactctccctcagaaggtaacatctatcctaactcttgttttggttattgttttaccacctgtgtgtctatacccagacagcatattgttccatatggctactttgagtctttatagaaataaacacatactgtatgcattcttagagtgaagtgcttcttgcaatgcaagtctgaaa

SEQ ID NO: 17308 - DNA, 556 bp, Homo sapiens
acatgggcatattgcatgatgctgaggtttggggtacattaggagtcatcaatctcttcctttagggtttgtgtttcatgtttaagaaatctttccctaccttggggtcatgaaaatcacctcctatgttattttctgaaagtcttattctttaaaaactrtagcttaaagactcattaagaactgtaatgcacctgatattgatttctgcatatagtataagataaaggtacaattccaatagacttacaatacagagttaacaagttaaaatactaataaaatgaatactaataaaatgctgctcttctttctattcagattaagaaatagagcatggccacttagggactcctgtgtctccaccatcaaatcacctactctccctcagaaggtaacatctatcctaactcttgttttggttattgttttaccacctgtgtgtctatacccagacagcatattgttccatatggctactttgagtctttatagaaataaacacatactgtatgcattcttagagtgaagtgcttcttgcaatgcaagtctgaaa

SEQ ID NO: 17309 - DNA, 556 bp, Homo sapiens
acatgggcatattgcatgatgctgaggtttggggtacattaggagtcatcaatctcttcctttagggtttgtgtttcatgtttaagaaatctttccctaccttggggtcatgaaaatcacctcctatgttattttctgaaagtcttattctttaaaaactatagcttaaagactcattaagractgtaatgcacctgatattgatttctgcatatagtataagataaaggtacaattccaatagacttacaatacagagttaacaagttaaaatactaataaaatgaatactaataaaatgctgctcttctttctattcagattaagaaatagagcatggccacttagggactcctgtgtctccaccatcaaatcacctactctccctcagaaggtaacatctatcctaactcttgttttggttattgttttaccacctgtgtgtctatacccagacagcatattgttccatatggctactttgagtctttatagaaataaacacatactgtatgcattcttagagtgaagtgcttcttgcaatgcaagtctgaaa

SEQ ID NO: 17310 - DNA, 598 bp, Homo sapiens
aaaaaactatctgcacacacacacacatatacacacatacagaaaagtacagaatccaatgtgacaaatactcaaccccaaaatggtgacaattgttaatctgatctgtattttttctttttttctttttttttttttttttggagtcagagtcttgctctgtgcccaggctggagtgcagtggcacaatctaggctcactgcaacctctgcctcccaggtttaagcgattctcctacctcagcctcctgggtagctgggactataggcacgcgccaccacatctggctaatttttgtatttttagtagagacggggtttcaccatgttggccaggctggtctctaattcttgacctcaggtgatccgcccgctttggcctccaaagtgctgggattacaggcgcgagccaccgtgcctgcctcttatctataatttttatgaagctaatatgacaaagttgtctccttccctccacaagggcaaatacrctcatgccctcctaatcttgtattgaaccatatccttggcatattttttcaaacttttacatacatttatgaataaatgtatgttatggttttgtgtattttaaaaat

SEQ ID NO: 17311 - DNA, 598 bp, Homo sapiens
aaaaaactatctgcacacacacacacatatacacacatacagaaaagtacagaatccaatgtgacaaatactcaaccccaaaatggtgacaattgttaatctgatctgtattttttctttttttctttttttttttttttttggagtcagagtcttgctctgtgcccaggctggagtgcagtggcacaatctaggctcactgcaacctctgcctcccaggtttaagcgattctcctacctcagcctcctgggtagctgggactataggcacgcgccaccacatctggctaatttttgtatttttagtagagacggggtttcaccatgttggccaggctggtctctaattcttgacctcaggtgatccgcccgctttggcctccaaagtgctgggattacaggcgcgagccaccgtgcctgcctcttatctataatttttatgaagctaatatgacaaagttgtctccttccctccacaagggcaaatacactcatgccctcctaatcytgtattgaaccatatccttggcatattttttcaaacttttacatacatttatgaataaatgtatgttatggttttgtgtattttaaaaat

SEQ ID NO: 17312 - DNA, 584 bp, Homo sapiens
tgagattaaacgtccccccaaaatactaaattaagctcactgtaattagcatgctgctaccattgattggtacaaattttctcttaagattcccatatattttgccactttttttcaccacagctagaacagtcccaccaccctgttcagatttaaaactcagctaacatgggttatcatatgtcatatacctgtttgtcacatggactaggacatataaacttcagtcactttaatgagttttacatgtcttctccagtatccattctaatattatactttccccacataaaaatagtactgccacttgtttctaattcttatttcttctaatttgcattggctaggatttccaacatactattgaaatatatgggcaatactgagctccttayttttccttctgagtttaacaggaatgtttacagtttcacagttgcatatgatgtttgctgaaggtattcatagaataccttactaacttagggaaataactttctgatatcaatgcatgtctgagtgaagaaggaggcaacattatttgatatataggtcaaaggtgaatggaagtttattagtaatat

SEQ ID NO: 17313 - DNA, 608 bp, Homo sapiens
catatacctattaggattagtgacaaatacagaataccaaaagactgaatccacgtgaattgtggattagagaaataatccagtgtcatccacatataaaatttcctagcacacctacaagtctagttgattaaataagctccttgctttgtttgggattaaaagaacagactgtgtggggcaatccaaatggttaatggtagagatattttaaataatcattgcagtttatgaagaccagagccacagactgtctggtcttttgaaagtggtcctagcctaacctactcagtgatcatcaggaataccacaggcctttcccaatccagagaattagaaaccatgcccatcagtgaggactactgcattcacgtcagagatattcttggcttccagctcattcatgagaccacaggggccaatttaaatttcaaatcatcaatagggctcatttcatttagaatctcctatgaagcatggaaagaaatgcaaagttactgtgttggcaaarcattttatttaaagtatggttatatttaaataatccttttataatttaattttgaattcagaaatcctggaaaatgtccattaagcaaataataaaa

SEQ ID NO: 17314 - DNA, 575 bp, Homo sapiens
tatcagatttgttaaggaaacggaaccagccagctgcaaagcctcctatggcttgccttaagctttaaaactaaggacagtctgataattatctttcaatacttacatccagtgctttgctggtaaatgtttcacagttagttctctcaggagggagaagggagccctgatttgtagcatttactaatttctatggtgtaaataatcccaatatggccaatttcaagctaccaacataataacaattggctttcaaaattccygaaaatttaacagttgtccctcctgagctattatgacctcgctccagcatacacctgcttttttgcagctcatatatgagaggtatttatatcttattagcaaatattcagaaataaaaatctatttttccatctcccttctgccgccgcatgagtcaaaagccaatctccaagtgcagtggcagaataagcaccagcgggcaggtagctggtcaccttccttctttctttatccccgtatgcttcgaatttttctgaattatgattccacctgggttgaggaggtcaagaaccagaatcacttaagaaaaa

SEQ ID NO: 17315 - DNA, 557 bp, Homo sapiens
accgaggccagggagacgcccaacgaggcagccctgggctcttctctggcctcytcaccagggcacccatccaaggaacctccgaacagccaggaaaagccatgagttgcaaccaaaacgcggctgaggatggaactcagaatgaaactgcaacccacctgcccccagccctgcccctcgccctgatgcgaagctggagaggggcgtgctgcggggccctgatgcccccacccacctcggtccagcgcggccctgcccaggaggcggcagccgggcgcaccctcgccagccctgctggagtttgctgtgggcactgaggcgcgggcgcccttccaaagcacatactcaccgaatgtttacagactggctgtcctggcagggctttcaactgcacatgttttttatactttcctttttttttttttttttaatattttttacaaaaaaaaagattttatacaagcaatatatatatggatttctataatcactcgatgtgatacagtataaatatgctatggtttgtttgttatgaacagatagccaccagttacggc

SEQ ID NO: 17316 - DNA, 565 bp, Homo sapiens
ctcacacataaccttttcactggttccatctttcgtcatcttaaccacctacttatcagtctacagcttctcatttctaactgaagagsctcccaatttttccttttttttttttttttttttttttacaattcaagagtcctcatggcagggtcacaatgtcctttttcaaatttctttactacagcctattgcctgtaacttcaatacaatttctaatatttgctttcttccaaccatgctgactaatttgcccatattcttgaatttattcttatatgttctccctgccaatatctccctacctctacccatatggtacccatttcatgtaggagctcaaatgccgcttaagtctttacatccctcatcgtctgggagtttgttttcccacctgtaattcccataattaacctgtctttcacttaggatgctcgtcaactttctccctttcattaaacttgctcatgtacctaattcatcttccttatgtacttacaaactactttggagaagaaaccatttcttttcatatatgtatactccatgttaatattcatcgaaa

SEQ ID NO: 17317 - DNA, 1650 bp, Homo sapiens
ctgcgtgacacagtgagrctccatctccaaaaaaaaaaaaaaaaaaaaaaggaaagacttgactgaaataatgttaattaactgaattaagccttgtatcatgagagctcagatctagcttaacttttataaataaagtagaaatggaagagtactttgcagagagaagacatggtaggagaatgcttgactttatacaatggaggagtacagttcagtcacatgaaatatgaataaaaatgagtgaatttcagagcttaaggaagcttggagaccatctggttcaacccgttacagctatgaaattgcaagtgtgtggctaagcagggactagacccgggactttcaaacaccagattcatgcgttccccaccagccccaggctataagacctggaaagaagaataaaaatccactcttacctaactgactttgattaattaggctttctaacaaagtaattatcaacacaatttcagtatagaatctgttaagagactgttcgcagatgcaatatttgtgaagagacatttcatttaattacattagacaaggagatggtctcgacttggaaatgctcaggaaataaacttttcaatgtaatttcccactggagagtatacacataataaagtcattgacttcagctagcactaatcagtattaatgccttcaatcattgccatcaatagctatcttggagaatcacaaaatttatctgccttcctacagtggaggcataaacggatacgggtccccttgtaggaagaggaccaggagctgcaccaatggctgtgtttcctcctcgatgaccttcccatgaatgaatgtgtcccccttggatactgccatccactcaccagccgtccattagttcttcagaagtattgatcaatatgcaacacttaaggtttcaaacaacacttaaatgcaatttttgaaggtatctcaaggtgggccttggtaaatggtaacttttcaaaggttgcctgaagccataacaacagggggagcacagcatgctgcctttccctgtcaaaggacatgagccttattatctcagcaatatcccaaagcacctcacaagtctgggaaaacaatttcaaaacagcaagcaattttcagccccaaactgcacaaattaaagcatttctctctgctctgaacttattcagtctcagtacagatatgttaaatgaactgacataagaagtaaaatgaaaattaaattatattttttttttccctgcagggaacactacccataaataaaatgctgcgaacccaaccgtttccctttagaacatatgagaaaacactgtaatcaactgcccgctaagcaaaatgatcctggttgttctcaccaagtactgcatttcatgagaatcatggtgcatgccttaccaatatgttcattgtcgtattactctatagctgcattaaccttgcatgccatggtaccaagcagataagtgtaaaacatagcctgactccatatgtgaaaatctctcattattttatcattacttcttatactgctattattaccaggcaattgttattgtccacagtttacaaataagcaaagagaagtgtaaaggagaaaaggaatgtccaaagtgttaatggatacttgtaaaccactgacat

SEQ ID NO: 17318 - DNA, 1650 bp, Homo sapiens
ctgcgtgacacagtgaggctccatctccaaaaaaaaaaaaaaaaaaaaaaggaaagacttgactgaaataatgttaattaactgaattaagccttgtatcatgagagctcagatctagcttaacttttataaataaagtagaaatggaagagtactttgcagagagaagacatggtaggagaatgcttgactttatacaatggaggagtacagttcagtcacatgaaatatgaataaaaatgagtgaatttcagagcttaaggaagcttggagaccatctggttcaacccgttacagctatgaaattgcaagtgtgtggctaagcagggactagacccgggactttcaaacaccagattcatgcgttccccaccagccccaggctataagacctggaaagaagaataaaaatccactcttacctaactgactttgattaattaggctttctaacaaagtaattatcaacacaatttcagtatagaatctgttaagagactgttcgcagatgcaatatttgtgaagagacatttcatttaattacattagacaaggagatggtctcgacttggaaatgctcaggaaataaacttttcaatgtaatttcccactggagagtatacacataataaagtcattgacttcagctagcactaatcagtattaatgccttcaatcattgccatcaatagctatcttggagaatcacaaaatttatctgccttcctacagtggaggcataaacggatacgggtccccttgtaggaagaggaccaggagctgcaccaatggctgtgtttcctcctcgatgaccttcccatgaatgaatgtgtcccccttggatactgccatccactcaccagccgtccattagttcttcagaagtattgatcaatatgcaacacttaaggtttcaaacaacacttaaatgcaatttttgaaggtatctcaaggtgggccttggtaaatggtaacttttcaaaggttgcctgaagccataacaacagggggagcacagcatgctgcctttccctgtcaaaggacatgagccttattatctcagcaatatcccaaagcacctcacaagtctgggaaaacaatttcaaaacagcaagcaattttcagccccaaactgcacaaattaaagcatttctctctgctctgaacttattcagtctcagtacagatatgttaaatgaactgacataagaagtaaaatgaaaattaaattatattttttttttccctgcagggaacactacccataaataaaatgctgcgaacccaacygtttccctttagaacatatgagaaaacactgtaatcaactgcccgctaagcaaaatgatcctggttgttctcaccaagtactgcatttcatgagaatcatggtgcatgccttaccaatatgttcattgtcgtattactctatagctgcattaaccttgcatgccatggtaccaagcagataagtgtaaaacatagcctgactccatatgtgaaaatctctcattattttatcattacttcttatactgctattattaccaggcaattgttattgtccacagtttacaaataagcaaagagaagtgtaaaggagaaaaggaatgtccaaagtgttaatggatacttgtaaaccactgacat

SEQ ID NO: 17319 - DNA, 729 bp, Homo sapiens
ggctttgatccagaaaaagaaaggggatagctcttgacctgtcttgcacacaaccttgcgtttcatttttccttctcctttttgcctttgaagctctcctgaactccagcttcccagtgctcctcctcctcctcctcaatgcttgtacaaccagtggtactctccccactacttaggaattactgaacagatcagagggaattacgacaagaaaatcgactggcccaggtcttctaggtctttgaatgtcaaattcaaaagtttgaactctattttgtatgtggttaggaggtcattgacaataatattatcttaaattaaggtagataaaaatcagtggttttcctcaaaatgcaaacawggaacactattataagggataacatgtctatataatattgatcatatagtcatgtcactgtctaaggaaatgtaagtgtgttgtaatagctcccaaacattttcttgtcaatgttctttttctagcagttcttaccactggcattaataaggacttggccttgtatagggcgtctagcaatttttcataacaacaaatttggtgataaggataaattatttaggaaatagatctttcctgatgaacattttaaattgttactgaatgagcagcagcaatcacttgcatacctgcactgaacagctagtccagtgctaagagcaataactctctacaagtttggggaacaggtgatttctgtttgactt

SEQ ID NO: 17320 - DNA, 729 bp, Homo sapiens
ggctttgatccagaaaaagaaaggggatagctcttgacctgtcttgcacacaaccttgcgtttcatttttccttctcctttttgcctttgaagctctcctgaactccagcttcccagtgctcctcctcctcctcctcaatgcttgtacaaccagtggtactctccccactacttaggaattactgaacagatcagagggaattacgacaagaaaatcgactggcccaggtcttctaggtctttgaatgtcaaattcaaaagtttgaactctattttgtatgtggttaggaggtcattgacaataatattatcttaaattaaggtagataaaaatcagtggttttcctcaaaatgcaaacatggaacactattataagggataacatgtctatataatattgatcatatagtcatgtcactgtctaaggaaatgtaagtgtgttgtaatagctcccaaacattttcttgtcaatgttctttttctagcagttcttascactggcattaataaggacttggccttgtatagggcgtctagcaatttttcataacaacaaatttggtgataaggataaattatttaggaaatagatctttcctgatgaacattttaaattgttactgaatgagcagcagcaatcacttgcatacctgcactgaacagctagtccagtgctaagagcaataactctctacaagtttggggaacaggtgatttctgtttgactt

SEQ ID NO: 17321 - DNA, 548 bp, Homo sapiens
ggtaaaaaccagagaaacatgagctaaaaagagtttatatgtaactgtaggttgatcatccccaactttccacaaaggcctttcatttccatttggaataacctagacaggccagcccctgtcaccaagcacaacactggactcctgacatttgcctaattatcttttctcatcatcagtcatttcttgaagtctcagcttcattcagttgccaggtatttccgaaattaatcatgtcattgaaagcggcatcwtttcatgtaaatggactttattatctggatcagaaagccccccctttgagcaccaaaagcccatttgtagggaaagtgtctgaaatctgacatgctgccttcccaagaaagattcttagtgttgacctcccagcaagcaccaagcattcgtcactgtgagcttgtgagtgtgcgtgtgtgtgcaactaagagccttgggctggctgcatgctaatttgccccattgtttcagggtgacggccttttcagtacttaggaacaaagcctttttgcatacagctttatgtacaatta

SEQ ID NO: 17322 - DNA, 565 bp, Homo sapiens
gactgtctgctgctggaaaagagaaacacagtgactgtgagtgctcgggaggtgtccaaatgtacaaaytggttttttgtatggttttgagtggagttcccagctttcctattataagagttaggtaggcatttggcaggagtagaggggttagggggaaaatgtgctatggaaatgcccaagggctgaggtcagtgagaccattctccagtgacagcctcttgggaggctgaggctccaaccctttacctcttcagggttgattcactaataacccagcactataaggggaaagggactctgtcctccaaaaagctgaagtcaagtccaaaaggccccattggcacacaggccctaagaagttaatgtttttagggagaccaagtttttagtgataatgtggtgaaacaattgatgcagcacaatacagcagatgagaaacaatggagcacatagtgtcaaaataccagcctcagaaagacgcatctatggcctagcaaccaaaattttcttgaggttattctgcccctaactctggtttctgcttggggatgtttgtggaaca

SEQ ID NO: 17323 - DNA, 641 bp, Homo sapiens
cctcagccaaagccacagctatggtgggggagatggtggtgttaaaaaagaacaatgagtgtggccacctttatttgtttgaggtcccatggtctccttccctgggtatattagcactgggaagcatttgggggattatccagccctgccccctcactggacaggagagtgaagggatcttcctcaatataacagaccagcggggcaagaggaccagggccagcccagaaaagggtgccatagacagaaggaatcacaggagcggccctcagagaccagccagccactcagcaaacacggtctggcccctgttgcccagcaccagccctggagaagacaggcrtctttttttttttttttttttttttgagacagagtctcgctctgttgcccaggctggagtgccgtggcactatctcggctcactgcaacctctgcctcctgagttcaagccattctcctgcctcagcttcccaagtaggtgggattacaagcgtgtgccaccacacccagctactttttgtgtttttggtagagatggggtttcaccatgttggccaggctggtctcgaactcctgacctcaggtgatccacccacctcagcctcccaaagtgctgggattacaggagtgagccactg

SEQ ID NO: 17324 - DNA, 641 bp, Homo sapiens
cctcagccaaagccacagctatggtgggggagatggtggtgttaaaaaagaacaatgagtgtggccacctttatttgtttgaggtcccatggtctccttccctgggtatattagcactgggaagcatttgggggattatccagccctgccccctcactggacaggagagtgaagggatcttcctcaatataacagaccagcggggcaagaggaccagggccagcccagaaaagggtgccatagacagaaggaatcacaggagcggccctcagagaccagccagccactcagcaaacacggtctggcccctgttgcccagcaccagccctggagaagacaggcatctttttttttttttttttttttttgagacagagtctcgctctgttgcccaggctggagtgccgtggcactatctcggctcactgcaacctctgcctcctgagttcaagccattctcctgcctcagcttcccaagtagstgggattacaagcgtgtgccaccacacccagctactttttgtgtttttggtagagatggggtttcaccatgttggccaggctggtctcgaactcctgacctcaggtgatccacccacctcagcctcccaaagtgctgggattacaggagtgagccactg

SEQ ID NO: 17325 - DNA, 1054 bp, Homo sapiens
cacttgctgctgttagggctatagcttaaaaggatctgcaaacttagggaagattggggtctaagacagagccttgtgatcctgaaccaaatcaagctgctctttgggtgatttgggggtatctgtcatcatcaaggggcaatgacctcaaactgctttgatcaaaccaggttctggacagtggctataggaggccagatgcaggaaaacacagagatgggtaaagtcagagaaggggcgtgaagacaaagcaatcacaaaaattctctcacttaaataagcctcaaaagctaaatttcaaaccatatgaagaaactaaaggctaaggaagatagccaacaaaaccaacaatcagaaaattaactaattcaaataaaattaactttttattatagctggtactgtttatataagtattttgggaaggcttacacgttaattagggggaaaataatagccatcaaaatttaagatattttacaagaagaataggcagaaacaaaaccatttgaatatgaaaaagaatcagttccaaaattagaaataaatctkaaaagtaaaaatattatcatcagaataagacactcactagttgagataaactctagataaaacaggtgatggaatgcttagtgtattgaaagtcaacacagagctggtcacctagaatgtagcaaagagaaataaaaagttagtattaaaataaagcaaaaatggcaaacaggcatatggaaagatgctcaacatcattaattatcagagaaatgcaaatcaaaatacaatgagatattgtctcaccccagttacaatggcttatatccaaaagacaggcaataacaaatgctggcaaggatgtggagaaaagggagccctcatacaatgttggtgagaatgtaaattagtacaaccactatggtgaacagtttggaggttcctcaaaaaactaaaaataggtatgatccagcaatctcaatgttgggtagataccccaaagaaaggaaatcactatatggaagagatagctgcactgccatgtttgttgcagcactgttca

SEQ ID NO: 17326 - DNA, 657 bp, Homo sapiens
tctctctacattaaacctcaaccccatttataccaggttaatctccactctatttctatttcgaaggtcaactgcccactccttactttgaaccaacacaaccgtgaagttaatgagactgcttcactaatcaccacaaaaaagagaagccaaattagaacactgtgaatgaatgtgcagagcagtgaattaatggtttggcactacacatttcaagtctgggaggttaaaaatgcttctcatggatgtgcccaaagcttccaggctgtgtcagtgctttctgttttatacatttgggctttggcatccaatggcagtggacttcttgaggaggtaaggaaagtgggaaatactccgttttagctctctccagattaaatatccaggacggcctaatgactgataccacaacacagacagcacttctgtataccagccttaaagataaaaaggagcctcaagaactggtcctgatttccataaggtcaagaagggtgaccccaaaattataaatataatttttgaaaaggtaatttttgcacaacagacaaatccatggggtacaacatttccaactatggtgtattctatgcagcactatgcgtaaatctccctaaggatcctcattctgttgtycatgatacacacatacagtca

SEQ ID NO: 17327 - DNA, 565 bp, Homo sapiens
tgaacccacacccctcctcaggacagctcaggtctagcctgtgtacagcggcaccaagcacattcctcaagggctgctgctgaccttgatgatgttgtggttattttatctcttctctcattctctatcytccttaatctattttctgctgttagagcctttgggaatctgctaacccttcccttgcatcacctctcattcctgtccttgcagtgtacaaagcccactttgttgctcatcctcacaccacactattcttccacccaatgttcattatcagcttgatgttttttcttatttcaattttagcagaatgcatgttgttccagtggggctcttttcaaactgatgtcttgctcttcttagtgcctcaaactagatcctgtttagacatcttataacaggttactatgagtttattttggtgcaaaaaattttgaaatccatgaatagttttttcataatatgtttttccaatgaacttttgaagaccccctgtacatcatggtgtctgctacagacgtcaacaggatccacatcacacaattttgaagagagggataga

SEQ ID NO: 17328 - DNA, 634 bp, Homo sapiens
agggggaactactgtatactaaaaaccactgaactgtacaatttaaatggatgaatactatggtaggtgaattatatcttaatgaagctattaaaattgttgaatgaatgaaatgaaagatcaacttgaagttaaggtgtcccctcatttagtaaggtagagatatttctgagaaggggaaccctgttacacacwattctttcataataatctcttcaaatttgcattttagcataaaatattgtcaattattcttcatttcttttaatatcttctgaatccacaggatgatgattgctgtagttaataagatctagtcacacaatctagctccagttctcctaggctgcagtatgtttataagattttctgccaacccaaattgccatctgattcctctgcccattccttaaaggtcctatggacccctaaaaaatcagctttaaacaacagctagaagtggctacatgatttcaatgaagttctacctttcccttctcctccatcattctgcttgttaacatgagtgatggctgtagacctagcagtcattttggataatgagtatcagttccacatcttaggagtgtcaggatcaagcggaaagaaaattatgaaactttttcagattaat

SEQ ID NO: 17329 - DNA, 634 bp, Homo sapiens
agggggaactactgtatactaaaaaccactgaactgtacaatttaaatggatgaatactatggtaggtgaattatatcttaatgaagctattaaaattgttgaatgaatgaaatgaaagatcaacttgaagttaaggtgtcccctcatttagtaaggtagagatatttctgagaaggggaaccctgttacacacaattctttcataataatctcttcaaatttgcattttagcataaaatattgtcaattattcttcatttcttttaatatcttctgaatccacaggatgatgattgctgtagttaataagatctagtcacacaatctagctccagttctcctaggctgcagtatgtttataagattttctgccaacccaaattgccatctgattcctctgcccattccttaaaggtcctatggacccctaaaaaatcagctttaaacaacagctagaagtggctacatgatttcaatgaagttctacctttccctyctcctccatcattctgcttgttaacatgagtgatggctgtagacctagcagtcattttggataatgagtatcagttccacatcttaggagtgtcaggatcaagcggaaagaaaattatgaaactttttcagattaat

SEQ ID NO: 17330 - DNA, 616 bp, Homo sapiens
cattatgctctataatgtgcctggagtcatagaagaaacagaagtmaaaggtactattccttgtcatgaagctggaaagtcatgactgacccaagagaaactaaggagaaaattacatgacagtagcgtgtgtgtctgtgtgtgtgtgtatatatattgttttcttttgagatggagtctcactctgtcaccaggctggagtgcagtggcaccatctcagctcactgcaacctctgcctcccgggttcaagaaattctcctgcctcagccttctgagtagctgggactacaggcgtgtgccaccacgcctggctaatttttgtactttcagtagagacagggtttcacaatgttggccaggatggtctcgatctcttgacctcatgatccacctgcctgggactcccaaagtgctgggattacaggcgtgagccaccgcacccggccaacagtagtatatatttaccatagcatcacatgttaacaggaagcttcataagaatacaaaaatggaaaatattactgtgatgtgggatagtagaaaaaggtttaatgaaaggatatgttttgtctgagcttaacaagtcttaatagaaaactttatatgtaataatgc

SEQ ID NO: 17331 - DNA, 616 bp, Homo sapiens
cattatgctctataatgtgcctggagtcatagaagaaacagaagtcaaaggtactattccttgtcatgaagctggaaagtcatgactgacccaagagaaactaaggagaaaattacrtgacagtagcgtgtgtgtctgtgtgtgtgtgtatatatattgttttcttttgagatggagtctcactctgtcaccaggctggagtgcagtggcaccatctcagctcactgcaacctctgcctcccgggttcaagaaattctcctgcctcagccttctgagtagctgggactacaggcgtgtgccaccacgcctggctaatttttgtactttcagtagagacagggtttcacaatgttggccaggatggtctcgatctcttgacctcatgatccacctgcctgggactcccaaagtgctgggattacaggcgtgagccaccgcacccggccaacagtagtatatatttaccatagcatcacatgttaacaggaagcttcataagaatacaaaaatggaaaatattactgtgatgtgggatagtagaaaaaggtttaatgaaaggatatgttttgtctgagcttaacaagtcttaatagaaaactttatatgtaataatgc

SEQ ID NO: 17332 - DNA, 607 bp, Homo sapiens
attacaaaaaatgattttgtgtgctgttttggataaaacactttattgtatcccttgggagaattttgtcattagatttcatacggacacctaactagaagagaggatagactgatgttctagccgatgatctcacacacagcaagatgactgaggagcagatgccaatacaggagatcaataaaggttttaaaagttttttaacaactcataatttcctttttaaaaggaagttaacaaccaataaattacttttaggtgagaatgaacaaatgagttgtcaaggtttctattraaaaagttagaggatactagtagacgaatgcaataaaaatttaaattatatccacaaacaaacttccaagtccataagcaaaatggagacaaaaattgccgaaagctgagaaacagagaggagagatttgttacgtgtcttgctccattgttatcaaactgtccctaacacataaacaagttatgctttgaggtggcatattcatggaaatgaacatgagtttacttagttttgacttagcctgaaacagacaagggaactcggtgaatcaaacatataatgggctggggtattttttgtttgtttgtttgt

SEQ ID NO: 17333 - DNA, 485 bp, Homo sapiens
ttttttaaaaaagcaaaagaataagtgaagctctcttttcatctgtgagttccattgggctttatatagaagtaaggactacrttcagagccttgtaaggtttttgatagtcacgtgattgactgtcagagcctggtccatctcagagaccatcccctcaaacgctatccttttacacatcaggtatctgatcctgcacattcaaatatttatatgtaggttagatgggaaagacattggtataattaatttaattttcactaggtctcagcctattttaagagcagtcaggagctagagttttcggtcttcatttcctatataaattggcaaaagtgttgcattctgaataactatactgtagaagtacatcgtcctttgaataaattcgaatccatacacagcaacacaactgaggtcaggtcagagggtgggcagaagacccatcacttcacacactgggtccgagagcacagctgccctga

SEQ ID NO: 17334 - DNA, 1507 bp, Homo sapiens
gcctttctcatccatcttggatataaatgttctatctctttttttcagttataaatgtctagttcagtctaatatcaacttcacgttttcatctgattatgaaattattttcttcccttagctcaggcctgaggcaggctttgagcttacatcaaggaaggagcatggtcatctacttcttcatattgcttttctcctctcccttgcccactaaccgtgctatctctggctcctccaggrttggaggccaggaaaggatggggctgtcctcatctggaaagatttctctgatgcacctcgtttcttttttgccagcagtgctactgtggctgggcaccaatgatcaacccctgccctcaaactctgagttctaccagttcagggttagcccctttctgctgatctcaccttccaccttgtgatggttaatactgagtgtcaacttgatcggattgaaggatgcaaattattgatcctgggtgtgtctgtgagggtgttgccaaaggagattaatgtttgagtcagtgggctgggaaaggcagacccacacttaatctgggtgggcaccatctaatcagctgccagcatggctagaatataaagcaggcagaaaaaaaatgtgaaaagactagactggcctagtctcccagcctgtatgtttctcctatgctggatgcttcctgtcctcaaacattggactccaaattcttcagttttgggacttggactggctctccttgctcctcaccttgcagatggcctattgtgggaccttttgattgtgtgagttgatacttaataaactcccatatttatactttatcctattagttttgttcctctagagaaccctgactaatatacacctcaaatggttattttggatgaaatccctttaaaggaagcttagggttggtggaggcatcaggcaaactgtaggaggaggcatgctccctctttcatcaaacttcaagagtgcaactctttccaaaacagcctcactcttcactctgccattaggctggccagactcttgtatttggatttctttttaggcatgcttcagtttaccatctttgttttctcacaagttccaagctttccaagtatttctcctgaagctccccatgaacttgggactgccacagaatccaccgaaggtttcccaatcactcctcaattggctgattgagcctattgggttaagatttgcaagacttgttttggattatattctttgcatacctaggaccttgctttctagtgtggttgtagctggcatcttttttcttaaatctggggctttagttcaaactgagacaataggaaaactgccattttaatattctcttccaaagtgatatgatcagatgtctattatttgcataatattgatgaatacagtctccaatcacattacttccccaaccctcatacaaaacaaacaaaatgcttatccctcttatattaaaaaatcagaatattttataaatctggccagttttgc

SEQ ID NO: 17335 - DNA, 1507 bp, Homo sapiens
gcctttctcatccatcttggatataaatgttctatctctttttttcagttataaatgtctagttcagtctaatatcaacttcacgttttcatctgattatgaaattattttcttcccttagctcaggcctgaggcaggctttgagcttacatcaaggaaggagcatggtcatctacttcttcatattgcttttctcctctcccttgcccactaaccgtgctatctctggctcctccagggttggaggccaggaaaggatggggctgtcctcatcyggaaagatttctctgatgcacctcgtttcttttttgccagcagtgctactgtggctgggcaccaatgatcaacccctgccctcaaactctgagttctaccagttcagggttagcccctttctgctgatctcaccttccaccttgtgatggttaatactgagtgtcaacttgatcggattgaaggatgcaaattattgatcctgggtgtgtctgtgagggtgttgccaaaggagattaatgtttgagtcagtgggctgggaaaggcagacccacacttaatctgggtgggcaccatctaatcagctgccagcatggctagaatataaagcaggcagaaaaaaaatgtgaaaagactagactggcctagtctcccagcctgtatgtttctcctatgctggatgcttcctgtcctcaaacattggactccaaattcttcagttttgggacttggactggctctccttgctcctcaccttgcagatggcctattgtgggaccttttgattgtgtgagttgatacttaataaactcccatatttatactttatcctattagttttgttcctctagagaaccctgactaatatacacctcaaatggttattttggatgaaatccctttaaaggaagcttagggttggtggaggcatcaggcaaactgtaggaggaggcatgctccctctttcatcaaacttcaagagtgcaactctttccaaaacagcctcactcttcactctgccattaggctggccagactcttgtatttggatttctttttaggcatgcttcagtttaccatctttgttttctcacaagttccaagctttccaagtatttctcctgaagctccccatgaacttgggactgccacagaatccaccgaaggtttcccaatcactcctcaattggctgattgagcctattgggttaagatttgcaagacttgttttggattatattctttgcatacctaggaccttgctttctagtgtggttgtagctggcatcttttttcttaaatctggggctttagttcaaactgagacaataggaaaactgccattttaatattctcttccaaagtgatatgatcagatgtctattatttgcataatattgatgaatacagtctccaatcacattacttccccaaccctcatacaaaacaaacaaaatgcttatccctcttatattaaaaaatcagaatattttataaatctggccagttttgc

SEQ ID NO: 17336 - DNA, 577 bp, Homo sapiens
tttcatgtagtggtccttctttcccacaattaaagcaatgtggtattgataaaaattactatattatggaatgtaatcatggatcttaggcaatttacttctggaaccattgaattaattttaatatatggtgacagttaagaatttgggtttattggccgggcgtggtggctcacgcctgtaatcccagcactttgtraggccaaggtgggtggatcacctgagatcaggagttcgagaccagcctggccaacatggtgaaaccccatctctactaaaaatataaaaactagcctggtgtggtggtgggcacctgtaatcccagtgactcgggaggctgaggtgggacaattgcttgaacccaggagacagaggttgcagtgacccgacacggtgccactgcactccagcctcagtgacagagtgagactctgtctcaaaaaaaaaaaaaaaaaaaaaaaaggatttgggtttattttttgcacgtggatatcgattattttagtaccattaattgaaaagactagctttctctcattgaattacctgggtatcattgtttaaaattaatttgcta

SEQ ID NO: 17337 - DNA, 600 bp, Homo sapiens
tttttaaggctcaaccattttaacacacttattcatgtgtccatatttgtagtacgacctcagaaatcattcagaaataaagctaaatagctttatttataaaatatgaaacacaatcacacaaaacataatggtaatacataagtgttactatttttayagctgccatgtcttataatgaatatttttgcaatagtccattaaatgaatgaaatgccaatgacttatcacagtcctaaaaaaccgtaacactgagatgaaagaatgctgaaaaagtcatctggtattaattaacctacttcttatccccactatgatacccaaaacaaaaattacagaattaacacactggtacggtttgatgaatctaaaaacatggtttaaaacttactttggcagcaacaaaaatgttagtagaaagataatgagtaaattgtatctgtataaatattatgaacttgctgaaaatagacgatttcattttttgcttgtctaagacataataataataataataataataataataataataatatagaggttctgcaatttagtatctaagttacaaattattctgggtcaaactttagttattta

SEQ ID NO: 17338 - DNA, 524 bp, Homo sapiens
caacatttactctcttggccacaagtgtctgtttagagaagtgtctggcttggtctgaacaacacatccccaagcaactaagtggaaacccaggtcgataacatgagctaagatgaggattctaacatttgcgatgatggcccacactgaattttgataatctcaaaaaaacaaaaaaaaaacaaaaaaaaacacaagcaattccaattctggattcacatgtacacaaagatacatatgcaaggaagctcatcttaacattgtttgtaataaagaaaagctgaagctctccactataaaagagactcagtgatgaacccttacactatggagcactatacagaattaaaaatagtatggcaaatcctttttactgacatgaaaagatccagaggaaaagaactgaaaaaaatagataatataccacacacacacacacacacacacacayatatatgtaaatgtatacataaatgtatagatacatgcttggaaagatgcacaacaaaaagacaatggtgatt

SEQ ID NO: 17339 - DNA, 572 bp, Homo sapiens
agacttatgacctccctatatataaaaataaccatggttcaccctagagactaatatagtacttgttggttaactgggtactaatctagtggtaaaagtaaggttgattaccattcaagcagtggaaagcctagaccagggtttttttaaccatttgtctgccaaggacttctttgagaagctaaagagaagagccataaaatatttttaaagatgagttatgctcttgggaaaaatgwtgtctcctgggataccaggctaacaggttctggagtgttctttctctcctgtggttttatgattttcatgtgcaattcattatttgtgtgtgttgtgttctttcaaaatcactattggaaagttgaaaaacttcttagaattccgaccattcagataaggtccccaaaagcattttagagcagagatactgaagcccaagaatccaaacttcctggtaactttggcaaagcttttttatatataaataatcagaacatcttgaattaaataaattcagggtgaattatataaatttcaacatatctgtttttttcagtaaaatgaagaatgca

SEQ ID NO: 17340 - DNA, 546 bp, Homo sapiens
ttttttcttggcattcttccaaattaaatttagcatccaatgttttctgtgtttgcaattaaatagatacataagaaaaataatgtccacatttacaaatgagcaactttagttatcatttgctcaagctcacagaccaaaagaaagcatgaactttaaaatttcattgctttgtgacttcattgctatacscatgttacttataatctctctgaacctgtttcttcttgtttaaaaagtggataatatacaaaatatctgttcagtttcaaaaactagaagttattatgtaatatatgaggaccttctccccttcctcattttgtttggatacagaatcaaaagtagcacaatggacctaaagtgccaaatgagtccatacagagaggagagacgctcagaaaattctggggtcatgcctcctggcatccgctataatctatgaaacttcacagtacctactgacccagctatgactgctccaagaacctttcctgcttccctctaattctaagaagaaccctaggaggatcctagggtatgaga

SEQ ID NO: 17341 - DNA, 614 bp, Homo sapiens
tgcatgtgtttatatgtagatgtgcatgttttcctttaacaacattaactctgtttctagaaatcaggtgggaggctatataattgatttatatttggaatttttctagttgtatgtggtagaaggatgggattcatggtattcataattgaggaagctggtgagaggttagtttagatgataaaccatacaccatggcacccacgcatcgtacgmaaaggatagaagccctaagggggctgacaggtcaagaggaaagtattcatcaaaaagataatattctctctgtttaagaagttccatggatcagaagagtaagagagaaggatagttagaggcttttgtcagactatggaatgctggtatttacattgttttaaatagagccatttaaggtgataaatagaatataacattattattttgttgccaaagtagactgagaatagcatggacattaagaaggtccaggattttctggtttaagagtattggataattcatttacatgaatcctgaagccttctaaaattatagtgggagttctgatggaaagaaagagtatgaggtctcccaaattttggcaagtttaagtaatttattgaaaattcaaa

SEQ ID NO: 17342 - DNA, 1169 bp, Homo sapiens
aggcttgataatttaaaggtactggcattctgcagattaaaacttttctttttctttctcacagcttattgaggttttgagttactgttcttccataaaccacaccaaacattttccacagtttgcacattgaaattcttttcagtgcagcaagaacttagaggtacttgcaaaacaatttgagtttagaatctttctagacttttatacctttttccctcaaacacttaatttaagagcagatttttaggctatttccttttcattaaaatctaagaccccatgaaatggaggatgcattcttatttttctagatgtcatcatgtgagaaaatacaaatcttggaccgaaggaatatggtagctttgatagaaacaactcttttcctttgcatagtcattcttcactttacaaagtattaaattatgtaacttttattttttttcctcccgagacagagtcttgctctgttgcccaggctggagtgcagtggcgtgatctcggatcactgcaacctccgcctcccgggtttaagctattctcctgcctcagcctccggagtagctgggattacaggtgcgcaccaccatgcccaactaattttttgtatttttagtagagatggggtttcaccatgttggccaggctggtctcgaactcctgacctcgtgatctgcctgcctccgcctcccaaagtgctgggattacaggtgtgagccaccatgcccagccctaaattacgtaactattaaatgtagtacaacagttacagaaatgctcagatcaaacacagctggtgaacatacatctcmattggtgggaggaggtgagatctagggtgttgggtgtgtcctgagcttcaaatggaaaaccttggataacctgtcagccttgtaaatggatgtcagagaattttacttttgttgtaaaagtaaaatttttacttttactgtaattttactgtaatttgttttcttccaaatctatacataaatcccttattgaatttagtctctcctttttaaatatttaagacatttgctgtttcccactaagtattatgtatgcaggcaaattggttacattatgtactttttcaggaagggcctaagcagctggactctgatgcttataaaaaggatcacatagggataattaatttatcagta

SEQ ID NO: 17343 - DNA, 504 bp, Homo sapiens
cgtgcgtgcacgtgtccgtgcctrtctgtgtggtgtgtccacccactcaaatctgagatcaggcatttaaggccctgcgctctgtggctgtcccattgtctatttggcctcccctcctcccctcttcctctatctcttctccccagccctaggctggcccaaggacatgttaattagtcaggtgtccgctttcaagctgtggtctgttctcctgacctcgcacagtggcctgtgtggtttccctcattcagcccctctgtctgctgccctttctagggacagactccacctccccccgagccccagctcttaaccactccagccactcactctggcacctctgttttttcccttggtgaagatgggaaccgctaccatctacgctgctacatgtaccaggcccgggacctggctgcgatggacaaggactctttttctggtaggtgggagagaggcaggagagtcagagactgtgggctgagatctgggaatggagacatctgg

SEQ ID NO: 17344 - DNA, 562 bp, Homo sapiens
aggtgactgctactagtgtgaaatcttcctttcaagaataaaatatcaggcctgwtgtggtggctcatgcctgtaatcccagcactttgggaggccaaggcaggaggattgcttgaggccaggagttcaagaccagactgggcaacatgtcaagatctatctctaaaaaagatttaaaaattaacggcatggtggtgtgtgcctgtcgtctcatctgctagggaggccaaggtgggagaatggcttgagttcaggagttcgaggctgcagtgagctgcgattgcaccactgcactccagcctgagtaacagagccagaccttatcacttaaaaaaaagaaatcagggcagcctatccaacaaatgctggcttttcataattctaataactgtaaagtaaaatattagattaaccagtgctcaggactcactatcttgccattcctggtgtggactccccgtgaaaatggacagtgtgccaaattggggaaggagcgtgaccctttgtttttattttctctggatggagctgcctaaatgcagttgacagaaatggaaatttg

SEQ ID NO: 17345 - DNA, 564 bp, Homo sapiens
gggacttcttactacctgaaaaaaagtaaacacctaatttataagagccactgcttttagggattctgttatttgtaggcaagcagaatttcttgttgatttaacatctagaatgaatggaatctagaacagatgctcctaacctagagttcactcattttccatgttgcttcagaggtcctaagatcccctgtggttggtagactaatagtccccctcctaatccctggaacctgtgaatatgtcaccttatatggcaaaaaaggactgmaaatgtgattaaggttaagggtcttgagatggaaagattttccaggattatctggctgggcacagtctaattatgtgaatccttaaaagcagagaacctttccttggctgtagcacgagaaagagatgtgaagtggaagtggggtcagagagatgccacattgttggctttggagataaaagaagggacccatgagccaagtaatacaggcagcttctagaagatggaagagacaataaaatggattatctcctagagcctccagaaaggcaacaccttgagtttaatccagt

SEQ ID NO: 17346 - DNA, 1904 bp, Homo sapiens
tattcactgctggatttactttgcatatattttatttagatcttttgtgtgtatgtttataagtgacattgttgtaaaatgagctggtcttactgtaatcaacaaacaaaaattagtaatatttttgcatacccttaagaaccaattaggaaatgtaatatagcaaaaacagcaacataaagatagtactcatgctagtggtaaaaacaaattaagctagggtgtaaaagctaaccaggatgtagaaaacatccttcaggaatgcgtagaggaaaaatagaaaaaattatcactgtgtgtgttttgatttcattatatgctgccaaaatgctcttcaaatactaccacccatagtatgaattgtattttccttacatccttaccaatatgtttatttyagtctagcctagtggatgaaaagtaaatttttgttattttagttttgcatttcctgatatgaaaaaggtggaatacgttttttaaaaaatgtctattgactattccaaattcttaatctgtgaattgacagtttatatcctttacctttttcagtgtaaacctctgaaatgcataagtctggtccagcagtaccagtatttgggctttattctcaggaaaaatagaactgtttgacaaaggaatgggcaaggaaattcatggcatgctgtctgtaaagactggaaaaggacctaaacctccctcaacaacaatttgatagatggagtacatccaaaaatatattttatatatgtggtggcagttctgaaagttgaaagttaaaaacacgctgagtgatttttgacagatggtgagattacaagagaaactatgcatttgactttattttaatgtgtagatgttttaacagatatgtaacataactgagaagaaaaggcagacattatcataaagggaaatattactgtaactatcaaaatcatttggattatctggaaaactattgggataatcagtgaaaattgaacatagtttggataatttcaaattattacttggtgtaattattacttgtgaagggctattgtggttatgtttaaaagtaagtccttatttctgaagtatttagtgatggaaaaaggagacattaaaggaaagaagttaatgaaaagaaaaaattagctcattttaaaatcttaggaacatttcaacagtgtaactaaggatgtttttccttttgggttgatagcggtaatttagagccaaatttgtgtttttttttttttttgttttgtttttgttttttttttcgagatggaatctcactgtcactggagtgcaatggcacgatctcggctcactgcaacctccgcctctcaggttcaagtgattctcctgcctcagcctcctgagtagctaggattacaggtgcccaccaacacacctggctaaattttgtatttttagtagagacagggtttcaccatgttggtcaggctggtcttgaactcctgacctcaggtaatccgcctcagcctcccaaagtgctgggattataggcatgagtcaccgcacccggcctagatccttatatattttttcacttaatcttagtccattttaatatttctattcatctcccccatggtttcttttttgttgttattttttatgatttatgtgtcttttggggtagccttaaatcctctcagaaacaatgcagggtaaagattgatgattaatagcaaactaaaaatagttaatatttattgagctctgtggctaattgcacacagtaaaagcatatttacaactaactaccttgctgttaaaggagtactatcattcagataaacaggtttggagagaggcaccataggctcagattgtgctctacacaatataagtaatgcattaacatttctatgtttatataattattaaaa

SEQ ID NO: 17347 - DNA, 438 bp, Homo sapiens
tgtctgttacttctctgtactacactttacttccctgattcctacacaagactcttagctccatgaagacagggaccttatctatgtgctcagttatatcaccagaacttagcacaggccctggaatgtgtaagcacttaaatcaattagagatacactctggaaaaagaactatgctttcttttgtggtgaaaaataggattgtcatattgggtaatggtgaaaccatggaaaagaagaatcttatcagctaatttattaagttgtgttaatatagttttgttcatgaatattgttctttactgaatgcctggaaggaaggcattagaatgtttcctttgggttgagagtatatttatgtctaggacacacattaaaagggctgrctctgatgttagactattttgtagcatataagtatacctggacatctgatgt

SEQ ID NO: 17348 - DNA, 587 bp, Homo sapiens
cagaccctgcaagcgcacacatgcagatttcagggctgaagccccagtgccagatccataagcacagataagagtccaaacagccctcacagctaccaaggacctcccacaattcttgccaccaatgactatgtagctaacaataacacagagagctgcctgaaatgacgagacactgtgcccctgcctcagacctgaagccactgtattcccccrtacttagcactccatgccactagacctggttccatagcatgctacacaatatgccctccagtcagcccatcagtgctctcctcctgcacataagatattcatttactgaagcttgtgatgagagtagcaggcccagtggtctccaaaatgacttcagggttattctttccttgtcttggtgaacagcacctggcttctgcccatccataccaatctccttataacatgtgaacattcatttagccatacccttggtgctctctcccaaacacactttttcattgtttaaaacatggccagggtgacaattttccaaatctttaaaagttctgctcctcttttgattataaattccatctttaatttgtttc

SEQ ID NO: 17349 - DNA, 545 bp, Homo sapiens
ctctctcccaccctccatctcctgtctctcccttgtggccttccctccctactcctcttccctcctagagcatctatttgccaagacctccttctgactttctmctgagcttcttgtagttaaagagtgcccgccgctgtcttatgggtcctgcctgcatccttagttcctgtacagtgggggccttgagggcagggatggtaccagtattagtctcccaggctgctgtcagaaccacagcctgacagattcaaccgcagacattgattttctcacagttctagagaccagggtagaaattgaggtgtgagcagggttggttcctgctgagggctaagaggtgggatcacagggaagaacaagtctctgctgtggtctgaactgctctccaccccaagtaaatccatatgtttgaatcccaaggcccaatatctcagaatttgactgtgttttaaaagaaggtctttacagaggcaattcagttaaaattgaggtccaagatgggccctaattcaatatgcccaatgtccttttaagaaaagaca

SEQ ID NO: 17350 - DNA, 587 bp, Homo sapiens
gttaaacaatgtattgtttataaagaagccatggctcctgttgcagaccaacttgcaaacagctgcgtgcatgttgcatgtcggtgggtgtgctcrtgccctttgcaaagtggtaggagattgtatgtctcatgtagaatattttcctaacctttttttttttttttttttttttttttttgagacggagtctcgctctgtcccccaggctggagtgcagtggcgcaaactcggctcactgcaagctccacctccccggttcacgccattctcctgcctcagcctcccgagtagctgggactacaggcgcccgccagcactcccggctcattttttgtatttttagtagagacggggtttcaccgtgatagccaggatggtctcgatctcctgacctcgtgatccgcccgcctcggcctcccaaagtgctgggattacaggcgttagccaccgtgcccggcctttcctaaccatttttttttaacaacctaaataatttcaggaagaaggtggtgtagggatcaagatatttacttggtgctatgtttataaaacatctatttaggtcatgattgttagatgtaaaa

SEQ ID NO: 17351 - DNA, 587 bp, Homo sapiens
gttaaacaatgtattgtttataaagaagccatggctcctgttgcagaccaacttgcaaacagctgcgtgcatgttgcatgtcggtgggtgtgctcgtgccctttgcaaagtggtaggagattgtatgtctcatgtagaatattttcctaacctttttttttttttttttttttttttttttgagacggagtctcgctctgtcccccaggctggagtgcagtggcgcaaactcggctcactgcaagctccacctccccggttcacgccattctcctgcctcagcctcccgagtagctgggactacaggcgcccgccagcactcccggctcattttttgtatttttagtagagacggggtttcaccgtgatagccaggatggtctcgatctcctgacctcgtgatccgcccgcctcggcctcccaaagtgctgggattacaggcgttwgccaccgtgcccggcctttcctaaccatttttttttaacaacctaaataatttcaggaagaaggtggtgtagggatcaagatatttacttggtgctatgtttataaaacatctatttaggtcatgattgttagatgtaaaa

SEQ ID NO: 17352 - DNA, 911 bp, Homo sapiens
tgcccatgatcactgagatgtgtgcactgattggggggtgaacaggatgcagtggggattcagggaatgtgagcatccatgcagccagcacaagggcacggagcgggaggctggaggctgctggaagatgcgcaaggccttgaatgacaggcagaggaatttagacttatggtgcaggcagtggggagccatggagggtgtgtgagcagaggtcaacagaagccagactggaagtgagggaggaggctgaggccccggttctgggaacaaaggacaggcccgagcaggggcagcagccaagggaacagagtctaggagggaggtgcgggtgggagctggaggtgccagaagtgttgggcttcaggtgtcactaagtgaaggagaggggttccacaagccagggaaggtgtgtggagaacagaggggaatctcaaagagccctcatttgaaggaaagaggaagaacagacatagaaggtgagttcagcagccaggcactgtggctcacgcctgtaaacccagcactttgggaggttgaggagggtggatcactggaggtcaggagtttgagaccagcttggccaacatggtgaaaccccgtctctactaaaaatacaaaaattagctgggcatggtggcacatgcctgtagtcccagctacttgggaggctgaggcaggagaatggcgtgaacccaggaggcggagcttgcagtgagcygagattgcaccactgcactccagcctgggcgacagagcgagactccatctcaaaaaaaagttgtttttttttttttaaataaggtgaggtcagagagttgggagacacccccatagatggtgggttcttgggagccagggaatgagggagaggatgtgtctgtgagcatctaaacaagaaaaatggagcttcc

SEQ ID NO: 17353 - DNA, 911 bp, Homo sapiens
tgcccatgatcactgagatgtgtgcactgattggggggtgaacaggatgcagtggggattcagggaatgtgagcatccatgcagccagcacaagggcacggagcgggaggctggaggctgctggaagatgcgcaaggccttgaatgacaggcagaggaatttagacttatggtgcaggcagtggggagccatggagggtgtgtgagcagaggtcaacagaagccagactggaagtgagggaggaggctgaggccccggttctgggaacaaaggacaggcccgagcaggggcagcagccaagggaacagagtctaggagggaggtgcgggtgggagctggaggtgccagaagtgttgggcttcaggtgtcactaagtgaaggagaggggttccacaagccagggaaggtgtgtggagaacagaggggaatctcaaagagccctcatttgaaggaaagaggaagaacagacatagaaggtgagttcagcagccaggcactgtggctcacgcctgtaaacccagcactttgggaggttgaggagggtggatcactggaggtcaggagtttgagaccagcttggccaacatggtgaaaccccgtctctactaaaaatacaaaaattagctgggcatggtggcacatgcctgtagtcccagctacttgggaggctgaggcaggagaatggcgtgaacccaggaggcggagcttgcagtgagccgagattgcaccactgcactccagcctgggcgacagagcgagactccatctcaaaaaaaagttktttttttttttttaaataaggtgaggtcagagagttgggagacacccccatagatggtgggttcttgggagccagggaatgagggagaggatgtgtctgtgagcatctaaacaagaaaaatggagcttcc

SEQ ID NO: 17354 - DNA, 581 bp, Homo sapiens
cctggggcacagtccaggaacaagctaattgggagtccaggcacaggatgctgtgttgtcaacaaaccaagcatcagggggaagaagcagagagatgcggccaagataggaccttgggccaaatccgctctcttcctgcccctctttctctttcttcctttactttcccttgcttttccctcttttcttactcctcctctttctctycccaacccccattctcatctgcacccttcttttctcatgtgtttgcataaacattcttttaacttctttctatttgacttgtggttgaattaaaattgtcccatttgctttgcggtttgttttgtttgtttgacctgccctttgggggataatggggactgtgagccaagtcctggaagaaacctattgtgttcatgttggacagagatcaagggctatccagcgctggtcatcagccaaggaggtttgaatggtgatatccggcagtgggtcaggggtgtgcgctggcccttttgcccttgcagggacagtggggggcaactttccaggagggacccagagcagtcccctccatggccacatgaggaatgcca

SEQ ID NO: 17355 - DNA, 581 bp, Homo sapiens
cctggggcacagtccaggaacaagctaattgggagtccaggcacaggatgctgtgttgtcaacaaaccaagcatcagggggaagaagcagagagatgcggccaagataggaccttgggccaaatccgctctcttcctgcccctctttctctttcttcctttactttcccttgcttttccctcttttcttactcctcctctttctctccccaacccccattctcatctgcacccttcttttctcatgtgtttgcataaacattcttttaacttctttctatttgacttgtggttgaattaaaattgtcccatttgctttgcggtttgttttgtttgtttgacctgccctttgggggataatggggactgtgagccaagtcctggaagaaacckattgtgttcatgttggacagagatcaagggctatccagcgctggtcatcagccaaggaggtttgaatggtgatatccggcagtgggtcaggggtgtgcgctggcccttttgcccttgcagggacagtggggggcaactttccaggagggacccagagcagtcccctccatggccacatgaggaatgcca

SEQ ID NO: 17356 - DNA, 581 bp, Homo sapiens
cctggggcacagtccaggaacaagctaattgggagtccaggcacaggatgctgtgttgtcaacaaaccaagcatcagggggaagaagcagagagatgcggccaagataggaccttgggccaaatccgctctcttcctgcccctctttctctttcttcctttactttcccttgcttttccctcttttcttactcctcctctttctctccccaacccccattctcatctgcacccttcttttctcatgtgtttgcataaacattcttttaacttctttctatttgacttgtggttgaattaaaattgtcccatttgctttgcggtttgttttgtttgtttgacctgccctttgggggataatggggactgtgagccaagtcctggaagaaacctattgtgttcatgttggacagagatcaagggctatccagcgctggtcatcagccaaggaggttygaatggtgatatccggcagtgggtcaggggtgtgcgctggcccttttgcccttgcagggacagtggggggcaactttccaggagggacccagagcagtcccctccatggccacatgaggaatgcca

SEQ ID NO: 17357 - DNA, 588 bp, Homo sapiens
agagttgaaaaaaaatagtgaagaaaaaaaagggggacttgtttgaatgcttatagctcaacaaggagcaaaaccacatagctccatagcttccagccaccccaaatgcccattgaaattagtttatagacaaaccataaatattattcccaattaagtagctcctatataacaaagcaacagaaagacattctcaggcattcatgaattcataaaatacaggacctacatcttttaattaaaaacttatgtttttatgcatatgtgtataaccaaaaggtgtctgtgtgcaggtaagtatatgtacatatactatgcattatctatgcacatatgtaatacctgagcaaagaataaaaaaatwtggaattcacaatataaaaagaggcttcaaaggaggttcatccccccaaaaagatgttttaaaaagtaattacaaaacaaacataaaatccccgagagaaaaagtggaatatacattatctatttttgtgatgggcagaaggaggacaagagggaaagaaagagggaacttttaatagaagggtgcataaatcactttgaatataggggaagaaattattgttc

SEQ ID NO: 17358 - DNA, 780 bp, Homo sapiens
gataaaaaaaattctaagagaataaaaacaatttcatcctgcctccatattataaccagaataattgaaataatatgcttcaattgatagtaaagtagcatttatgtttttggatcaatgaagctaagccagcactaagaattttcttactattcctccactacattacagttacttcttcatccctatacataccgcaataatgagtcrgctacatccatttagattatcaacccaaccctaaaagaaagaaaatttccattggttacacatttcagaaaattgttgtatctttggaacatctgccgtctaatcttaataaatttcaaacaagggcactgagactccagccgatagaactatctaattcagtatgattaagatcccaaagatcaatggcaaagcgttggctattttctgcagtttgtgcaagaattaaaatttggccaggattgttgtttgtagcaggagtcatgaatggttttgtggcgttttatgacaacttaagggctacaatggaccttgtccttatatcatgatctgctaagcaattcaccaaccatacttcacctcattcctgattttagcctccttaggagaacattgaaaacatgattggtaataatgtgtattgacttgcttaaagatgttacaggaaagattatgcttaagagtagttagagggaaatgtatttttcagtttgtttcctaagccctaagccgtctctttaccttacagtataaaagtcgaaatgcgtataatgggagaccagatatacg

SEQ ID NO: 17359 - DNA, 780 bp, Homo sapiens
gataaaaaaaattctaagagaataaaaacaatttcatcctgcctccatattataaccagaataattgaaataatatgcttcaattgatagtaaagtagcatttatgtttttggatcaatgaagctaagccagcactaagaattttcttactattcctccactacattacagttacttcttcatccctatacataccgcaataatgagtcggctacatccatttagattatcaacccaaccctaaaagaaagaaaatttccattggttacacatttcagaaaattgttgtatctttggarcatctgccgtctaatcttaataaatttcaaacaagggcactgagactccagccgatagaactatctaattcagtatgattaagatcccaaagatcaatggcaaagcgttggctattttctgcagtttgtgcaagaattaaaatttggccaggattgttgtttgtagcaggagtcatgaatggttttgtggcgttttatgacaacttaagggctacaatggaccttgtccttatatcatgatctgctaagcaattcaccaaccatacttcacctcattcctgattttagcctccttaggagaacattgaaaacatgattggtaataatgtgtattgacttgcttaaagatgttacaggaaagattatgcttaagagtagttagagggaaatgtatttttcagtttgtttcctaagccctaagccgtctctttaccttacagtataaaagtcgaaatgcgtataatgggagaccagatatacg

SEQ ID NO: 17360 - DNA, 780 bp, Homo sapiens
gataaaaaaaattctaagagaataaaaacaatttcatcctgcctccatattataaccagaataattgaaataatatgcttcaattgatagtaaagtagcatttatgtttttggatcaatgaagctaagccagcactaagaattttcttactattcctccactacattacagttacttcttcatccctatacataccgcaataatgagtcggctacatccatttagattatcaacccaaccctaaaagaaagaaaatttccattggttacacatttcagaaaattgttgtatctttggaacatctgccgtctaatcttaataaatttcaaacaagggcactgagactccagccgatagaactatctaattcagtatgattaagatcccaaagatcaatggcaaagcrttggctattttctgcagtttgtgcaagaattaaaatttggccaggattgttgtttgtagcaggagtcatgaatggttttgtggcgttttatgacaacttaagggctacaatggaccttgtccttatatcatgatctgctaagcaattcaccaaccatacttcacctcattcctgattttagcctccttaggagaacattgaaaacatgattggtaataatgtgtattgacttgcttaaagatgttacaggaaagattatgcttaagagtagttagagggaaatgtatttttcagtttgtttcctaagccctaagccgtctctttaccttacagtataaaagtcgaaatgcgtataatgggagaccagatatacg

SEQ ID NO: 17361 - DNA, 442 bp, Homo sapiens
tttttttttaacctgtgggtcattcatggtataggtttgcgtagagagcttgatggaacttaagaatgacttaggaattatttagttgtaaattaaatkatttttaagctacattaatgtgggcaggggatggcgctttggattattttggttgagagagaacactgaaactacatagccagatttcttgtgactcgggcagcatcttctgagaattatcttgttaggaaaaagagttgacacatgcagcatgtttgtgtgtgtaaatacttgaaagtttctatcacaccaagggagccagacaccagagacatcagaatagttttataaacgttaagttccaaaaagaactattttctcttgttgcctggcacacgtatatgtattcctttgactaaacctgtttaatttcaaacaggctaggcatggtggctcatgcctg

SEQ ID NO: 17362 - DNA, 587 bp, Homo sapiens
gaatacctagagaactgttaaagatttattttgggtatatttgtgagggtattttcagaagagattggcacatgagttgctgcactgaatggggaggatctgccccctatgtggccatccagttggctaggagtctggataagaaaaaaagacaattttctctcattctgtctgctggagctgggtcactcttctcctggccatggacatcagaactccaggctctctggtctttggactccagtatttacaccagtgggcctccaggttttcygagctttgtctttagactgtcacttacagctacacttctctggttctgaggccttcagacttgaactgagccaagcaataggcatctcaaggtctctaacttacagaatacctgctgtgggacctttctacctctatattcatgtaagcccattctgttaataaatttcttctcatatatcagtgcatattctattggttatgtccttctggagaaccctaatatagtttccacattgattttctgtctggacgatctgtctcatgttttatgcaacattattcacagtagtcaagatatgaaaacaaccaag

SEQ ID NO: 17363 - DNA, 587 bp, Homo sapiens
gaatacctagagaactgttaaagatttattttgggtatatttgtgagggtattttcagaagagattggcacatgagttgctgcactgaatggggaggatctgccccctatgtggccatccagttggctaggagtctggataagaaaaaaagacaattttctctcattctgtctgctggagctgggtcactcttctcctggccatggacatcagaactccaggctctctggtctttggactccagtatttacaccagtgggcctccaggttttccgagctttgtctttagactgtcacttacagctacacttctctggttctgaggccttcagacttgaactgagccaagcaataggcatctcaaggtctctaacttacagaatacctgctgtgggacctttctacctctatattcatgtaagcccattctgttaataaatttcttctcatatatcagtgcatattctattggttatgtccttctggagaaccctaatatagtttccacattgattttctgtctggacgatctgtctcatgttttatgcarcattattcacagtagtcaagatatgaaaacaaccaag

SEQ ID NO: 17364 - DNA, 571 bp, Homo sapiens
catgtactggtattgaagtaatgctcactgtcacatcaaaggtaagtaaggcacacaaagaaaagacaatcacaggatatgcaatatgtgttgtawagtgtgggagaagttgctggctgatcacaagggtaatttccttggcactagatgtgaccattacctggttccagccaacagaatgtaaatagaagacctgtatgccattgtcagcccttgcccataaaaacttcctataattatgaattataattctttatgatctttccccttctggtttgatgcaagcaattttgaaggtcatggttgaaaacggcaaaattccaaggtaggaagttgcagaatccctgaatcattacttggaggagagtcattttattagtcagagttcatcagagaagcagaatcaatagggtgtgtgtgtgtgtgtgtgtgtgtgtgtgtgtgtgtgtgtacatacaggcatacctcattttactgcacgttgatttattgcatttttcacaaattgaaggtttctggcaacactgcattgaacaagtctacagctgccatttttccaacactatagtca

SEQ ID NO: 17365 - DNA, 632 bp, Homo sapiens
ctccaagaaagaaaatggctacaatcttcttctaattttcaatttcatttttctctctttgtcattattggaaaaagcatgttattattatgttattgtgtatattactatgtattatatatatattatacctatataatacataytagatattagatgaatatataatttcttatagttattacttctccttcctttattttttaagccagctattagatttattcatcaattccacttatatctttattcaggctttctcagtacattcatatttatttagctggcttttctctaacatcttaagctgtgggttttattaatttatttttattatttcatttttaataaaactacaaggttggttctgtatttacctctgttacccataaattttgataataatggtgtaattaatatttttagatattacacttcttgataaaatatttatttggtctaatgactaaaaaattctcagtagctattttcttttaaatttgattattttagattagttgcactgtggtaaaagataatgaagtctgcttctgggaattttagtgttcctagtgacctagcatataatcaatatttgagaatctttatgaatatttgaagataaagttaat

SEQ ID NO: 17366 - DNA, 2689 bp, Homo sapiens
gccaccagatcatctgaccctaggaatcaaagatttggaatcctttggccatgcaaactagaattaccaaaacaaacaaacaaacaaacaaaacaaacaataactcaataagcttctagtcctgtagacttcraatgaccttcctcttgcatttcgtaggacaaccaactgcagttgcattattcccatagacatacttccgtccaattgtggtcaggaagtttagtcgtagatttcttatttatcaccagatttgtacgaacgtaaccacatccaaaccacctacccaaccaatattagtaatgtctttttacttcctgattgaagtgcaaagtgctttaaacattcagtgtaaacacatttgtttatttctttcttaatttgtgaggccactttgctggcagagagcagagtagaggaatccaagatgtattgatttctttcttcatgactatttaatcggttaaagtgtgcaccacttgcaaatgccaagatgctggttacattttaataaatgtcctctttggtcgatcaatactcctcagcccaaaaataaataaataaataaaagtgctgttctctcataagctaatggggagaaaatctttttactatcaccagtcatcatgacaaacaagaatatgaaaagtgttaatgaaatgaccaactgtctataaaataaaagactttcaagatagtctcctttcttccttcaacctgatgaaacaaaatggaaaattacactagtgcccatccagcgtgaaatgatgttaacaagcagaaaacaaattctataatgaaggacttctaggatgtactatgtatagtcttacttgtaaagagggaattactgggcagagctctagccctgagcaacatcccaccccctactgaggagaatcacagttatcatcatgtccctcgggaaatcgcaccattcgccactgtacaacaaattgatgttcacagcataataattatccatgtgctgcaaacaataggccacacaattaccaaccaggacaatgccctacacagggcaaagtaaagttacaaaatgaggtgattgtacagatagttgaggaaatagccccacaaaaaaagggaggtgggcaagttgtcatttattgagcattgttcaggaaggaagagttacaaataactgaattttcctgaacaccaaaacttattgtttaagcacaaaatgtttcattttcaaaatgcattcattgtggatggatatcttacttaaaatgtattattaatccttctctctagttaaacagagtctataaatgtgattatattttgatagttctctcgattaaacaaacaaacaaaacatttattagggaaaggtggcccagaaactactacctgggttaagaatgtgaccacattcttgtaatgcctcccattttctacagaaggatggcatgaagacatgtaagtacacttgtagaggcattattccaaaggagttcacaggttcctatgtaaaccctgcaggtgcaaagcaacataagccaaacagatgatatttctaaaattaaatgagatacaactacagacacttaaaataatttgatgctatttttgtgaacctcattttcttactagagactggagcataacggaatattttggaattgaagcagcttaatgttgaaggttctgcacttgtcttgaagctcagactgcctgggtgcaaatctcatccagcatgtaataactgtgtgatgctggaaatattttttgaatcattataaaagtctggattctgatccacaaaatagaaataattatgatccctctattgtaattttaaaataagatcatccttgcaaaatatttagcccttctgttggcacttagtaagggctctgtaaatgttagcaatttaaataagaaaatggggagggaaattggttcaataggaatccagagatgaaaatataaataataagcatgtgaaagactataaaaggaatgagtgtaaaaactaaaggaatagagaaaaataaagaaagagtatttagaggacactaagtcaattttttagatcaccatgccctcaactgttcaaggaaaaatcactatttcgatattaaaaaatatttattgtgccacatcacagactagacacaatgccagacgccattaaattatgtaatgtagcctattctgcaccaacatctttgaggtggattttgtctttgtcattttgtaggtgagaaaaccaaaactcaaaggaatactgtaggtcatatggtaagaaagatttgtaaatatcatttaaatatagtatcttttggctctaaatccaatgtgctcttcccccaacacagagcttatgtacatgttttccttccttctcccctctcctcttgctgacccattttctacttctcttcctgttttttgagcactccttatgtgtgaaacactgaaaaaaaagaaagttaaaatttgttctttgtctgtagtgattttacagtctattggaggacaaaagcatgtgaaaagatgcatacaatttaacaggtgacttcaacagggacatgcatggagtgccattgtttctcacatcaacatctgtgcctggaatacattctctttgtttcaggctcccagatcctgatatccttctatctttcaagcctcagctcacgtttatcattctctccca

SEQ ID NO: 17367 - DNA, 1872 bp, Homo sapiens
tacatttttgtctttctctgccattgtactatatactccagggtatattctgggtttgctcagttgatccacagcatctggaacaatacatgggtacatagtaggcacacaatcagtgttgagtgaataaaggggaggaagcaagaaaacatatatatgttcaacaaagcctgaggagtattctcagagctcaagaactgaataaagatagtgcattcattaatggtatggtccactcgtagacatccttatttttacttgtgactaactcatcacactccaataaactgacttccccaaacacatcttgagaaatggtactgaatcactactaactgttatttcctaaagaacacttacagccaaaatgcctaaatggtcatttgagagaggtcccacattgtaatcaatgtcagaaatgttaatrtttaaaaaagcaaatagggaataatgtatgtgcacacatctgataaagtttaactaatcaaaaaataaataaataaataactctttttcttctagcccttccagtaatggtagagtagactatataaattatatcatactactatttcctactataaatttcctagtattaataaaagcaatcataaactcaggataatatatgtaaaacaacagttgaaaggaactgaggaacaaaaagaaaaaggtaaaattagagccactatgactattgaataagaagatcatactcagattgtctaaagaaaattagagtcatagccatgtagaagatagagatcaagaagaaagctgcagtcctattgaactaggcagtcagatgttgaagtttagtcctgagtaagaatctggaatttaaggaaagaaattctggacaaagaagagaacataaagcgtgagtataaactgtcacataagcttgtacgtaaatttgtggctgacatctgaattgttcatacataggatgagactccatacagttcatgagaaacaacagctcttaaggaagaaagatcttagcacagatttcaattgctgctggcaagaaagagtttgatgttcattttaggccaaattatagggccctagtagccatctcaggctttccactgaattcccagaagggttatgccttataattaaaacccgtatctcagaactaagggtatctctctaggattaacagacaaaagagaaatagattgacctatgtaaagtaaaagttaaagctaaccctcagtaaaatcaagatactgtactaataacaggctgttccaaaaaaaaaaaaaatctttacaacttagaggcagataacaaaattcagtctcttcaactttaaaaagtgaacataaacgaataagcgctagaaataaaaatacaagggaaaatgtaataactaatcgtatacagaacagtattcaatagaagcaggtaaatgacacagattttggaattagtagaaaataactttaacataactctattacttctgcttctgactatggtgaaataactgggagtgttcttcccttactgctgtaaccatcgaaaaaactaggcaaaatatttagacaactttttttttcagattgaacaacaatcattgtagaattgtgatccctaagaagaagaggaaaaggagaagagatctatctacaattatcctggtttcctgcctaaagataacattttagagctcagtgcacagtaagacaagtaaagcattattttactttattaagttattattaatttaggagtgagatatcacagttgagggaggataagaaagttggaaattcagagtaatgaagatgagggtgctaaaccgagaaagaggtccagaaagttggtcaagattccattttttatgctaaattctatgcc

SEQ ID NO: 17368 - DNA, 2018 bp, Homo sapiens
tgcagtaacttgccttcccccattcctgctgctgggttcagtggggctgcccttctccccagtagcgcatttcccttcagagattcatgtgcggatgggaagggaactaaggccaagaaggctcctggagtcccctggcaaatatgtggcaccccctgggacctgagtcaggcctgcttcccaggctggaagcccccctctgccggccggtggagatagttcagcctcctgcctgccacgtcaccaccaggagcaggcgctaagctgcygcgggcctagcgggctgcctgaggaatcccaaaccagttatttggagcttgcttgagaagcccctcccagtcctttgaggttctggctggtgggggtgggggctgtcaagatggtacctgccacgtggcatggctgggagtgggctcttcagctgcctcctcagggaaggaaggctggtggcctctgctgtggtctgagctccagcatcactggtctggatcagaggtggattttgagtagggtggccatatgcctattgtcctggcataataattagtagtgcccattttactcttataagtgtccttgtttgtgcaataaattatatggttgctctgcctttgaggctccagttctggcagggaaggagccagagctgggagggaggtgtcttggggtttattctaggccccaagatatccccttcattttagggtgagactcagatctccccgctccttccagacatttttagatctctgggccttccctcctctccccaccttcctccccttggaccctttgcttatcttatactgcaccttcaaggctccgaggagggaggcagtcccgggagatggggagcctgtccaggtttttgggatggcagcagtagaatcttcccagaaatacagtggtccccaggcagccagagtcctgagggtcttccaccaggatttcaaatgttcggtcttcttcaaggatgactacaagttgggatctaccagagcagtgggatcgcagcctccaccaggattccttctatccttccctttgccctgtcatctctcctgtgctgttgcatgatgtagaggaggataatggcccgaagggagagagggagtgtggaagtatcccaggaacagagactgtcccaattggaggccccagagagggaactggggcttgtccttggggccactgctactgctggggcttggggaggaggcctgagggcaaccctgaagccgtggagcagatggcctgtgtggcagtggctgtcagattggagggcagaatggaatctgatgtggctccagcttctttgaaggctgagtgcacatctggccagctgctggtgatggggaagggggtcactgctctattgagctatgtgtgactcacccttttccctagtatcctgtccttgtgctatgtcaggaaacctcctccccagccccaccgagtcttcaaaggagttggtcccccaggagcttttgtcctggggatttcccatccgcactgggagcactgtgggtagatgggcattccaagttcctgcccagacagaagccatgggcatggagacctggacctttcagcttggaaaagggagactgaggctgagtggacacaggacacacacacactctcagggtcacccttggggcagcaaagtggagcatcttggctccccatttaatgagtgacccaactggtgactcattaacatcccagagcacaatgaaaggcatgggggcggggcagccctccggctctgtccctcatcccttgcccaggcatctgggtttcctgcagattctcagctcagctgctgctttttctcactggaaaagggctcccagggctatgtgagatcagggctgaccactctataaactgatgaggaccccaggtctggccaagtgaccctgttttaccttcgttcaggaagagctgaggcctactgtgtactaggcacgggagatatagtggcaaccagattggctagcttttctgtcctggag

SEQ ID NO: 17369 - DNA, 2018 bp, Homo sapiens
tgcagtaacttgccttcccccattcctgctgctgggttcagtggggctgcccttctccccagtagcgcatttcccttcagagattcatgtgcggatgggaagggaactaaggccaagaaggctcctggagtcccctggcaaatatgtggcaccccctgggacctgagtcaggcctgcttcccaggctggaagcccccctctgccggccggtggagatagttcagcctcctgcctgccacgtcaccaccaggagcaggcgctaagctgccgcgggcctagcgggctgcctgaggaatcccaaaccagttatttggagcttgcttgagaagcccctcccagtcctttgaggttctggctggtgggggtgggggctgtcaagatggtacctgccacgtggcatggctgggagtgggctcttcagctgcctcctcagggaaggaaggctgktggcctctgctgtggtctgagctccagcatcactggtctggatcagaggtggattttgagtagggtggccatatgcctattgtcctggcataataattagtagtgcccattttactcttataagtgtccttgtttgtgcaataaattatatggttgctctgcctttgaggctccagttctggcagggaaggagccagagctgggagggaggtgtcttggggtttattctaggccccaagatatccccttcattttagggtgagactcagatctccccgctccttccagacatttttagatctctgggccttccctcctctccccaccttcctccccttggaccctttgcttatcttatactgcaccttcaaggctccgaggagggaggcagtcccgggagatggggagcctgtccaggtttttgggatggcagcagtagaatcttcccagaaatacagtggtccccaggcagccagagtcctgagggtcttccaccaggatttcaaatgttcggtcttcttcaaggatgactacaagttgggatctaccagagcagtgggatcgcagcctccaccaggattccttctatccttccctttgccctgtcatctctcctgtgctgttgcatgatgtagaggaggataatggcccgaagggagagagggagtgtggaagtatcccaggaacagagactgtcccaattggaggccccagagagggaactggggcttgtccttggggccactgctactgctggggcttggggaggaggcctgagggcaaccctgaagccgtggagcagatggcctgtgtggcagtggctgtcagattggagggcagaatggaatctgatgtggctccagcttctttgaaggctgagtgcacatctggccagctgctggtgatggggaagggggtcactgctctattgagctatgtgtgactcacccttttccctagtatcctgtccttgtgctatgtcaggaaacctcctccccagccccaccgagtcttcaaaggagttggtcccccaggagcttttgtcctggggatttcccatccgcactgggagcactgtgggtagatgggcattccaagttcctgcccagacagaagccatgggcatggagacctggacctttcagcttggaaaagggagactgaggctgagtggacacaggacacacacacactctcagggtcacccttggggcagcaaagtggagcatcttggctccccatttaatgagtgacccaactggtgactcattaacatcccagagcacaatgaaaggcatgggggcggggcagccctccggctctgtccctcatcccttgcccaggcatctgggtttcctgcagattctcagctcagctgctgctttttctcactggaaaagggctcccagggctatgtgagatcagggctgaccactctataaactgatgaggaccccaggtctggccaagtgaccctgttttaccttcgttcaggaagagctgaggcctactgtgtactaggcacgggagatatagtggcaaccagattggctagcttttctgtcctggag

SEQ ID NO: 17370 - DNA, 2018 bp, Homo sapiens
tgcagtaacttgccttcccccattcctgctgctgggttcagtggggctgcccttctccccagtagcgcatttcccttcagagattcatgtgcggatgggaagggaactaaggccaagaaggctcctggagtcccctggcaaatatgtggcaccccctgggacctgagtcaggcctgcttcccaggctggaagcccccctctgccggccggtggagatagttcagcctcctgcctgccacgtcaccaccaggagcaggcgctaagctgccgcgggcctagcgggctgcctgaggaatcccaaaccagttatttggagcttgcttgagaagcccctcccagtcctttgaggttctggctggtgggggtgggggctgtcaagatggtacctgccacgtggcatggctgggagtgggctcttcagctgcctcctcagggaaggaaggctggtggcctctgctgtggtctgagctccagcatcactggtctggatcagaggtggmttttgagtagggtggccatatgcctattgtcctggcataataattagtagtgcccattttactcttataagtgtccttgtttgtgcaataaattatatggttgctctgcctttgaggctccagttctggcagggaaggagccagagctgggagggaggtgtcttggggtttattctaggccccaagatatccccttcattttagggtgagactcagatctccccgctccttccagacatttttagatctctgggccttccctcctctccccaccttcctccccttggaccctttgcttatcttatactgcaccttcaaggctccgaggagggaggcagtcccgggagatggggagcctgtccaggtttttgggatggcagcagtagaatcttcccagaaatacagtggtccccaggcagccagagtcctgagggtcttccaccaggatttcaaatgttcggtcttcttcaaggatgactacaagttgggatctaccagagcagtgggatcgcagcctccaccaggattccttctatccttccctttgccctgtcatctctcctgtgctgttgcatgatgtagaggaggataatggcccgaagggagagagggagtgtggaagtatcccaggaacagagactgtcccaattggaggccccagagagggaactggggcttgtccttggggccactgctactgctggggcttggggaggaggcctgagggcaaccctgaagccgtggagcagatggcctgtgtggcagtggctgtcagattggagggcagaatggaatctgatgtggctccagcttctttgaaggctgagtgcacatctggccagctgctggtgatggggaagggggtcactgctctattgagctatgtgtgactcacccttttccctagtatcctgtccttgtgctatgtcaggaaacctcctccccagccccaccgagtcttcaaaggagttggtcccccaggagcttttgtcctggggatttcccatccgcactgggagcactgtgggtagatgggcattccaagttcctgcccagacagaagccatgggcatggagacctggacctttcagcttggaaaagggagactgaggctgagtggacacaggacacacacacactctcagggtcacccttggggcagcaaagtggagcatcttggctccccatttaatgagtgacccaactggtgactcattaacatcccagagcacaatgaaaggcatgggggcggggcagccctccggctctgtccctcatcccttgcccaggcatctgggtttcctgcagattctcagctcagctgctgctttttctcactggaaaagggctcccagggctatgtgagatcagggctgaccactctataaactgatgaggaccccaggtctggccaagtgaccctgttttaccttcgttcaggaagagctgaggcctactgtgtactaggcacgggagatatagtggcaaccagattggctagcttttctgtcctggag

SEQ ID NO: 17371 - DNA, 2018 bp, Homo sapiens
tgcagtaacttgccttcccccattcctgctgctgggttcagtggggctgcccttctccccagtagcgcatttcccttcagagattcatgtgcggatgggaagggaactaaggccaagaaggctcctggagtcccctggcaaatatgtggcaccccctgggacctgagtcaggcctgcttcccaggctggaagcccccctctgccggccggtggagatagttcagcctcctgcctgccacgtcaccaccaggagcaggcgctaagctgccgcgggcctagcgggctgcctgaggaatcccaaaccagttatttggagcttgcttgagaagcccctcccagtcctttgaggttctggctggtgggggtgggggctgtcaagatggtacctgccacgtggcatggctgggagtgggctcttcagctgcctcctcagggaaggaaggctggtggcctctgctgtggtctgagctccagcatcactggtctggatcagaggtggattttgagtagggtggccatatgcctattgtcctggcataataattagtagtgcccattttactcttataagtgtccttgtttgtgcaataaattatatggttgctctgcctttgaggctccagttctggcagggaaggagccagagctgggagggaggtgtcttggggtttattctaggccccaagatatccccttcattttagggtgagactcagatctccccgctccttccagacatttttagatctctgggccttccctcctctccccaccttcctccccttggaccctttgcttatcttatactgcaccttcaaggctccgaggagggaggcagtcccgggagatggggagcctgtccaggtttttgggatggcagcagtagaatcttcccagaaatacagtggtccccaggcagccagagtcctgagggtcttccaccaggatttcaaatgttcggtcttcttcaaggatgactacaagttgggatctaccagagcagtgggatcgcagcctccaccaggattccttctatccttccctttgccctgtcatctctcctgtgctgttgcatgatgtagaggaggataatggcccgaagggagagagggagtgtggaagtatcccaggaacagagactgtcccaattggaggccccagagagggaactggggcttgtccttggggccactgctactgctggggcttggggaggaggcctgagggcaaccctgaagccgtggagcagatggcctgtgtggcagtggctgtcagattggagggcagaatggaatctgatgtggctccagcttctttgaaggctgagtgcacatctggccagctgctggtgatggggaagggggtcactgctctattgagctatgtgtgactcacccttttccctagtatcctgtccttgtgctatgtcaggaaacctcctccccagccccaccgagtcttcaaaggagttggtcccccaggagcttttgtcctggggatttcccatccgcactgggagcactgtgggtagatgggcattccaagttcctgcccagacagaagccatgggcatggagacctggacctttcagcttggaaaagggagactgaggctgagtggacacaggacacacacacactctcagggtcacccttggggcagcaaagtggagcatcttggctccccatttaatgagtgacccaactggtgactcattaacatcccagagcasaatgaaaggcatgggggcggggcagccctccggctctgtccctcatcccttgcccaggcatctgggtttcctgcagattctcagctcagctgctgctttttctcactggaaaagggctcccagggctatgtgagatcagggctgaccactctataaactgatgaggaccccaggtctggccaagtgaccctgttttaccttcgttcaggaagagctgaggcctactgtgtactaggcacgggagatatagtggcaaccagattggctagcttttctgtcctggag

SEQ ID NO: 17372 - DNA, 502 bp, Homo sapiens
tttgttgcttgcctcatctatggtcccatgccccagagctctataagtagctactgtatgtcttaaattctttaatcagatgcttcctggaaagccactccagactgaggggcgctgccatgagcctagggattagggaaagttagataggtaaacaaaatggacataactatatattaatgagactttgaagcctctttcttcactaaacactccgttggtattgtgagatttccatgggmtctgagaattttgaaaaagttgatatggtcagtttcttgtcagtttaaagattgtttccagggagaaatcaattgatggggcttcttatttcatcatttccatgaagttacctcctcattcactttcaagtactagtttattgatgggaaatctgattctgcaattaatataaattatgaaataacagtaattgtgatttttcaaaccctattaaaacacattttatatctttctatcaagtggtacaaaatatgtaaag

SEQ ID NO: 17373 - DNA, 560 bp, Homo sapiens
caagagagaagctgagcagtgtgtcagataactctagactccctaccaccccagcaccaaaaaagtatgcagagggtcaaaaatctgtaactaggaattaaaagacacaaactgtgaggcgggcggatcacaaggtcaggggatcgagaccatcctggctaacacggtgaaacccatctctactaaaaacacaaaaaaaaattagccaggagtggtggcaggcacctgtagtcccagctactcaggaggctgaggcaggagaatggagtgaacccaggaggcagagcttgcagtgagctgagatcgcgccactgcaccccagcmtgggtgacaaagagcaagactccgtctcaaaaaaaaaaaaaaaagacacagactggcagattggataaagagtcaacacccataggtgtgctgtattcaggagacccatctgacgtgcaaagacatacaaagggtcaaaataaagggatggaggaatatttaccaagcaaatggaaagcaataaaaagcaggggttgcaatcctagtctctgataaaacagacattaaaacaacaa

SEQ ID NO: 17374 - DNA, 560 bp, Homo sapiens
caagagagaagctgagcagtgtgtcagataactctagactccctaccaccccagcaccaaaaaagtatgcagagggtcaaaaatctgtaactaggaattaaaagacacaaactgtgaggcgggcggatcacaaggtcaggggatcgagaccatcctggctaacacggtgaaacccatctctactaaaaacacaaaaaaaaattagccaggagtggtggcaggcacctgtagtcccagctactcaggaggctgaggcaggagaatggagtgaacccaggaggcagagcttgcagtgagctgagatcgcgccactgcaccccagcctgggtgacaaagagcaagactccgtctcaaaaaaaaaaaaaaaagacacagactggcagattggataaagagtcaacacccataggtgtgctgtattcaggagacccatctgacgtgcaaagacatacaaagggtcaaaataaagggatggaggaatatttaccaagcaaatggaaagcaataaaaagcaggggttgcaatcctagtctctgataaaacagacattaaamcaacaa

SEQ ID NO: 17375 - DNA, 574 bp, Homo sapiens
aaatgttgaaatatttcgagggtaaatagtatagtaattacaataaatattacaattagttaatagaaattttaatataaactcattggtttgtgctaatagttgtaggatgtcagtaccattgataacaggcctcctgttgtttccacattatgacacaatctggcctgtgtcactgcagggactgcagccaagttacgtgtgttaaatcactgattgctttaggagaatcactagtttaaaatatttttattggactgggtgcagtggctcacaccagtaatcccagcacttcgggaggccaaggcaagaggatcacttgagcccaggagtgcaagaccagcctgggcaacatggcaaaaccctgtctctagaaaaaaatacagaaaaaaattagctaggcatggtggygcatgcctgtagtcccagctactggaaaggctgaggtgggaggatcccttgagcctgggaggtcgaggctgcagtgagctgagatctcaccactgcacttcagcctgggtgacgacagagtgagactctgtctcaaaaaataataaaatatttctattgtaag

SEQ ID NO: 17376 - DNA, 560 bp, Homo sapiens
ttcccaggcgaatccaaactgaagtagtttgggaaccactaatataatgtcagagtgaactataggccttatttatcccaggagaaatcaagggagccttccaagaggaagtgactgggctatgtttttaaatgataaattggttctttctactgtttttataatttgaatcctgcaaatgccataaatgaacataatttgaatgctacaaatgccacaaaaacagaaagggaaaaacgttatgtacgatccccaaaaaaaatcatctttggaaaaattttcccactggtagtaaaaaattaagtatttgactctctctctctctctctctctctctctctctctmtatatatatatatatatatatattcaaatatcaccctcagaattgatggtcagtggtcttttatttcctctatgtggcctataacactgagaacaatgcaaggcaaaaaaaaaaaaaaaaaaaaaaaatcagtggtatagtctgtcagatcaccaaagctagcctcaggcgaacatgccaagacaaattctagaattacaaccaggaaaccagg

SEQ ID NO: 17377 - DNA, 1410 bp, Homo sapiens
ggcagccttttaaattccattcactaactcttccagtgatttcgcaaatacctatctctgaatcaaaccccattcttctcaagatatctagagtggttttgtttcttgcctaaactctgaccagtaaatagacattaccttgtacctacactatatatgctatcttgaatttgtgttagctaacacactgttttagattatgttagttgtagtatcttttaacacctcgtttatgcaaacaggaattaaatcaatgactaaagcttgaaaaaccctcatccccatgcattagcagacttctgcatccactcaatttgctacctgctctctgcaattatatagtctcttcaatgaaaagcttatttatatttgttcaaagtagcctgggtttgtggttttctctaccaaagagggctcagttgtgtgaatattgatctagaagcaccttttggtgttgattcccaggttaataggtcttgctgaattttactagcttgtgcctaaacacagatctttaccaataaatcaaattaacctcttccttttctctcagagctcagttctccctcctctactgttactctcaatggtgccaccattttgctagacaggctgcatatatcagtttattgggaatggctgctaggagaactgtgagaaagatttctgggacctgagaagaggaatgtggagatcagtcattgttttccatgagtacagttggatggaagttggccaacttcatcaagtcttcagctacaaccaaactggattccttgctgttcttaaagacatctttctcctttatctgactttattcccttcattacatctacctgggctatatttcttcactttctcaccaatccaatttctactcccccttaagacccattgaaaactttcttgatttatcatggatcttagccatttttgttccccacacaatgttgagttcatagttgctacataaatatttgtttaatgaataaaaaaaaatgacttcttttgttgccttaaacagcctagatattttttcttaactatttrtggattgttttgtctttaaagttagattggccaccattgaggggagtgatgaaccagaccttaaattcatttgtataatcttcattgtcttgcctatagagacttaaacaataataccatttccatttgagaatttttgccctgaaggttgttggcacaccaggggtggctctagaaatatatatacttatcagactattactgatgataatgttcagagactgaatttcctaggaaggagggagggtaaggagagttggatcacagcctgataaaatatccttttctccacctaaccctatccactcttcacctagataccagttctcattcttcagtccccagcctgtttgtcatacc

SEQ ID NO: 17378 - DNA, 597 bp, Homo sapiens
cattacaatagctaacacatatggaacattgtctgcctggtactaaactcatttaaatctcacagaactctatgaggaaagcacagctttcattattagctccgttttacagaaagtaacgcaattatcacaaggttacacagctagtgaacagcagcatcagggttcgatctcagataaatctgctttaagagaaccacttcactttactgccttctcaatagaacataatcaagaatctttcagatgctcctaattgggctgaaaatagcagctgttttgaaactgcaaaaatgaatggtaccataactgtgaaataaaaatgaacyataactttaatgtacttaacatttatgtagaattttatctacctgtttgtggttgtcagcagtcttacctgaaccaattctctgtatgcagatttagcaaggttataaggtaccaaaagattagacccaagaaaatagagaacttccaatccagtaaaaatcatagcaaatttattgatgataacaattgtctccaaaggaacaaggcagagtcgtgctagcagaggaagcatgtgagctgaaaacagccaaatctgctttgttttca

SEQ ID NO: 17379 - DNA, 583 bp, Homo sapiens
gctgcatatgtaacagatagaaacaggagttgctctggttaaggagggaaagaaaggtcttgtagagggtcaaagaaggtccaagggactgatacaggrccttggaatcaggctttctcagaatgtggtactaggtccacccatgtgagaaggactgggcaggggcaggggaacgtgctaaaagtacaaacttgtcaggctcagtggctcgtgcctgtaatcccagcactttggaagggtgaggcaggtggactgcttgagctcaggagtttgagaccagcctgggcaacacagcgaaaccccgtctctaccaaaaatcaaaaaaaaaattagccaggtgtggtggcgtgcacctgtggtcccagctattcagggggctgaggtgggaggatcacttgatcctaagaggcagaggttgcagtgagccgagatcatgccactgcacttcaacctgggtgacagagtaagaccccgtcttgaagaaaaaagaaaatacagactcacaggctgatttgcaccaggaaactccaggtccagtgggaactgctgctcttgcttgacacatgctacctcttttcttgtt

SEQ ID NO: 17380 - DNA, 583 bp, Homo sapiens
gctgcatatgtaacagatagaaacaggagttgctctggttaaggagggaaagaaaggtcttgtagagggtcaaagaaggtccaagggactgatacaggaccttggaatcaggctttctcagaatgtggtactaggtccacccatgtgagaaggactgggcaggggcaggggaacgtgctaaaagtacaaacttgtcaggctcagtggctcgtgcctgtaatcccagcactttggaagggtgaggcaggtggactgcttgagctcaggagtttgagaccagcctgggcaacacagcgaaaccccgtctctaccaaaaatcaaaaaaaaaattagccaggtgtggtggygtgcacctgtggtcccagctattcagggggctgaggtgggaggatcacttgatcctaagaggcagaggttgcagtgagccgagatcatgccactgcacttcaacctgggtgacagagtaagaccccgtcttgaagaaaaaagaaaatacagactcacaggctgatttgcaccaggaaactccaggtccagtgggaactgctgctcttgcttgacacatgctacctcttttcttgtt

SEQ ID NO: 17381 - DNA, 543 bp, Homo sapiens
tgcgccaccgtactccagcctgggcgacagagtgagactccacctcaaaaaaaaaaaaaaaggccaggcatggtggctcacgcctgtaatcccagcactttaggaggtggaggagggcggatcgcaaggtcaggagatcaagaccatcctggctaacatggtgaaacccgcctctactaaaaatacaaaaaattagccaggcatggtggtgggcgcctgtagtcccagctactcgggaggctgaagcaggagaatggcgtgaacccaggaggtggagcttgcagtgagccgagatcgcgccactgcactccagcctgggcaacagagcgagaytccatctcaaaaaaaaaaaaggagaagaaaaaaagaacagcactctggtgtcaagagcccagggaggcactacctatcatgatgaacaccactcttctcacttcacagacgacagacagcgtcaccaaggtgagtggcctgccaagtgaagtctagagtggatgtgactcaactccttaccctgcaccatgctgcctctgcatgagtccc

SEQ ID NO: 17382 - DNA, 597 bp, Homo sapiens
ggccttaaggacatggaactggactcgtcttccattgaaaagcggtttgcctttggcttcctgcagcagctgctgcgctggatggacatttctcaggagttcattgcccacctgggtacggagaaataccccccgcttatgcccgccccacctgcagacaccagttctgcagaccagactcacctaggacacctgttcatgcactcaatccgtcctccccttatctgatgtttattgagcttctactatgtgccagacactgttctagatgctggggtacagcagtgaagatgacaaatgacccctgctctcctgcaactactcctatgttggattcaggcaattagcatcataaataactaaatcgtttagtgttagaaggtgatcagtgttatgggaagaagaaaacaatagagccaggtagaggggattgggagtgtggagccagttgtamttttattttatttcattttattttatttttattttttattttatttatttatttatttttgagacagagtttcgatcttgctgcccaggctggagtgcagtggcacggtctcggctcactgcaacctctgctttctggtttca

SEQ ID NO: 17383 - DNA, 592 bp, Homo sapiens
cacctactgaatggggaaatgttccaaagcctagggcatcctccacataaatggtatcgtctgacaaagcctgcataccacccagaggcactcttactctgccttttccaccatctcaaacagtgaatagaaagaaactatgcagccattacactgtagctaagagggaggaccaggaggtctcaggtacaatattcgaagcaaagaggatgcctagacagagttggcactcatgaactagatgaaatgtctcagcgtggaagccatktgagcacaaaagacaaagaagagagataggaacgcagcagtcaaggagtccaacctatacaaaaacattactcagggaacagaagaaaattacccacaactgattaaaattagggaaaaatttaatagaaacatgaattcaacaaaattaaaattcaaagatgagatgataaagctacagaacaatatggaaaaagagattagaaacttgggaaacaaaattaaatcccaaatagcattactacagagaaacagaataggcatgactgataatctaattactgacatagagaaaatgatataatatgtaactgacataataaaa

SEQ ID NO: 17384 - DNA, 595 bp, Homo sapiens
tgtggcattgtctgtagtggcaaaggattgaaagtaatttattgcccataggagattagctgaatatacaatggcgtggccacacaatggaatactacacagctgtaaaaaaagaaacaaggaatatctcttgacactgatgtgagatattctggatggatatatggcaaagttaaaaaaaacaaaaaaacaggctggcatggtggctcaggcctgtcatcccagcacttagggaggccgaggcgggcagatcgtttgaggtcacgagtttgagaccagcctggccaacatggtgaaaccccgtctctattaaaaatataaaaattatcctggcatggtggtgcacgcctgcagacccagctactcaggagactgaagcaggagaatcgcttgacccaggaagcagagatttcagtgagccaagatgacaccactgcactccagtctggacaacagagaaaagaagttgatgtaatgaaatactgcaaacgcacacagaagaggatagcrtgaggaatccccagacagccaggtctaaccattgttgtatctgtgcccaaacctcttgtgaatgctggttatgggtttttgggtt

SEQ ID NO: 17385 - DNA, 595 bp, Homo sapiens
tgtggcattgtctgtagtggcaaaggattgaaagtaatttattgcccataggagattagctgaatatacaatggcgtggccacacaatggaatactacacagctgtaaaaaaagaaacaaggaatatctcttgacactgatgtgagatattctggatggatatatggcaaagttaaaaaaaacaaaaaaacaggctggcatggtggctcaggcctgtcatcccagcacttagggaggccgaggcgggcagatcgtttgaggtcacgagtttgagaccagcctggccaacatggtgaaaccccgtctctattaaaaatataaaaattatcctggcatggtggtgcacgcctgcagacccagctactcaggagactgaagcaggagaatcgcttgacccaggaagcagagatttcagtgagccaagatgacaccactgcactccagtctggacaacagagaaaagaagttgatgtaatgaaatactgcaaacgcacacagaagaggatagcgtgaggaatccccagacagccaggtctaaccattgytgtatctgtgcccaaacctcttgtgaatgctggttatgggtttttgggtt

SEQ ID NO: 17386 - DNA, 574 bp, Homo sapiens
ctccagacagactggacactcccgcttcacttgaaactcttcaaacatgccaagctcaccccaggcctttgaacttgtgtttttccttgcctgcaaattcttttacagggttcactgtcccctactacctgtgagtatctatgcaaatggcattttatgacrgaatactttcctaaccacactgtttaaaaatagcaccccactcctggagcaccctaaccctcttcccctacttcattggattttttccaggatagttaacaccctttggacatggtacacagtttactatagtttcatcctcgttccctatccaccccactagtgtgtaagttgatggagccagagaccttttgcttgctgctaaatcctctgcatctagaacagtactgaaacatagtaaaaataatttcatggaaacagacagccccagctatcagccaagtactgctctaagtgctcttcatataccgtatcattgtacttacaagtctacctgatcagaagatgttttagctttgaagcaaaaaacaaataaacaggctggacacagtgcctcatgcctataatccca

SEQ ID NO: 17387 - DNA, 574 bp, Homo sapiens
ctccagacagactggacactcccgcttcacttgaaactcttcaaacatgccaagctcaccccaggcctttgaacttgtgtttttccttgcctgcaaattcttttacagggttcactgtcccctactacctgtgagtatctatgcaaatggcattttatgacagaatactttcctaaccacactgtttaaaaatagcaccccactcctggagcaccctaaccctcttcccctacttcattggattttttccaggatagttaacaccctttggacatggtacacagtttactatagtttcatcctcgttccctatccaccccactagtgtgtaagttgatggagccagagaccttttgcttgctgctaaatcctctgcatctagaacagtactgaaacatagtaaaaataatttcatggaaacagacagccccagctatcagccaagtactgctctaagtgctcttcatataccgtatcattktacttacaagtctacctgatcagaagatgttttagctttgaagcaaaaaacaaataaacaggctggacacagtgcctcatgcctataatccca

SEQ ID NO: 17388 - DNA, 588 bp, Homo sapiens
aagtcctggattctgggagcctgggccctgtatcatttgctgagggcagttaggcatcgtctgctggaagttggggtgctctttggtggcccatgcacagaagggaattgtcaggctggagtgagataaagtgattgtccacctggtactcactggcccataatctatccctgggaagctgtgttcagggctggaaggtcagctytattccctggtcacccatgctcttactgcttctgaacataaggaacaaacagctcaccttggccggaggtataacatgttcatggaggtgaaccaaatagttagaattatatacaatcatggcttggccccttgatgttcattcaagtcaggtagagggtgctctaggagctcacaggtagtgggggatgaaaagtggatgtgggtgagagagggttgaacacacacacgccacactcaggtggtgggctgggccagtgagcaccttaggctggtgcctaaggaagatgtgggaggggctgaggcagggagtggcctgggaggatgatggcttcagggagagctcctgtccacactgcagggatatttgctgtgctgccctga

SEQ ID NO: 17389 - DNA, 588 bp, Homo sapiens
aagtcctggattctgggagcctgggccctgtatcatttgctgagggcagttaggcatcgtctgctggaagttggggtgctctttggtggcccatgcacagaagggaattgtcaggctggagtgagataaagtgattgtccacctggtactcactggcccataatctatccctgggaagctgtgttcagggctggaaggtcagctttattccctggtcacccatgctcttactgctyctgaacataaggaacaaacagctcaccttggccggaggtataacatgttcatggaggtgaaccaaatagttagaattatatacaatcatggcttggccccttgatgttcattcaagtcaggtagagggtgctctaggagctcacaggtagtgggggatgaaaagtggatgtgggtgagagagggttgaacacacacacgccacactcaggtggtgggctgggccagtgagcaccttaggctggtgcctaaggaagatgtgggaggggctgaggcagggagtggcctgggaggatgatggcttcagggagagctcctgtccacactgcagggatatttgctgtgctgccctga

SEQ ID NO: 17390 - DNA, 588 bp, Homo sapiens
aagtcctggattctgggagcctgggccctgtatcatttgctgagggcagttaggcatcgtctgctggaagttggggtgctctttggtggcccatgcacagaagggaattgtcaggctggagtgagataaagtgattgtccacctggtactcactggcccataatctatccctgggaagctgtgttcagggctggaaggtcagctttattccctggtcacccatgctcttactgcttctgaacataaggaacaaacagctcaccttggccggaggtataacatgttcatggaggtgaaccaaatagttagaattatatacaatcatggcttggccccttgatgttcattcaagtcaggtagagggtgctctaggagctcacaggtagtgggggatgaaaagtggatgtgggtgagagagggttgaacacacacacrccacactcaggtggtgggctgggccagtgagcaccttaggctggtgcctaaggaagatgtgggaggggctgaggcagggagtggcctgggaggatgatggcttcagggagagctcctgtccacactgcagggatatttgctgtgctgccctga

SEQ ID NO: 17391 - DNA, 587 bp, Homo sapiens
attttttaaattttgttttgcatactttctataaatattatcttcataatcctcttgtatattagtctgttttcatgctgctgataaagacatacctgagactgggcaatttacaaaagaaagaggtttattggtcacagtttcatgtgactgaggagtcatcacaatcatggtggaaagtgaaaggcatgtctcacatggtggcagacaaaagaaagagcttgcgcaggaaaactgccttataaagccttctgctttcatgagacttattctctatcatgagaacagcacagaaaacatctgcccccatgattcaattacctcctactgcatccctcccacaacatatgggaattaaagatgagacttgggttgggacatggccaaaccacatcatcttaaaaatggartttacataaaacatctaaaacttaaaaatatattttaatctcatgacaacttcagttgaatataaaaattatacctctgtatttttcagtttattaatataaaaattattttgtgtattaacatttatgcagatttttattgttttaaatattctacagaagagctttaagggtttt

SEQ ID NO: 17392 - DNA, 1942 bp, Homo sapiens
ccgtttaatacatttgttaaattatctcttctattttaagaaaagcatagaaaataacccttttcatatagattttccaatgttagctgtagaaatgtataggagtattsttttaaatctgtcccatatttgtgccctcttgtttatgtatggatttttgtagttttagttttctgaattctgaattttgcttgattacctttaaaaaaaactttgactatttttagagtttacccccaaaactagctcctgcataaatttatcattttttcaattctctaatatattaatttctagtgttatctttgtgatttatcatacatattatcatcacatctttgcaggagaggaggcagtttgtttttgaaaaatttattttcttttttatagttcaataattaacatatttgagactatgagtatgcttctaaagacatgtttttctgccttaagttttcacatgtttttattctaattggcattaatatctaagactgtaactaggcatattactttgattctggaactacttagtatactgtttttatcttctttcttttcaatttaaaaatgagtctatattttgtaagtattttattattacttgttttttattatagagttacgtcagtcccatcttctgtaataaatctgtcttctcgtttgccaatattatgacatattccttttacttagctgttgttatgatgtttattagtaaaatcatatcctgagttttcagagttatttcttgtgtgatatattctgagaagagagatatccagcttatgatattagtatctaaataaaaatactcaggagaaaatttaggatttttaaacagcttccgaatttagaggccaaactctaaataagatcccataaggttccacttgtttaaaaagaaatcttttgctctccttactgcaaaagtaaaccataattcaattaacttttcaaatatcaagccatttggactagaattaataatgtggtatcataaggataaataagttctgacaagagttctgttctttaatccttcaaaacaagtaaataatcaaaaaggggagatgaagcttagcagaggctgacaggaatttttgaacatatcacaaacacaaggaaagtctatagtgtttcaagttactctctattgatttctcttttgtcctttccatcaaagaaggctcatgttcattacgatgtgctctagacttggaataggatgtccctgacagctgctagcagggatcctgggatgtgtcagaagatatccagtttcctttgaaactggacattctgaagagaagctgctgttgtttttgatattaaaagcacaaatgcaaaaatggtccaaatttcttaaggtcttactagtgtggtaggatatatctgtgagatgagtctcaaaacatgcatggctttggccatacagcatgattttagccttcatcagattaatatgtgaaaagccaggccctcagttattttctctggattgccaaaaatcctatattatcttatatttgtttccaagtagtcacaactgacctttcttctcacattttagcatccagtttccactctatttcccatcactatacttgtatttgtatttatatttagacacttggtccatatgtgaacattccttttattatttatgaatgcatctcctcataactagataatgtcagttcttgctctaatattcattaccattttcaggagcctccatgtctttgttttgtagcagcagggaggatgtttaactattcagaatcacagaaaaactccattcaaatagaaccaagagaccatgattttgtccatcatcttacaggtacaacgtcagtgcatgacattcataagttcacacacagtttgtctgtaaaagatacaggactggaatctaagtttcctgaatttagttctgtgt

SEQ ID NO: 17393 - DNA, 726 bp, Homo sapiens
ttggctgcatttccagtaactttgtctgtttttcaataaaagattccatcgcagacatggatagagtctcagactcctaagaaatagtcagtggcatatcacatatggaatgctgacagtaggggagcaaatgcagcactctaggtttccctgcctctcccctgcataagtaccttgggtataaaacccaactgatgctatgactcctttaggaaagattttattttttaccgaagttgcaagtaaaacaggcctgccctgggattatcatttctgcacccatttttggtcatccatttttttttccaggaactagctttctttcttatcttgtcatccattatccgaaacccaccatggttgagaagccaacctgccaacccagaactggtaggaattccaaaccacttagagaaaatacttttagcataaaagctggagatccaaacrttgattaagtcatttagcaggacatttctgacttcagagaatatctcaactacctgtaactgcaggaccaacatctcagatatttttgcctcacattctctgggttttggttcttaccacattgccttcctggagacaataaagaatcttgtcttgtgcttcagtcacacttagtgctggagaaattttactggatgagaacctcagcctagacctggtacagaaacaaagagcagaaacaggttgtaatttatggccttgagcctcacactaagg

SEQ ID NO: 17394 - DNA, 726 bp, Homo sapiens
ttggctgcatttccagtaactttgtctgtttttcaataaaagattccatcgcagacatggatagagtctcagactcctaagaaatagtcagtggcatatcacatatggaatgctgacagtaggggagcaaatgcagcactctaggtttccctgcctctcccctgcataagtaccttgggtataaaacccaactgatgctatgactcctttaggaaagattttattttttaccgaagttgcaagtaaaacaggcctgccctgggattatcatttctgcacccatttttggtcatccatttttttttccaggaactagctttctttcttatcttgtcatccattatccgaaacccaccatggttgagaagccaacctgccaacccagaactggtaggaattccaaaccacttagagaaaatacttttagcataaaagctggagatccaaacgttgattaagtcatttagcaggacatttctgacttyagagaatatctcaactacctgtaactgcaggaccaacatctcagatatttttgcctcacattctctgggttttggttcttaccacattgccttcctggagacaataaagaatcttgtcttgtgcttcagtcacacttagtgctggagaaattttactggatgagaacctcagcctagacctggtacagaaacaaagagcagaaacaggttgtaatttatggccttgagcctcacactaagg

SEQ ID NO: 17395 - DNA, 726 bp, Homo sapiens
ttggctgcatttccagtaactttgtctgtttttcaataaaagattccatcgcagacatggatagagtctcagactcctaagaaatagtcagtggcatatcacatatggaatgctgacagtaggggagcaaatgcagcactctaggtttccctgcctctcccctgcataagtaccttgggtataaaacccaactgatgctatgactcctttaggaaagattttattttttaccgaagttgcaagtaaaacaggcctgccctgggattatcatttctgcacccatttttggtcatccatttttttttccaggaactagctttctttcttatcttgtcatccattatccgaaacccaccatggttgagaagccaacctgccaacccagaactggtaggaattccaaaccacttagagaaaatacttttagcataaaagctggagatccaaacgttgattaagtcatttagcaggacatttctgacttcagagaatatctcaactrcctgtaactgcaggaccaacatctcagatatttttgcctcacattctctgggttttggttcttaccacattgccttcctggagacaataaagaatcttgtcttgtgcttcagtcacacttagtgctggagaaattttactggatgagaacctcagcctagacctggtacagaaacaaagagcagaaacaggttgtaatttatggccttgagcctcacactaagg

SEQ ID NO: 17396 - DNA, 793 bp, Homo sapiens
ggtcatcttccatgacaaggcaaatgtttaatgtgaaagatgtggagccagatctaggaaactctagggtggagaagaacatggaagtcaaaaaaagaagaggcaagtgtagaggccacatagaacccagcgtcaatccatcccactcccatttggctctgggtttgaaatttctcatattgagagtttgccaggatggccccagtttgcagtctaaatgttccctgcacgttggagtgttcccacatgaacactaggccatggtgtagactgcttgtgcaattaaaagaatgcagggatgcagtttaaagcagcttctgtgtcatgtgtcttcacttttatgcaggtgaagttgcaggatgacatacaccactcaccagattgtttcttcacccctctctgaccttattactgctcacaaactctaacccaaaatgaaatcctaagatgatacaggagtgccccctcacaacatggagcacctgctcatctgggaactgaatttgaggtaaatgcaagggcctctgtggataagactgctagtgtctctccctgggttggctgcaggacaatgaaacattgggagatgtctgctcttgggtgtggtgtgctcctcttctttctaaaagagtgtcttttttttttttttttttttttttttgcagggggaggtgatttggaacctggtgcatctccakcagcctcccaattcactgcaaattaatgatccacagaaaagtaaagaacatggaaccacagcctaagcacacagacaggccatggaaaagttagg

SEQ ID NO: 17397 - DNA, 517 bp, Homo sapiens
tgggatacagcattgatcaatggaaaacctcatttaatatttcccgctgctgmctggcttttggtagttctattttgtcttgatttgctccatgtgggattgatgagaaaaaatatgacttcacttgtatattttagtaaatatttattgaacacttattatatgcctggtggtttctaggtactagacacacaatggttgtattagtccattcttgcattgctacaaagaaatacctgagtctaggtaatttataaatagaagaaatttaattggctcacagttccacaggctgtacagaaagcatgattctggcatctgcttggcttctggggaggtctcaggaaacttaaaatcatggtggaaggcaaaggggaagcgggctcgtcttacatggctggagcagaaggaaaagagagaggaaggaggtgccatcactttcaaacaaccagatctcatgatatctcaccgactcactatcatgagaaaagaactcaatggatggtgcttaaccatt

SEQ ID NO: 17398 - DNA, 517 bp, Homo sapiens
tgggatacagcattgatcaatggaaaacctcatttaatatttcccgctgctgcctggcttttggtagttctattttgtcttgatttgctccatgtgggattgatgagaaaaaatatgacttcacttgtatattttagtaaatatttattgaacacttattatatgcctggtggtttctaggtactagacacacaatggttgtattagtccattcttgcattgctacaaagaaatacctgagtctaggtaatttataaatagaagaaatttaattggctcacagttccrcaggctgtacagaaagcatgattctggcatctgcttggcttctggggaggtctcaggaaacttaaaatcatggtggaaggcaaaggggaagcgggctcgtcttacatggctggagcagaaggaaaagagagaggaaggaggtgccatcactttcaaacaaccagatctcatgatatctcaccgactcactatcatgagaaaagaactcaatggatggtgcttaaccatt

SEQ ID NO: 17399 - DNA, 562 bp, Homo sapiens
ctaagcatcttttcagaaagcatttatgttgataatttacaacaatatggatgaaactcaaatgcattatgctaattgaaaagaagccagattcaaaatgctgcgtgatgccatttatagaacattctggaacagtcagaatgctcgtggttgcaaggagttgagaggaggtggagggtctgactgcgcagaagcagcatgagggwactcttaggggcagtagaactggttgtggtgactcaaatctatgcatttgtcaaaactcacaaaattgcccatcaaaagggtgagatttacagtaagtacattaaaacaactttttaaaaaatgaaattttgaaaagatcatgaccattggacagatctgtgataatattttaatgctacctgttattacctgtaagatcttggagaagaaatgtaaccttctgaggttcagtttcctcttctgtaaaatagggataatacttctccgttgttcagaattcttttagttgcaaatgacagacactcaactccaatagctttaataaaaaaaaaaaaaaagagagtctattggctca

SEQ ID NO: 17400 - DNA, 562 bp, Homo sapiens
ctaagcatcttttcagaaagcatttatgttgataatttacaacaatatggatgaaactcaaatgcattatgctaattgaaaagaagccagattcaaaatgctgcgtgatgccatttatagaacattctggaacagtcagaatgctcgtggttgcaaggagttgagaggaggtggagggtctgactgcgcagaagcagcatgagggtactcttaggggcagtagaactggttgtggtgactcaaatctatgcatttgtcaaaactcacaaaattgcccatcaaaagggtgagatttacagtawgtacattaaaacaactttttaaaaaatgaaattttgaaaagatcatgaccattggacagatctgtgataatattttaatgctacctgttattacctgtaagatcttggagaagaaatgtaaccttctgaggttcagtttcctcttctgtaaaatagggataatacttctccgttgttcagaattcttttagttgcaaatgacagacactcaactccaatagctttaataaaaaaaaaaaaaaagagagtctattggctca

SEQ ID NO: 17401 - DNA, 560 bp, Homo sapiens
tggggtttcaccatgttagccaggatggtctccatctcctgacctcrtgatccacccgccttggcctcccaaagtgctaggattacaggcgtgagccattgcgcccggtcctggctttcatattttttgtagagatggggtcttgctatgctgcccaggctggtcttgaactcctgggctcaagcaatcctcccacctcagcctcctaaattgctggcattacaggcgtgagccactgcacctgactctcaggatacagtcttaattcacgttttgatgtttctaatattagggtcttacaaatggtgacatcttagattttaggaaatttagtaggagttctagattgagagtcttagatactgtattcaggtgtccacgttcagctaccgactagtttgtgcctttggggaagtcgctttacctccttgtacctcagggagttagttggtctgagttttggttccgattctgccactgaacagctgtatggctttgtagtcctctgggcctcagtttcctcatctgaaagtgaggggaggggtcactggttttctaac

SEQ ID NO: 17402 - DNA, 591 bp, Homo sapiens
aattggcccatcttccttgattgtcactagtaaggcattgttcattttcaytgatatgggtaggagtaggaaggaggaagttatccaaatatgtccaagcagtcaccttagcttaacattactttttaatttttaaaaacaatgattaacattgttttgaatttgtaaattatcacagtttcatcaaaatattaatgttcttgaatgtagtaacaaaaacaaggtcacaattcaaaagtactttaaatctagctagttgtaagaaggaaaaaactttctagttttaaaataaactattcaccaccttcatttttttatcagtataaacaaagttacaactaagacatatgtgctactggctgtcagaccatgacaagaagcaggaataaagttactctttcctagtagttatattactttaaggcttaacgtgggtttaaaagtattatctgaaacatgagaaaaactgctcttacagtatcaattttctagtaaagatagtccctttggggttcttccttggtcgccaaaataatgagggaaataacccacttaaatttccttcgtccgtgcacacacacacacacagac

SEQ ID NO: 17403 - DNA, 591 bp, Homo sapiens
aattggcccatcttccttgattgtcactagtaaggcattgttcattttcactgatatgggtaggagtaggaaggaggaagttatccaaatatgtccaagcagtcaccttagcttaacattactttttaatttttaaaaacaatgattaacattgttttgaatttgtaaattatcayagtttcatcaaaatattaatgttcttgaatgtagtaacaaaaacaaggtcacaattcaaaagtactttaaatctagctagttgtaagaaggaaaaaactttctagttttaaaataaactattcaccaccttcatttttttatcagtataaacaaagttacaactaagacatatgtgctactggctgtcagaccatgacaagaagcaggaataaagttactctttcctagtagttatattactttaaggcttaacgtgggtttaaaagtattatctgaaacatgagaaaaactgctcttacagtatcaattttctagtaaagatagtccctttggggttcttccttggtcgccaaaataatgagggaaataacccacttaaatttccttcgtccgtgcacacacacacacacagac

SEQ ID NO: 17404 - DNA, 617 bp, Homo sapiens
aaaaagggatattttagaaaattattttggaggacatgactgcttactgttctagctattttcttagggtttgtagatctttagttgagtttcccaccactaatgtgactcactgactctgtctgtaggcttttctctcttgactgaatttcttagcatgcttgttaatttcatctcaacttaactggaccttggggtattcagattacacattgttactgggtgtatctgtttcttgctgagaatagcacttggatcagtacattcagtaaagcagattgttctccccaatgtggatgggcattatccaatctgttgagggcctgaatagaaaaagagatggaagaaggaggaattctctccttttttctgccttactacttgatctggaacatctcatctcgtcttgcttttgractggaatttacaccattggcctggttcttaggtctttggacttgaattgcaatatcggctttcttgggtctcctggttgcagatggcagactgtggaacttctctgcctccataatcatttgagcccattcctcacaatacatctctctctcttcctaaatatcaacatctatatacagttattcccttttacccatggg

SEQ ID NO: 17405 - DNA, 617 bp, Homo sapiens
aaaaagggatattttagaaaattattttggaggacatgactgcttactgttctagctattttcttagggtttgtagatctttagttgagtttcccaccactaatgtgactcactgactctgtctgtaggcttttctctcttgactgaatttcttagcatgcttgttaatttcatctcaacttaactggaccttggggtattcagattacacattgttactgggtgtatctgtttcttgctgagaatagcacttggatcagtacattcagtaaagcagattgttctccccaatgtggatgggcattatccaatctgttgagggcctgaatagaaaaagagatggaagaaggaggaattctctccttttttctgccttactacttgatctggaacatctcatctcgtcttgcttttggactggaatttacaccattggcctggttcttaggtctttggacttgaattgcaatatcggctttcttgggtctcctggttgcagatggcagactgtggaacttctctgcctccrtaatcatttgagcccattcctcacaatacatctctctctcttcctaaatatcaacatctatatacagttattcccttttacccatggg

SEQ ID NO: 17406 - DNA, 588 bp, Homo sapiens
gatctcaccttccctaagaaattcccctgactccccatatgcaatgtttatctccatcatattagtaggcagaggaagagcagcctgctcgctgggcagttccctcagccatcatcaacaccctttgtgggcagggaccatcttgtccacctttgcaaactcagcatagcacagcgatcagcattttgggccccagaaaggattttcaaacaaatgaatgaagatcataaattttctgaggattaatcttctcagggtcttcctctctagttcataaagatacttatctacttctaggacaatagcttatagatgggttttgggggttcaagaactttcagaagttatgtaaaaatgttgtccatgtgtattttctagggtctgcttagctttccttgaattctccagtcttactaaaatttaagatccaccactttaggaataatcaataattttttgaccttcataataccagagagttcttctagcttcttcgaccttgtcaaatacaagagrgcactcaataaatatttgagcagatactactatattactaagacctgtgataattttcaacaatagagtaaa

SEQ ID NO: 17407 - DNA, 549 bp, Homo sapiens
ctagacactggatggaaaatggcacccaaagccatcattaacagtggaaaaaartaacttgcaacatgtattctattgaccatgctgttattacatttgcatagatgggacagccaatatacatgaatacaaataaatattcttatctaacatggttgaaagtaaagtactctattttatcaaatatgggttaccagctttccaagcatgagtaaatgacaaattttagaacataagtgttccttggactcaggagaacacagcactacctaataccacctatttcatagagacattttgttacttaaacaatatgttccattagaaactatattaaagtttctgccacatagtggatataaaagaaatgatagctaagacttttatcctgagaatcatcattgtgaatattacttattgtgttacaatttttcaagctggctgacagtttcagttgactatgctgaataacccagccttttctacacgtatttttaaccctgactgtggtatttggagatgactaactttggaaaattaaaaacgtgg

SEQ ID NO: 17408 - DNA, 548 bp, Homo sapiens
ttacagaatgggtttgttaatttccctgttattacaggatgttttcgcagcttttcaatttggtttccaccagccattcacatgacccagagtaggtctgagatggcccaggaaagaggatgatttaatgccttaaatgattcttgatctgcccattggagaaattattgaaaccacaatagggcttgtcatatggtcttcattctgggcagaaaattttcagtttcagccagtttggtaaaatttagactgaaataggacagttggttttctaagacacagaaaaattaacaaaatcagtaattgatcaaaattgcctgttctgtggggaaaaacttggggacttttaaaattttcactgtttaygtttagaaaaacaatactggtctcttactgacaatgttttatgtgtggtagatgcctagtaaatggtggttggatggatgactggaggagtgagtatattcatgagttattatccattttcctaactcttgggaccattttgaatgtcccagttgcagaaaagatgtccctcccatgagcat

SEQ ID NO: 17409 - DNA, 629 bp, Homo sapiens
gtcaatttggcatgtaattgtttgaaagaacttacaacagagttctagcttaacataataaatttgaatgtagcataggagatgacttgagagaaagaaatcttgcaataattttaaatggaattataccacctttcttgatagaaaatacttcttcatttgcatttttatcagtatggagtcttagcgctattcttcattgcacacaccatgccatccagaccaatttgcaaggctagtcacattaccactggtggcagtatttattgattgttctcctattgcttactaataaaacaaaagggtaactttcatacaaatggcatttggyactatattagtttatctgtatacctctctgcttacaaataacaacagatacaagtggaagtaatggtgtctctctattattgcataaaaattaacattagcttggattcatgtttggcacattttttttggtttggttcctgacattggttcctggtttttcagatgtttatcttttggtatatatgtaacattgtatttgtgacagctatataccaggatgtacacctgtttattgcctgccaccaacacaccattagattgcatgatattccatttcaatttcttccatttcagtt

SEQ ID NO: 17410 - DNA, 610 bp, Homo sapiens
agtccaaaagttctgttttgctatggcattaagctcaaagcccaggctttccagctgtgataatggagtacactccacataaaatctgattatgatttgttttgctctagtcaagcatgagcttaaaagattagtttttcatgctccccaaatatacagcagtagaacaggatcagaatgactgcattcattaaacacttccatatgaagagaatcatagaatagacatggcagacaccaatgtgattcacaacagttctgaaatctcaccaggtaaaggtggtgaggaccctctaccctgggagatgagaatgggataggaacgttccttgaataggccctgatcttgctctgtagcagaggcacctcaaatccattgtttttttcccatggtctttggctctcccctgtttgtgaagtctgcagtgggcattaaataaaagtgcatcatcattacaggctgtgtagctttttgtgccccatgcttataaacagaagagaaggaaggaccattttaagtctctcaaagtctcagacatttataatttcyggcttatattttctctagatgtaaagtaatattctaggacttttaatctatttgattcag

SEQ ID NO: 17411 - DNA, 591 bp, Homo sapiens
attgggtatatgtaccgcttttctttttatgtttaattttttttggttttttgagacagagtttcgctcgcgtcgcccaggctggagtgcagtggcgtgatttcgagtcactacaacctctgcctcccaggttgaagtgattctcctgcctcacctgagattagaggcatgtaccggcatgtccggctaattttgtgyttctagtagagatggggtttcaccatgttggccaggctggtcttgaactccaacaattctaattcaactaatttattttatagaaatatttatgtgtgagaaacaatattttcaagagtcaaagatttaaaactgcttaattgtacatcactaagtggctggctaataaattatagtacgttcatccttacggaagaatactttgcagctaaaacagaacgaaagagaggaaactcttcaaaatgttaactgggaatgacgttcaagacttattgttaaataaaacaaattgagaagaagagtcgtttattggtactaaatttgtgtcagtaaaaatggattctatacgtgggatggtttataagtatgtggaaaaattctttgatggttttt

SEQ ID NO: 17412 - DNA, 591 bp, Homo sapiens
attgggtatatgtaccgcttttctttttatgtttaattttttttggttttttgagacagagtttcgctcgcgtcgcccaggctggagtgcagtggcgtgatttcgagtcactacaacctctgcctcccaggttgaagtgattctcctgcctcacctgagattagaggcatgtaccggcatgtccggctaattttgtgtttctagtagagatggggtttcaccatgttggccaggctggtcttgaactccaacaattctaattcaactaatttattttatagaaatatttatgtgtgagaaacaatattttcaagagtcaaagatttaaaactgcttaattgtacatcactaagtggctggctrataaattatagtacgttcatccttacggaagaatactttgcagctaaaacagaacgaaagagaggaaactcttcaaaatgttaactgggaatgacgttcaagacttattgttaaataaaacaaattgagaagaagagtcgtttattggtactaaatttgtgtcagtaaaaatggattctatacgtgggatggtttataagtatgtggaaaaattctttgatggttttt

SEQ ID NO: 17413 - DNA, 1398 bp, Homo sapiens
tgaatagcattcattactttctgatcttataacccacatggtaaataaatcttgcctgggattataatttttctgtgcttctacaatttccctaaatagactcttagcctctcagtgagaaagatcctttgatcttagtcatgtacaatatcttttcagtaggtacaatgtctttagagcaccttatgcagagtaggagtccatggaaagatgatgatggcaataatttgaggtcctatttggaacagaaaaacagttttaaaatacttgtggaaatagttgcatcatataatattttcaagatgtcagggtaaaaatatgcttaaagataaaagttctgtgggcttaattttcaccatttatcatgactgagtagtatctgtttgcctttcatttaaagtcaatttcccttttcaacaaaagggtgaaatacaatgcagttctcagagctagaacaagaawgtagtttaaccgttacaactttgaaagtaaaaagaagaggcactaatggaaaggtagacaaaaggcaaaagaaagagcttataagtagaaaatatgaggttggtctcacacacactcttgtggcacagggtacagatttagttctgtactaagaatcggtaaaagtaggggctaagtagggtctgactttctccattgtgtcaattgagttgggaatgagttggtaatgttgacggctgtccaagaacatcacagaagtacttcaactgttggtaagccttatggctactaaaagtcagagtaattattaatatgagagctattaatatcaatataccagttgatacactagttaccagaatcttgatatttttaccttacatatatatttgtgattcatttagatttaatccaaacaatacaatttgaaaatgttgtatcccaaagcagcaaagaccacatctgataaatccaaacctgttttggaaagcaaaataatggtaaatatgacccccaaactattatataaaacctttttgattttaggcaagtaaaaaataaaattgggtttttaaaaaggattctatctatccagattttgctaataaactatgttgggttttttggtaccatttttatggagagggttaacatttgcttcgtaacattctacagagctttccttccacccatctagcgcagtacttccagaagccaactgggaaattcttttctttaaagcctcataagcactatgggaagtgcttggtatcatcctcaggctcctcccatgggaagtggccatgaggtgatgcacagtcaagaaatgaactcaaactaaaaatttcagcgcattcacttgctgtaccattgggtaaattaattaaactttttcagatttcttctgaaactcttcccacaactggaaaggaatct

SEQ ID NO: 17414 - DNA, 1398 bp, Homo sapiens
tgaatagcattcattactttctgatcttataacccacatggtaaataaatcttgcctgggattataatttttctgtgcttctacaatttccctaaatagactcttagcctctcagtgagaaagatcctttgatcttagtcatgtacaatatcttttcagtaggtacaatgtctttagagcaccttatgcagagtaggagtccatggaaagatgatgatggcaataatttgaggtcctatttggaacagaaaaacagttttaaaatacttgtggaaatagttgcatcatataatattttcaagatgtcagggtaaaaatatgcttaaagataaaagttctgtgggcttaattttcaccatttatcatgactgagtagtatctgtttgcctttcatttaaagtcaatttcccttttcaacaaaagggtgaaatacaatgcagttctcagagctagaacaagaaagtagtttaaccsttacaactttgaaagtaaaaagaagaggcactaatggaaaggtagacaaaaggcaaaagaaagagcttataagtagaaaatatgaggttggtctcacacacactcttgtggcacagggtacagatttagttctgtactaagaatcggtaaaagtaggggctaagtagggtctgactttctccattgtgtcaattgagttgggaatgagttggtaatgttgacggctgtccaagaacatcacagaagtacttcaactgttggtaagccttatggctactaaaagtcagagtaattattaatatgagagctattaatatcaatataccagttgatacactagttaccagaatcttgatatttttaccttacatatatatttgtgattcatttagatttaatccaaacaatacaatttgaaaatgttgtatcccaaagcagcaaagaccacatctgataaatccaaacctgttttggaaagcaaaataatggtaaatatgacccccaaactattatataaaacctttttgattttaggcaagtaaaaaataaaattgggtttttaaaaaggattctatctatccagattttgctaataaactatgttgggttttttggtaccatttttatggagagggttaacatttgcttcgtaacattctacagagctttccttccacccatctagcgcagtacttccagaagccaactgggaaattcttttctttaaagcctcataagcactatgggaagtgcttggtatcatcctcaggctcctcccatgggaagtggccatgaggtgatgcacagtcaagaaatgaactcaaactaaaaatttcagcgcattcacttgctgtaccattgggtaaattaattaaactttttcagatttcttctgaaactcttcccacaactggaaaggaatct

SEQ ID NO: 17415 - DNA, 1398 bp, Homo sapiens
tgaatagcattcattactttctgatcttataacccacatggtaaataaatcttgcctgggattataatttttctgtgcttctacaatttccctaaatagactcttagcctctcagtgagaaagatcctttgatcttagtcatgtacaatatcttttcagtaggtacaatgtctttagagcaccttatgcagagtaggagtccatggaaagatgatgatggcaataatttgaggtcctatttggaacagaaaaacagttttaaaatacttgtggaaatagttgcatcatataatattttcaagatgtcagggtaaaaatatgcttaaagataaaagttctgtgggcttaattttcaccatttatcatgactgagtagtatctgtttgcctttcatttaaagtcaatttcccttttcaacaaaagggtgaaatacaatgcagttctcagagctagaacaagaaagtagtttaaccgttacaactttgaaagtaaaaagaagaggcactaatggaaaggtagacaaaaggcaaaagaaagagcttataagtagaaaatatgaggttggtctcacacacactcttgtggcacagggtacagatttagttctgtactaagaatcggtaaaagtaggggctaagtagggtctgactttctccattgtgtcaattgagttgggaatgagttggtaatgttgacggctgtccaagaacatcacagaagtacttcaactgttggtaagccttatggctactaaaagtcagagtaattattaatatgagagctattaatatcaatataccagttgatacactagttaccagaatcttgatatttttaccttacatatatatttgtgattcatttagatttaatccaaacaatacaatttgaaaatgttgtatcccaaagcagcaaagaccacatctgataaatccaaacctgttttggaaagcaaaataatggtaaatatgacccccaaactattatataaaacctttttgattttaggcaagtaaaaaataaaattgggtttttaaaaaggattctatctatccagattttgctaataaactatgttgggttttttggtaccatttttatggagagggttaacatttgcttcgtaacattctacagagctttccttccacccatctagcgcagtacttccagaagccaactgggaaattcttttctttaaagcctcataagcactatgggaagtgcttggtatcatcctcaggctcctcccatgggaagtggccatgaggtgatgcacagtcaagaaatgaactcaaactaaaaatttcagcgcattcacttgctgtaccattgggtaaattaattaaacyttttcagatttcttctgaaactcttcccacaactggaaaggaatct

SEQ ID NO: 17416 - DNA, 546 bp, Homo sapiens
gcatcttgaagtgaaaagaaacgtcgtggaaatgagtcggttgatcactgtgactgacgtacacacgagtggaatccacggcctgatgtttttgttctgtggggtttcgcgttacaggcttatatttaccgtcctgtgctaggctggaagctccctgacggcactatttcctctccgcagggcccagaatgcaacaggtctttgaggattrttgaggaagttgctcaacacagaagcttcctaagtcagtctaaattgtgttttaagttattacgtagtagccaatgggcagaaatttttgaatttaaaatgctcagcttcatctacgtggaagccattgcctgctctagtttggtcatttgatcgccgaaacagccccagactttcagcctgtttaggcagctggaacttgttctggaaaaggaaagatgaagatagttctgatgtgctaagaatcttagtgcctagaacttgttctggaaaaggaaagatgaagatatttctgatgcaccaagaatcttggtgcctagcatttatatttttgga

SEQ ID NO: 17417 - DNA, 546 bp, Homo sapiens
gcatcttgaagtgaaaagaaacgtcgtggaaatgagtcggttgatcactgtgactgacgtacacacgagtggaatccacggcctgatgtttttgttctgtggggtttcgcgttacaggcttatatttaccgtcctgtgctaggctggaagctccctgacggcactatttcctctccgcagggcccagaatgcaacaggtctttgaggattattgaggaagttgctcaacacagaagcttcctaagtcagtctaaattgtgttttaagttattacgtagtagccaatgggcagaaatttttgaatttaaaatgctcagcttcatctacgtggaagccattgcctgctctagtttggtcatttgatcgccgaaacagccccagactttcagcctgtttaggcagctggaacttgttctggaaaaggaaagatgaagatagttctgatgtgctaagaatcttagtgcctagaacttgttctggaaaaggaaagatgaagatakttctgatgcaccaagaatcttggtgcctagcatttatatttttgga

SEQ ID NO: 17418 - DNA, 582 bp, Homo sapiens
ggaattcatagcagccacgaacatccgagcaaaagaattcaagcggaggttttaagcagagaaatgacatatgtcctgctttaacaggacacctggccaatggtgtggagatatgtcatgccagcctcctcctgttttttgttgacaaccctcgtgacctttttccctccccactctccctttccactctgaccaagagtcaggactaaaccctaccccctgggcactgccctctgcacatgtgttaagaaggtacacagagcatgtgctgagatggtgcacacagcgggtctcagggagagagtgcccttatctggcatctgcccagccccaaagactcggttttccataattgggatggccacttgaatagaggaaggtagaaggaagattgcaggagagtctgaaagagcttcctgcctggatgcctcatcactgtcctctggatccaatgtcctgctggttaatggtggcagtgctagcactgtgaatgggaggcggggaggawctctggattcttcttattcccctggttggccctttctggagctgctgtgagtaccaccccaggggggcaccatt

SEQ ID NO: 17419 - DNA, 607 bp, Homo sapiens
tgactttctaatatctgttcccagtggcctgacccctaagctcttgctttgccttccctttttatctttattccttttccctagaccagccatccaaaggggtatggaatcttccagtgacaacatccctcgatcccagggtcacctcaaatggttaattcagtgggcgatgtttttaatgaagggcatagggtgtcgtctgcattgtaccatccaaaggtgtgagtagggmcaaatggagccttgggagactttttatcctggaaagtctatgaattcatgaaatccacattactgtcattacagggccaccacaatgggcaaaagttcctcatggggagaccgcagtgttgtgtgcagtcccaatagtgtgataccaccagggggtgctgcccagctggtctctgccccaattctcagcaaggctgaggaaggcagaagtgagagcccttggaagacaggtttgacccctaggctggtggggcgtgggcagccagcctggacctggaaggtctgcaacctggcaggctgacaatggcaatagcagggactccacatcaatcggcctctttacaatttgtcgcctgttcccacacacaccattcca

SEQ ID NO: 17420 - DNA, 517 bp, Homo sapiens
caagatgggcagctttttggagagtagtctgttgaggccaaagttgtggatccatttcctctctaggttatatttagatttcatagaaaatgctgatttacctgtccacagctatggtgctgacccagccaactctctttgcaagtttatgtcgttagttgctggagaaacagcatggaagtgcaaatccatcacttcttctggcaaaatagttgtaaccacagattttctgtagcattgtttttatttgcaattgaagctgtttgatcagatagagaagtgaatactttctcccctctttttagcccatgaattgcattttggtttttgtttgaataaatcttttctgtaactggaaatccctctggcggtagaatcagaaatgctaatttctcactcaygtgaaccaactgtcaccaaatctttacttattcactcatgttttgggaataaactttattgaaatatacatacagagaaatacacacattgtaaatgtatagctcaatacattttc

SEQ ID NO: 17421 - DNA, 2434 bp, Homo sapiens
tgcatagctgtagccctcctacaaggatcgtaggtgggcaaaggtagagtgagccaggccccacagtatggaaaatggctgtgatggttctgcctttctgaggtctggcttccagccttttccatgggaccctgccaagtcaatacttcgtagactgcaagtcagttcaaagagaggccagtcttggcttctgtgtagctggacttaagtctgtggcagcatgtgagttgttatcaggacctctgctgttgaggaatgcagagaaaggagtttttttttcctttccctccttaagagaatatactgtaggtacaattatggggacaaatcaacatctaccaagttgtgtagaaaaacaaattatgggccaggcatggtggctcacacctgtaatcccagcactttgggaggccgaggtgggtggatcacctgaggtcgggagtttgacaccagcctggccaacatggtgaaaccccatctctactaaagatacaaaaattagccgggcgtggtggcacatacctgtaatcccagctactggggaggctgaggcaggagaattgcttgaacccaggaggcagaggttgcagtgagccaagatcatgccattgcacttcagcctgggtgacagagcgagactcgatgtctgaaaaaaaaagaaaaaaaattatgttttacttttctgtttcttaaacatgaatttccttgcatactttcataaaaattattttaaatctcttctaaaaatacctagttatagcagtgagaggattcagcagttgctgaatttattattggagatgatgtagctcgtgtgtgtgtaggaatactcagtggcagtctgtttttcttggtgctttttcaagtcttgttaatcttcttcctgttttcctgagaggagctgtctaaaatatacttatcaaataactaaactctaaatatgattggagggaggaattctttcttattttgtttttatacttattttgtattgtattgtatttatactttatacatatgtatatatacactttaatatatgtaatgacattaagattacttgtttttaaatgcagtcatttttattgatttgtattcctcctgtctttcagctcctgatgataattcattattgctgctgcgggcggagttatatttgaccatgaagaactatgagcaagctctccaagatgccagtgcagcttgtcagaatgaacctctcttgattaaggtatttgtatttgttagctttggagataatcaatgtgaagtttatatgattttcttaaaaacaaaagtaagattattgtgatcaggtacctatagacaaagtatgtttccctcacattactgtagcctacgtttagcaatccacctcacactaaagcaacctaatttaaaagactaaatctccaactgatttagctgagaaacactaatttctattacacttaatagatatttagctgaataatatgctctctacattgaaaaaatatataaataaaatcatcaaattttataaagttgtaagtgaagaaaaaatatttaaaattataatgtaaataggaagatcacataatgatcatgattagctgttgggtcctaatatgcatatgaacaaatcaatgctattggtgaaagagttaacattttgtgtacattttacactaattttagtctctgtgttttgtttggaaaggtttactatttctctcatgacaaaaaacgaactttgcggatctaataatgataacttaagttgtacttaaagaagtttaagaagccaaagaataaaagccttttcatgaatctttgaattttaaagttttaaagaacttgaaattaacagctatagcatgctcttttagtcagttaataattaaaaatatttgctatattactttatatcaactttgttttataaacattaaagagacattaagccaggttagtagacaagcactgggaagcctgcccttttccctcccatcttttatttttttattttattttttgagacggagtgtctctctgtcccctaggctaggcaattctcctgcctcagcctcccgcatagctgggactacaggtgcgtgctaccacacccagctaattttttgtattttttagtagagacaggktttcactgtgttagccaggatggtctcgatctcctgacctcatgatctgcctgcctcagcctcccaaagtgctgggattacaggcgtgagccaccacgcccggcctccctcccatcttttaaaacaaatgctttgaggttagcctgagtgtcaagttcaacttagggataagcccaaggatggaagcagatgtttgttggactaagctcagaaatctattttgttgcttgtttgcttccctaaaaaaaaagtttagactccaatttcaaatgccctttctcctatgcctt

SEQ ID NO: 17422 - DNA, 2434 bp, Homo sapiens
tgcatagctgtagccctcctacaaggatcgtaggtgggcaaaggtagagtgagccaggccccacagtatggaaaatggctgtgatggttctgcctttctgaggtctggcttccagccttttccatgggaccctgccaagtcaatacttcgtagactgcaagtcagttcaaagagaggccagtcttggcttctgtgtagctggacttaagtctgtggcagcatgtgagttgttatcaggacctctgctgttgaggaatgcagagaaaggagtttttttttcctttccctccttaagagaatatactgtaggtacaattatggggacaaatcaacatctaccaagttgtgtagaaaaacaaattatgggccaggcatggtggctcacacctgtaatcccagcactttgggaggccgaggtgggtggatcacctgaggtcgggagtttgacaccagcctggccaacatggtgaaaccccatctctactaaagatacaaaaattagccgggcgtggtggcacatacctgtaatcccagctactggggaggctgaggcaggagaattgcttgaacccaggaggcagaggttgcagtgagccaagatcatgccattgcacttcagcctgggtgacagagcgagactcgatgtctgaaaaaaaaagaaaaaaaattatgttttacttttctgtttcttaaacatgaatttccttgcatactttcataaaaattattttaaatctcttctaaaaatacctagttatagcagtgagaggattcagcagttgctgaatttattattggagatgatgtagctcgtgtgtgtgtaggaatactcagtggcagtctgtttttcttggtgctttttcaagtcttgttaatcttcttcctgttttcctgagaggagctgtctaaaatatacttatcaaataactaaactctaaatatgattggagggaggaattctttcttattttgtttttatacttattttgtattgtattgtatttatactttatacatatgtatatatacactttaatatatgtaatgacattaagattacttgtttttaaatgcagtcatttttattgatttgtattcctcctgtctttcagctcctgatgataattcattattgctgctgcgggcggagttatatttgaccatgaagaactatgagcaagctctccaagatgccagtgcagcttgtcagaatgaacctctcttgattaaggtatttgtatttgttagctttggagataatcaatgtgaagtttatatgattttcttaaaaacaaaagtaagattattgtgatcaggtacctatagacaaagtatgtttccctcacattactgtagcctacgtttagcaatccacctcacactaaagcaacctaatttaaaagactaaatctccaactgatttagctgagaaacactaatttctattacacttaatagatatttagctgaataatatgctctctacattgaaaaaatatataaataaaatcatcaaattttataaagttgtaagtgaagaaaaaatatttaaaattataatgtaaataggaagatcacataatgatcatgattagctgttgggtcctaatatgcatatgaacaaatcaatgctattggtgaaagagttaacattttgtgtacattttacactaattttagtctctgtgttttgtttggaaaggtttactatttctctcatgacaaaaaacgaactttgcggatctaataatgataacttaagttgtacttaaagaagtttaagaagccaaagaataaaagccttttcatgaatctttgaattttaaagttttaaagaacttgaaattaacagctatagcatgctcttttagtcagttaataattaaaaatatttgctatattactttatatcaactttgttttataaacattaaagagacattaagccaggttagtagacaagcactgggaagcctgcccttttccctcccatcttttatttttttattttattttttgagacggagtgtctctctgtcccctaggctaggcaattctcctgcctcagcctcccgcatagctgggactacaggtgcgtgctaccacacccagctaattttttgtattttttagtagagacagggtttcactgtgttagccaggatggtctcgatctcctgacctcatgatctgcctgcctcrgcctcccaaagtgctgggattacaggcgtgagccaccacgcccggcctccctcccatcttttaaaacaaatgctttgaggttagcctgagtgtcaagttcaacttagggataagcccaaggatggaagcagatgtttgttggactaagctcagaaatctattttgttgcttgtttgcttccctaaaaaaaaagtttagactccaatttcaaatgccctttctcctatgcctt

SEQ ID NO: 17423 - DNA, 2434 bp, Homo sapiens
tgcatagctgtagccctcctacaaggatcgtaggtgggcaaaggtagagtgagccaggccccacagtatggaaaatggctgtgatggttctgcctttctgaggtctggcttccagccttttccatgggaccctgccaagtcaatacttcgtagactgcaagtcagttcaaagagaggccagtcttggcttctgtgtagctggacttaagtctgtggcagcatgtgagttgttatcaggacctctgctgttgaggaatgcagagaaaggagtttttttttcctttccctccttaagagaatatactgtaggtacaattatggggacaaatcaacatctaccaagttgtgtagaaaaacaaattatgggccaggcatggtggctcacacctgtaatcccagcactttgggaggccgaggtgggtggatcacctgaggtcgggagtttgacaccagcctggccaacatggtgaaaccccatctctactaaagatacaaaaattagccgggcgtggtggcacatacctgtaatcccagctactggggaggctgaggcaggagaattgcttgaacccaggaggcagaggttgcagtgagccaagatcatgccattgcacttcagcctgggtgacagagcgagactcgatgtctgaaaaaaaaagaaaaaaaattatgttttacttttctgtttcttaaacatgaatttccttgcatactttcataaaaattattttaaatctcttctaaaaatacctagttatagcagtgagaggattcagcagttgctgaatttattattggagatgatgtagctcgtgtgtgtgtaggaatactcagtggcagtctgtttttcttggtgctttttcaagtcttgttaatcttcttcctgttttcctgagaggagctgtctaaaatatacttatcaaataactaaactctaaatatgattggagggaggaattctttcttattttgtttttatacttattttgtattgtattgtatttatactttatacatatgtatatatacactttaatatatgtaatgacattaagattacttgtttttaaatgcagtcatttttattgatttgtattcctcctgtctttcagctcctgatgataattcattattgctgctgcgggcggagttatatttgaccatgaagaactatgagcaagctctccaagatgccagtgcagcttgtcagaatgaacctctcttgattaaggtatttgtatttgttagctttggagataatcaatgtgaagtttatatgattttcttaaaaacaaaagtaagattattgtgatcaggtacctatagacaaagtatgtttccctcacattactgtagcctacgtttagcaatccacctcacactaaagcaacctaatttaaaagactaaatctccaactgatttagctgagaaacactaatttctattacacttaatagatatttagctgaataatatgctctctacattgaaaaaatatataaataaaatcatcaaattttataaagttgtaagtgaagaaaaaatatttaaaattataatgtaaataggaagatcacataatgatcatgattagctgttgggtcctaatatgcatatgaacaaatcaatgctattggtgaaagagttaacattttgtgtacattttacactaattttagtctctgtgttttgtttggaaaggtttactatttctctcatgacaaaaaacgaactttgcggatctaataatgataacttaagttgtacttaaagaagtttaagaagccaaagaataaaagccttttcatgaatctttgaattttaaagttttaaagaacttgaaattaacagctatagcatgctcttttagtcagttaataattaaaaatatttgctatattactttatatcaactttgttttataaacattaaagagacattaagccaggttagtagacaagcactgggaagcctgcccttttccctcccatcttttatttttttattttattttttgagacggagtgtctctctgtcccctaggctaggcaattctcctgcctcagcctcccgcatagctgggactacaggtgcgtgctaccacacccagctaattttttgtattttttagtagagacagggtttcactgtgttagccaggatggtctcgatctcctgacctcatgatctgcctgcctcagcctcccaaagtgctgggattacaggcgtgagccaccrcgcccggcctccctcccatcttttaaaacaaatgctttgaggttagcctgagtgtcaagttcaacttagggataagcccaaggatggaagcagatgtttgttggactaagctcagaaatctattttgttgcttgtttgcttccctaaaaaaaaagtttagactccaatttcaaatgccctttctcctatgcctt

SEQ ID NO: 17424 - DNA, 575 bp, Homo sapiens
taaatgataaatactttgctcgtttgtttaagaagtacttttcttggccaggcgtggtggtggctcacgcctataatcccagcactttgggtggcccaggcaggcagatcacaatgtcaggagatcgagaccatcctggctaccacggtgaaaccccagctctactaaaaatgcaaaaacttagccaggcacggtggcacgcacctgtagtcccagctactcaggaggctgaggcaggagaatggcatgagcctgggaggcggagcttgcagtgagccgagatcatgccactgcactccagcctgggcgacagagcaagactccgtctcaaaaacaaaagaaaaaaaaaagaaagaaagaaagraaagtacttttcttatgcattacagctttttgagataattattgtgtaatttctaatatagacagcagcctattttgacagactgcctttttaacacaggattttttttcagagccacattcacagaactttgctgatctactttcaatgaagaatcctttaagataaatcctctatttaaagactttaactagaatgttttatttttgct

SEQ ID NO: 17425 - DNA, 575 bp, Homo sapiens
taaatgataaatactttgctcgtttgtttaagaagtacttttcttggccaggcgtggtggtggctcacgcctataatcccagcactttgggtggcccaggcaggcagatcacaatgtcaggagatcgagaccatcctggctaccacggtgaaaccccagctctactaaaaatgcaaaaacttagccaggcacggtggcacgcacctgtagtcccagctactcaggaggctgaggcaggagaatggcatgagcctgggaggcggagcttgcagtgagccgagatcatgccactgcactccagcctgggcgacagagcaagactccgtctcaaaaacaaaagaaaaaaaaaagaaagaaagaaagaaaagtacttttcttatgcattacagctttttgagataattattgtgtaatttctaatatagacagcagcctattttgacagactgcctttttaacacaggattttttttcagagccacattcacagaactttgctgatctactttcaatgaagaatcctwtaagataaatcctctatttaaagactttaactagaatgttttatttttgct

SEQ ID NO: 17426 - DNA, 563 bp, Homo sapiens
ggggtagctctgagccttcttaatgctgggaaagcaatctgttttcccagccactcccaacactaggggacataaaagatccagactttataggctgtgaaccagatcctagaaaggaatctatctgcaaagctgctccatttgagtaattccagtttctcttctcttcacaattgggtatatttggggtgcattgggaccatcagtccatgttcctagatttcctcctaaggttggtatttcagtcaatttgtcttttcatgggaccactccattcaatttttttagsttctagactctctttcaaggcacatgggctcctaaatataatttttcactaagtatgtcttggtttggtttctctcagagccagaccctcaggaaataataagaaaactaatagtttagttaggagggaatctcatgaaacaccagtagtaaagggagagatgaaacaaacaagagcagccagaaaacagagggtgttgtcaagaagcttaccactgggagttaatggagcataatctcatttacaatctctgagaaccacatagatttgtacc

SEQ ID NO: 17427 - DNA, 563 bp, Homo sapiens
ggggtagctctgagccttcttaatgctgggaaagcaatctgttttcccagccactcccaacactaggggacataaaagatccagactttataggctgtgaaccagatcctagaaaggaatctatctgcaaagctgctccatttgagtaattccagtttctcttctcttcacaattgggtatatttggggtgcattgggaccatcagtccatgttcctagatttcctcctaaggttggtatttcagtcaatttgtcttttcatgggaccactccattcaatttttttagcttctagactctctttcaaggcacatgggctcctaaatataatttttcactaagtatgtcttggtttggtttctctcagagccagaccctcaggaaataataagaaaactaatagtttagttaggagggaatctcatgaaacaccagtagtaaagggagagatgaaacaaacaagagcagccagaaaacagagggtgttgtcaagaagcttaccactgggagttaatggagcataatctcatttrcaatctctgagaaccacatagatttgtacc

SEQ ID NO: 17428 - DNA, 545 bp, Homo sapiens
agatggagacagaggagaaggagagagaaagagacatttaaatactggagagagagggtaagtgatgaaccaagatctggggcagaacaggaggcaataataatagaacacagcttctggtctttcattgagaggaaagcactttggtaagacagaataaaaggagacaaacaataatataaacattagtgtgaaagtgaattgttgagttgggaaattttggataatctcttctgttcttagtatggttagcaccaaggtgagaggagagagcatgggctaagtaccagtgctgaggtgagtgttgccttgttggaacaacagggcagaaaaatgtttttaaaagaaaaataattggccagkcatggtggctcacgcccttgatcccagcactttgggaggctgaggcgggcagattacctgaggtcaggagttcaagaccagcctgaccaacatgatgaaactccatctctactaaaaatacaaaaattacctgagcgtggtggcgcatgcctgtgatcccagttactcaggaggctaaggca

SEQ ID NO: 17429 - DNA, 545 bp, Homo sapiens
agatggagacagaggagaaggagagagaaagagacatttaaatactggagagagagggtaagtgatgaaccaagatctggggcagaacaggaggcaataataatagaacacagcttctggtctttcattgagaggaaagcactttggtaagacagaataaaaggagacaaacaataatataaacattagtgtgaaagtgaattgttgagttgggaaattttggataatctcttctgttcttagtatggttagcaccaaggtgagaggagagagcatgggctaagtaccagtgctgaggtgagtgttgccttgttggaacaacagggcagaaaaatgtttttaaaagaaaaataattggccagtcatggtggctcacgcccttgatcccagcactttgggaggcygaggcgggcagattacctgaggtcaggagttcaagaccagcctgaccaacatgatgaaactccatctctactaaaaatacaaaaattacctgagcgtggtggcgcatgcctgtgatcccagttactcaggaggctaaggca

SEQ ID NO: 17430 - DNA, 542 bp, Homo sapiens
cgtctggcagcctcacctctccggcacagctatgggaagatgcttttgtccgcccagccagggccaggatgacaccagggacgctcaaacgtctacagccaatttggtgaccccctttaatttttggaaatgccactgctggcccctcacagtggaaattcttcatgtgcaaccagctcataaatatagtgtgttggaggcacctggatggttaggactcaggacaatattctccccaaatattttctcaacatccrtcttcctggtggcaattagtgtctgagattctctttaacttttccttgccggggtgactgcagtcagccgtcaaggcaagaaaagggaagtctgaaaaagtgtaaaactgatcatcaaaacacaaaactttacgtgtttttctctgaaagcgcatgaaactggctgcttagcttccaaatggaaaccccacactgcatgttctccgaggcttttctgctttcttttgacattttgacactgagctctgaaataatagtgttaactgttgatctttttttcctttg

SEQ ID NO: 17431 - DNA, 594 bp, Homo sapiens
cgttctgtcgcccaggctggggtgcagtggcctggcctgatctcggctcactgcaagctccgcctcccgggttcacgccattctcctgcctcagcctcctgaatagctgggactacaggtacccgccaccacacctggctaattttttgtattgttagtagagacggggtttcaccrtgttagccaggatggtctcaatctcctgacctcgtgatccacctgcctcggcctcccaaagtgctgggattacaggcgtgagccactgtgcccggcctctttttgtttttttaaagtcctcccaactgagggcctggacatcagggaaaagaaatgagccacctgtgggcttcaccatagtggctcaaagcaaaagcacttctaaatgacagtatttcttggcttgatcttgaggtgccgctgctgtgggcagtgttagccctgctacatggtggctcctgagaggccagggtgcagctgcagatcccagctttacagctgccccaagagtcagggagggcacagagcatggggctgcagcaggagcctgagttggtctgtaaggttgttttccaggaatgccggggctgatggaat

SEQ ID NO: 17432 - DNA, 594 bp, Homo sapiens
cgttctgtcgcccaggctggggtgcagtggcctggcctgatctcggctcactgcaagctccgcctcccgggttcacgccattctcctgcctcagcctcctgaatagctgggactacaggtacccgccaccacacctggctaattttttgtattgttagtagagacggggtttcaccatgttagccaggatggtctcaatctcctgacctcgtgatccacctgcctcggcctcccaaagtsctgggattacaggcgtgagccactgtgcccggcctctttttgtttttttaaagtcctcccaactgagggcctggacatcagggaaaagaaatgagccacctgtgggcttcaccatagtggctcaaagcaaaagcacttctaaatgacagtatttcttggcttgatcttgaggtgccgctgctgtgggcagtgttagccctgctacatggtggctcctgagaggccagggtgcagctgcagatcccagctttacagctgccccaagagtcagggagggcacagagcatggggctgcagcaggagcctgagttggtctgtaaggttgttttccaggaatgccggggctgatggaat

SEQ ID NO: 17433 - DNA, 600 bp, Homo sapiens
tccatcctcacccatccatctacacatccttcctttcatccacccattcatctactcatccacccatccatcctttcattcatttattcatttagccactcatttatgtgctaacttgtttattcattcattctcttactcattaatttacttataattcacttgtcccctcacccacccactcacsatctttagaccttccttttgtgcccagttagtgacaagtgagaagacacttttctggtcttgggtttcctgtcctggggtaggaatgggtgtttgggaagaaacatactgaagaccagactgaaggaggaggtaacgtttagggtgtctgaatcccccttcttggtgtcccctggggggcttgcttaccacccagtttgaggggcagacatattggcttcttctgtgtcttggatcagggccttgagctgctggaacaggagcagctgtgtgagggcatcagtgtcctctatctccctggctgccccctgcccctgagaaccaggtatacacactcccacccaggtggaaggggccattctgcagggaaggtcttccaggggcctggagcccaaggatttatcaaggctccct

SEQ ID NO: 17434 - DNA, 600 bp, Homo sapiens
tccatcctcacccatccatctacacatccttcctttcatccacccattcatctactcatccacccatccatcctttcattcatttattcatttagccactcatttatgtgctaacttgtttattcattcattctcttactcattaatttacttataattcacttgtcccctcacccacccactcaccatctttagaccttccttttgtgcccagttagtgacaagtgagaagacacttttctggtcttgggtttcctgtcctggggtaggaatgggtgtttgggaagaaacatactgaagaccagactgaaggaggaggtaacgtytagggtgtctgaatcccccttcttggtgtcccctggggggcttgcttaccacccagtttgaggggcagacatattggcttcttctgtgtcttggatcagggccttgagctgctggaacaggagcagctgtgtgagggcatcagtgtcctctatctccctggctgccccctgcccctgagaaccaggtatacacactcccacccaggtggaaggggccattctgcagggaaggtcttccaggggcctggagcccaaggatttatcaaggctccct

SEQ ID NO: 17435 - DNA, 552 bp, Homo sapiens
tggacctaagtatatgtgggaatttagaatataacaaaactgacatttgcaatttgtggaaagaaattcatttttccataagtaatattggagcaatcacatacctaattataagaatataagctaatattgtggtctcacgtctttcatcaacaataaattctgaatgctttatacatgtaagaatgaaaaataaaaccataaatcaaaataattaactcatgcagagaatagaaggatggttaccagaggctgggaaagrtactggaagggttgtgaggggaggtgggaatggttaatgagttccaaaaaatacttagaaagaataaataagacctagtatttgatagcacaacagggtgattatagtcaataataattcaattgtacatttaaaactaactaaaggagtataattgtttgtaatgcagaggataaattattgaagggatgggtaccccattttgcataacgtgattgttactcattgtaggcctgtaccaaaatatctcatgtactcataaatatatatatatatatatatatatatat

SEQ ID NO: 17436 - DNA, 572 bp, Homo sapiens
gcaggagacctttcatttaygacaaataatttaagaaaaaaaaaaaaaacagataatgcactgtaattcttatatagctcttacagtttcatcaatctgtaaacactttatttttcattagaggtagctgcaaattggcaaatgaaaaatcttttcttttttactatcttaatgtaatagtatttttttagtagcaggattttttttagaagtaaatacttcatttcttttgaagtattggtttctaaatttttcaaatattaagttctaaaatttgagttgagtatcaatcatatttggcattttaagatactgcagagaatgaaatattcaaaaatttctgctctattggcaaattaagaaaaaagtctatgttgaagtttcaacatattttggcataataatatattaaacataacaaaagaaagggtaacttaaaaatatttaatagtgaagaaagtgaaatacgatagtttttaaatattctcttttgttataatttgtactcacactttcgtcagttagttttctagcccacaaggcaagcagtttccaaaagtatttctttaaag

SEQ ID NO: 17437 - DNA, 1087 bp, Homo sapiens
atttttttttttgcagggttgcttgttccattatatgcattttatatcaatttaaacttttgtttgttctttctccaataatatactaggaagcattctgatatattattatgcattgttgacaacagttccaaaatggtaattcsaaattcaaaggaaaagaaaatattgatcatcttctcatagaaaagctatgtttttctacaaaggccccactatgcctggccaagtaatttcttaaaactttatttgggctgggtgcggtggctcatgcctgtaatctcagcactttgggaggtccaggtgggcagacagcttgagcccaggagttcaagaccagcatgggctacatggcgaaaccctctctctacaaaaaaagtaataataaaaataaattaaaaaataaaaaataaaaaattgactgggtgtggtcccagctacttggaaggctgaggtgagaggccagcttgagcccagaaggtggaggttgcagtaagccaagattacaccattgtactccagtatgggtgacatagtgagaccctgtcttgacaaaaaaacaaaaaaaccaacctttgataagagagcaagtatcaacattttaaagaactgcactactatggcaagacagcataactagtaccggtcagcaggttctgagcactgcattgtcaggttcctagcttttccccaaccacgggaaagcagcaccactcatttatccaagtgattcttgggaatatataagtccatgtaaagcaggcatctctggtgttctggtagaggaactgggaccattgaaaggtctcatggcttttgagggaaagggtgtggagcaatatcagaggactgaatagtctaggcatgtattgacctctcatattccttctgttcagggagtaagatctaaccacttgagttaaccaaggaaaggagtttggcagggattgatcagagacaatacttgtccaagagacttggtcacttacattatatctatctcaaggaagaatgcctgaactatgaatgtattctgctgtggaaccaggattgggaataggtggggaccagttctggatgccatttt

SEQ ID NO: 17438 - DNA, 543 bp, Homo sapiens
tgctctacttaaggagtatcaatccattaataatggaaataacatttaaaaaatacatttactttaaatatttttatataacacatgcataaagataaatgctaatgatatcataaaatctgtagaatgtttaatactgatgaaaggttttgtctaaaraatttattctaatctacacatgaggaaagattagggttacagtgaaaactgtatgcaatgcaattttttatttttttttgagacagagtcttgctctgttgcccaggctgaaatgcagtggcacaatctcagctcactgcaacctctgcctctcgggttcaagcaatttgcctgcctcagcctccggagtagctgggactacaggcacatgctgccacgcccagctaattttttgtattttattagagacgaggtttcactgtgttgcccaggctggtttcgaactcctgagctcaggcaatccgcccgcctcagcctcccaaagtgctgggattacaggcgtgagccaccgtgcccaaccaactgtatgcaatttctaaagga

SEQ ID NO: 17439 - DNA, 399 bp, Homo sapiens
gtggcgcaagagttgttggggtctttggtggcaatgactgctaagatcaccccaatctattttttttcccatcagagaagctatggctgaagggatccctcttggcactggtgcctgatgagtagcacccatggaataatcacagaactcaggcctgatgcrcaaatgtgtggaggtactgcagttctgagttcccaggtagtaatggcattggtgtctgggatgcagggatccttgctgctgtgtaacagaatgcgagatgcagatgcttgttaaacagctaagagaactgagaataagagcactagtgagtgcagcattagagtagctctaggattggggtaaagccaagatctctgtggcagcagagctggtacccagcgttcagccacacacagc

SEQ ID NO: 17440 - DNA, 554 bp, Homo sapiens
atttttgtgaaagagaatgatgtgagatcttgatactggtcctggaattgatgtcccatctctaaaaacaaggtcccacttcctaattccatcacattgggggttaggatttctgcatatgaattttgaggggacacagacattcagttcatagcaaagatgtactggtctacaattcttgttttttgttaaagagattatactgcaataaaaaataagtttgatctttaggaggccgaggcgggcagatcacgaggtcaggagatggagaccatcctggctaacacagtgaaatcccgtctctactaaaaatacaaaaaattagccaggcatggtggcacaygcctatagtcccagctactcaggaggctgaggcaggagaatggcgtgaacccaggaggcggaggttgcagtgagccgagatcgcaccactgcactccagccttggtgacagagtgagactctgtctcaaaaaaaaaaaaaaaaagtttgatatagagttgcatacggggctttatttatgggctagtaagggcccacagctgtggttcttc

SEQ ID NO: 17441 - DNA, 618 bp, Homo sapiens
gatatctagaattttctttatttttcagaatgattctccttttaataattgaaaatgaatgaataatttaatctacattataaagaaagaaaaattttgttttcaaaatcagaatatgaagtactatattccaaatcccaaaatacatattgagtacatgttagttcagacatgatgggatgagagtgggcaccattgtaaatatcaagaaaatatatttaggtagcagaattaataggatttattgaatgtgcaggggatgagggagaagtctaggcctcacaacttccaaatgtcttgcttgaacaataaatggggtgaattkcaaggccattcacgaggtctgggaaaaaagatggaaaattgatgactttctcttttgactaattgggcccaacactgaaactctaataaatataattttgcatttttcagcttactcatttgcctttacttaaaagtacctggatataaatagagcaacatttaactatgctgaagaaatattgtttagagggcaatagaaattgtcatacaattgctcaatataattgctggagttatcttgttcagaattgttccacatattcaattttgtcaagcaaagaagtagtattt

SEQ ID NO: 17442 - DNA, 589 bp, Homo sapiens
cacaggaaaaaccagtccccatgattcaattacctcccaccaggtccctcccatgacacatgggaattattacaattgaaggtgaggtttgggtggggacacagagctaaaccatatcatttacttcctgattttggccatttctatgatcactagtaaaggatatggtagaaaagcacaaaacagagaagtagttgtatctttatagtttacagttatgaccaaaaataaaktaagaacttggaaacagagatgacttatataaaacaagcttttaaagttttctgtaaacattaattatccagggtatagttcagttgtcaaagctaactaaaaatttggatattatccaacactttatttacagcagtctttaacattcttcatctgactggctttatagtgtcatagaaactaccaagtaagttagcttaacttagtcatcaccacttttaagagtgaaaatgttaaaaacataaagaaaaactttttagtgaataagcagttatggaaaaaagttggtatcttaataagttaattgaatgattagctatggtgctccttttgagagagaagagctttcttgaaa

SEQ ID NO: 17443 - DNA, 589 bp, Homo sapiens
cacaggaaaaaccagtccccatgattcaattacctcccaccaggtccctcccatgacacatgggaattattacaattgaaggtgaggtttgggtggggacacagagctaaaccatatcatttacttcctgattttggccatttctatgatcactagtaaaggatatggtagaaaagcacaaaacagagaagtagttgtatctttatagtttacagttatgaccaaaaataaagtaagaacttggaaacagagatgacttatataaaacaagcttttaaagttttctgtaaacattaattatccagggtatagttcagttgtcaaagctaactaaaamtttggatattatccaacactttatttacagcagtctttaacattcttcatctgactggctttatagtgtcatagaaactaccaagtaagttagcttaacttagtcatcaccacttttaagagtgaaaatgttaaaaacataaagaaaaactttttagtgaataagcagttatggaaaaaagttggtatcttaataagttaattgaatgattagctatggtgctccttttgagagagaagagctttcttgaaa

SEQ ID NO: 17444 - DNA, 640 bp, Homo sapiens
tcagatctgttctttgtcttcacgctgcaagattcatccccaaatccagactgtaagctctttttacccaatagggatagacagaaggttaggtttgacaagtgtatacccaattccattatttttcaccactgattatcactgactagtgctcagtgatgggaccctgtccgactggyttcggaggatcccgttggtaggcaaggaccagtgcttgtacatacctgctttcattgtcagctgtatagaaaaccacagtagtaaatgctttgttttattctcaagttctcatgagtttgagaacttaggcctgctgcttggcttggttgtgaggcctgtctttgggtctcctgtatcttctatttcagctattgtcttgactcagaggacctgcttgcttgggtttagagaggcaaaataatttgttcaatgtccagtgccttacagtcttgcctctcttctgcatcaacaacgggagctatcaaaaaaggacacagagtattctgaggcttttcacactgaggcaattaatcaatgtagtgttctagctctcaaaaataattagcctttcaaggaatgaagccttaaatatttaaattttgttttaaaagcagaacttttggtttactaaatgaaatct

SEQ ID NO: 17445 - DNA, 1012 bp, Homo sapiens
actctatattgccaccagtgtaattatgcaatagcatacaaagccttaggatagagggtgtgattcattacaaaatatttgtggtcaagaaaatattgcctgtctttaaataaatagaaggggcagaaaaataaatatgcttgaagatggttattttcacaagtaaacaaaaaagtacacatttaaaaaacaaagcaaaaatatacttgaacttcacaatgactcgggcagtgcttgggcaaatttgttataaagcaaggtttcatcttagacttcccctctctcccagtgtttagttgtgaaaatagaaaaagaggcttgtagagaaggatttcaccaagctgaatccatgataggcatagctattggataaagactgccrtagtaagtttggcctattattggcctattattgctagcaaaaccattccaccgaataacctccatttttttttttttttttaagagatggggtcttactctgtcactcaggctggagtgcagtggtgcaaacacagctcattgcagcttctacctcctgggctcaatccatcctcctcctcagcctccagagtagctgggactacaggcatgcaccaacacgcccagctaatttttgtgctttttgtagagacaatgttttgctattttggccaggctggtctcaaatttctgagctcaggcaatccacctgcctcagcctcccaaagtgttgggattacaggcgtgagccacaccatgcccggccctaatttttttttttcctgtttgaaaaaagaaattctcaaaataaccaaatgatgcaggtcaaaaataactctatctaactgctaccaaagagcaattctagttctaacgggacacttgaaagctgaagagtaaaatatgatgtaatttttttaatgcaagcccaagcctactttcagtcaacgtgaattacatttacctggatctccactttttttttcaaattcatttttacaccatgaaagtatattatttgtctgattct

SEQ ID NO: 17446 - DNA, 552 bp, Homo sapiens
  misc_feature (1)...(552): n = A,T,C or G
ggtttggggatttaaaarcaggatactttttagttgcatatatatataaaatttatgtttcataaactgagtttattatattcaattataaagatgcttttgttcataatccaaacgtagatgaacatatatctttaatatgcatattggagaaaagtatatgaactgcagaaattctaattaatttgggggattggagagtgacattaaacttaacccactttgggggttgctcatacggccgtctacctcaccttggtttgacaagcaagcacaattcatctctatttggaatctagtcctaaaaccggacaattaatagtctagtagacgattgctatttcagatcacatgtgattataattctgcaactgggctctttaatagaagagaataattggctcatctggtacatacatcattaggcttttggtnttcctttgtgtatttatgcactacctaagccacatacaactgtgggtattattgttgttttataactaatcctgaccttggcacttcagccaggggtgaatggctaagtcatctttg

SEQ ID NO: 17447 - DNA, 1383 bp, Homo sapiens
gtatcctctaatgttacatgcctatttctggtttggattttccaaaatgcttttcagcaaacccttccccattagtgtctttatttagtgattttgaattgtgttccctttggtgggattcattcaaaagcaacttcctgcatttggtgatttttttcttagattcattctcatttgtttstgaagaaaggttgttctgtgtgggttttttgttctataaaaaagtgacttttctgcgtggattacttttatagaaacaaggtttgtctcccatatgaatgttttgatgctgaaagtttttccatgttagtgcacttacagtttttctctctggaatgtaccctctcatgttgagagagcgaagagctatagctacaggttttcccacaccgtctgcctttgtaggtttcttcccagtgtgagttctttcgtgtttaatccaggcgagctacaagggaaaaattctccacattgaccacatttgtggagtttctccagtattaattctttactggttactaaacgacgctttttgcttaagatttcccctccttctttatattcgtaggtttttggttttttaacttacatgaactctcacatgttgaacaaaggaggagcagtctttagagattttagatactttatgttcacaggatttctcacctgtatgatttttctcatgttgattaaggcagtagttctcaaactttctggtttcaggacctctttatgttctgaaataaattattgagaactccagaatgtttgtttatgtggcttatatctatcagtatttctttgtaaagggtttgtattttatcatgaaacatgtagaagtaaatcattcactttgatttttcttcatgaccataatcatattaagaatacaaaaggtataagagagtggcacaggatgagggtttattaggagggctgtatgtatgccttccccacccctgactcccaagaaaaaagattatagctatcagaagaacatagctttgcaagatttgttctgtgataaaggcaaaattccacatttttcctcaaaatagaaatgaaaaacaactatgttgtccaaataatttgatgccccaactttcaaaatgtttatgtatagaagcctatagctccaacgcgctgcctagccctgccactttgtcaaccccatggccatattctgggccctgttatcgctcagaaggcccttgtctggaatctgggaaaaggaggatgttgaagacttaaaagtcctaatgcctttaatgggggcctggaaggatggggcttcaggcctggcgggaaaggaatggtgttgtgtgggaaggtgctcacatataaaacatccagctctaacaacccagcaatgtgctgtcctca

SEQ ID NO: 17448 - DNA, 547 bp, Homo sapiens
ggaaattttcaggatcaaacttcaagtctgtctttcaaatattttcaggcttttaagttgcaggaaaataattagtattttatactgcttaattagaaatctgtgaaatttgattgatttgtaaaatctcagctattttattctagaagcagccatcttactytgatcccattgaattactcaaatctcttgtattgttcagcatactagcactccgaaccctaacttaatggacctttgattacatgtgaacatagctgataaatcacacattcttttttgccctatatatattgagatggtagattcccatttttaaaaattaataaaatagtcgctatttttttatcccagctaggaaagaaagtctcagatttcccacatttttttacttaaaagagaaagaagaatactgcctttacttctcttttactttatttctttttcctcaacattccagatgtaaatacccttctttgtattcattatgctaaacacaactaacagtcttggaaatatagatataatataaatattatatgtagat

SEQ ID NO: 17449 - DNA, 582 bp, Homo sapiens
gttgttctttccaatttttatataaatatgatgtatgtgcttttctaygtatgtacccttttatttttaaataacaaaaatgtcatcatatacacaatctgtccccctcctagaatgaactcactttgggggcagggactgcctttctaatcttattatctgctctattctcattcctagaagagtgtctggcatactatatgctaatccaacaggactgtggtcttataagaagaggaagactctctctccaccatgagaagacacaatgagaaggctgccatctgcaagccagaaggagagccctcgctgggaggtcagccatgctggcaccctgatctcagacttccggcctccagagttggaagaaaataaacgtctgttgtttataagccacctagtctctggtattttgttatggcagcccaagctaatacagatgaatagccttgttcaaacatttttcttcctcacttatttacttagggtatatgtctagaagaaaaatcgtgttggttagagaggatgaacagttttaaggcttttgataccagatggtaaatcgaccctagaaaggttaga

SEQ ID NO: 17450 - DNA, 2609 bp, Homo sapiens
gtctttaaacagaaatacatatacaacaaggttatgtattgtattgatcagtttaaaaaaattgagcaggccgggcacagtggcttatgcctataatcccagcactttgggaggccgaggtgggtggatcacgaggtcaggagttcgagaccagcctggccaacatggtgaaaccttgtctctactaaaaatacaaaaattagccaggcgtggtggcgagcacctgtaatcccagctacctgggaggctaaagcaggagaatcacttgaacccgggaggcagaggttgcagtgagctgagatcgtgccattgcactccagcctgggcgacaagagcaagactctgtctcaaaaaaaaaaaaagtacgagcagaggactcacaggaacctaacctgtgtttccccaaggaacagttgttcaatattcactaattgaatgttttgttgcaagttttctagaacataactaccactaataatgagaattgactatatgtgcaaaagtatagatgaatgaaaacatggtgtgttcagggaattttagtcactcattatagctacagtatggtttggtaaaaaaggccagagataagtaagtcagcaagagccgtatcaagaaggaccttgagtgcccttctcctatagtactctgtgtagctctcttttagcactcagtccaaataccttatgtgatgcttatttgcatatacttctaattgcactagaaagttgtacactgtactctaagccttaagcatgatgataaagaaaacgatggcaatgatgatgataacgatgatggtattgacgataactgccattcattaaatgctttctttgtgccagccattattaggtgcactgcacatgtgatctcctttcttggcttctacagtcctatgaagtaggaggtgttctctccattttacagttaagaacactgaggttcaaagaagttaagtagcttgtccacagtcactcagctgtgtagcaatactaaaagtaaaatattcaagtcctggaagcctctcttctttccagcttcccatgctgcgttacatcttggtagcccctgtaggattcagtaggtgctcagtagataaagctgaaaggatatgatgctgagtccctgctaggactaataatcactcatcattgatgattgtctgttttaataactttttctttactatttaaaggacacttaacttcaaccccaaagcaaaaaagcagcatttccaacttcatagtataaaatgatgtattaagcaaatggtctactgtagctatttttaatttttctaatgaaaagtcatgtaatatgcataaaagtcatgactcatcttttggctggaatatggatttttcttaatgggttctatttaattcaactttttagactctgaattccaaagtgtgacttttctaatgcctgaatctgatctgacattctagaatgcatctgttagaggccagagcaattccagagaaagtaatgggagggtgcctcatctccattttagttacatatataagctttgctatagctttccacagatgttggcattattttactgaagagagaaatgctagaagacggaatccagctttgtaatttatgggttaaatagccaagtcctagggaacagtgggtgatccaggttttataagtgagtaagaagacctaagtgatgtttggtacctggaaagttaatggtcagctctccagagcatgcttttgcagtgaggcagctgatacactaggcatagagtgtttgcagcacagagaaaagtgcagcagcacctcactcgatcctgctggcattggctttcagctgcttcttaactttgggtgaaacggcagctgccaaccagtcacactggctttttgtgagaccactaccattcccgagatacttctgattagccatgcactctgccatagcctcaggaggttggaactttcagtacctggaagaagagtttttacccaaagaacagcttcttcctttaggatctggccagttgtcagtggaggaaggtgtttgtcccctcaggtggctgaaaggtaactacataattgataagagtattaggaataactatagtcttgcccttcaaactgatcttgaaccaactgtgtacatactttggggcactaaggaaaacatacctggggcaggaacccttcctagcattttatgattgggcatgttacagtggtctcrgaaagccccgtgagggcatggaagaaagggtcagccaagaaaacccatcaaaccctttgcaaagttatgtggcgtctttttcctgtgtgtgtatttctttctcatcttttgtctttttaaaaatttcttaagtaatttgtgagtggattcttatataaggtttaaactataaaacacatacagaaatcctatgaaaattttccttcaattcccatctctgtgttcccatctcacatgcacacacacacacacacacacacactcactcactctctctctctctctctctctcatgcccccataggtgtccagtcagtaatgtgggcttcatcctcctagttctctatttacaaaatcataatagtttttagtatgaattagc

SEQ ID NO: 17451 - DNA, 2609 bp, Homo sapiens
gtctttaaacagaaatacatatacaacaaggttatgtattgtattgatcagtttaaaaaaattgagcaggccgggcacagtggcttatgcctataatcccagcactttgggaggccgaggtgggtggatcacgaggtcaggagttcgagaccagcctggccaacatggtgaaaccttgtctctactaaaaatacaaaaattagccaggcgtggtggcgagcacctgtaatcccagctacctgggaggctaaagcaggagaatcacttgaacccgggaggcagaggttgcagtgagctgagatcgtgccattgcactccagcctgggcgacaagagcaagactctgtctcaaaaaaaaaaaaagtacgagcagaggactcacaggaacctaacctgtgtttccccaaggaacagttgttcaatattcactaattgaatgttttgttgcaagttttctagaacataactaccactaataatgagaattgactatatgtgcaaaagtatagatgaatgaaaacatggtgtgttcagggaattttagtcactcattatagctacagtatggtttggtaaaaaaggccagagataagtaagtcagcaagagccgtatcaagaaggaccttgagtgcccttctcctatagtactctgtgtagctctcttttagcactcagtccaaataccttatgtgatgcttatttgcatatacttctaattgcactagaaagttgtacactgtactctaagccttaagcatgatgataaagaaaacgatggcaatgatgatgataacgatgatggtattgacgataactgccattcattaaatgctttctttgtgccagccattattaggtgcactgcacatgtgatctcctttcttggcttctacagtcctatgaagtaggaggtgttctctccattttacagttaagaacactgaggttcaaagaagttaagtagcttgtccacagtcactcagctgtgtagcaatactaaaagtaaaatattcaagtcctggaagcctctcttctttccagcttcccatgctgcgttacatcttggtagcccctgtaggattcagtaggtgctcagtagataaagctgaaaggatatgatgctgagtccctgctaggactaataatcactcatcattgatgattgtctgttttaataactttttctttactatttaaaggacacttaacttcaaccccaaagcaaaaaagcagcatttccaacttcatagtataaaatgatgtattaagcaaatggtctactgtagctatttttaatttttctaatgaaaagtcatgtaatatgcataaaagtcatgactcatcttttggctggaatatggatttttcttaatgggttctatttaattcaactttttagactctgaattccaaagtgtgacttttctaatgcctgaatctgatctgacattctagaatgcatctgttagaggccagagcaattccagagaaagtaatgggagggtgcctcatctccattttagttacatatataagctttgctatagctttccacagatgttggcattattttactgaagagagaaatgctagaagacggaatccagctttgtaatttatgggttaaatagccaagtcctagggaacagtgggtgatccaggttttataagtgagtaagaagacctaagtgatgtttggtacctggaaagttaatggtcagctctccagagcatgcttttgcagtgaggcagctgatacactaggcatagagtgtttgcagcacagagaaaagtgcagcagcacctcactcgatcctgctggcattggctttcagctgcttcttaactttgggtgaaacggcagctgccaaccagtcacactggctttttgtgagaccactaccattcccgagatacttctgattagccatgcactctgccatagcctcaggaggttggaactttcagtacctggaagaagagtttttacccaaagaacagcttcttcctttaggatctggccagttgtcagtggaggaaggtgtttgtcccctcaggtggctgaaaggtaactacataattgataagagtattaggaataactatagtcttgcccttcaaactgatcttgaaccaactgtgtacatactttggggcactaaggaaaacatacctggggcaggaacccttcctagcattttatgattgggcatgttacagtggtctcagaaagccccgtgagggcatggaagaaagggtcagccaagaaaacccatcaaaccctttgcaaagttatgtggcgtctttttcctgtgtgtgtatttctttctcatcttttgtctttttaaaaatttcttaagtaatttgtgagtggattcttatataaggtttaaactataaaacacatacagaaatcctatgaaaattttccttcaattcccatctctgtgttcccatctcacatgcacacacacacacacacacacacacwcactcactctctctctctctctctctctcatgcccccataggtgtccagtcagtaatgtgggcttcatcctcctagttctctatttacaaaatcataatagtttttagtatgaattagc

SEQ ID NO: 17452 - DNA, 657 bp, Homo sapiens
gcatttgaaattagtaataatgagtagaatatatacatatttaaaaaaatacatggatcatttcctgcctttttttgtggttaaagcagyctaggagagcagcagcctcctccagctgctattatcattccacatttctcttttactgcccatcaaacatgtatagatttaatgacctggagagggatcagtgaaattcttcacagcactgcatgtttattaatgggcctcctgttcattgtgatgtgatagtgtcaggattatgccagtggtattgcaggaggcaattgagtgtttctttattcctgataaaaaggaaattagccactgatcagcaacacagagacaacttaacattctcgtgaagtaaaccagaatatttcaccccagaatatactttgacgtgttgtgggatggctattcagagaggctataagccacaggacagccttgaaaagttgtccttttgtaggggagatttgcatctgtggaggaaatctacatagtgagataaatagtggatgcaaacagggttttctgatgcccccctccatacccctcttatcaagatctaggaaaaattaactcacaggaaaaggagactaaaagtttcacacttctaaaagcctgacagagaaacttttagcacaggctgtc

SEQ ID NO: 17453 - DNA, 558 bp, Homo sapiens
agatcgagaccatcctggccaacatggtgaaaccccatctctactaaaaatacaaaaattagttgggcgtggtggcacgtgcctgtaagtcctagctactcgggaggctgaggcaggagaatcacttgaacccrggaggcggaggttgcagtaagccaagattgcgccactgcactccagcctgggcgacagagcgagactctgtctcaaaaaaaaaaaaaaaaaaaaatcaaccagatgtggcacatgcctgtaatcccagctactcgaaaggctggggcaggaggatcacttgagcccaggagttcgaggctgcagtgagctatgattgtgccattacactccagcctaggtgacagagcaagaccctgtctctaaaaaaataaaataaaataaaaaatatgtaatttgtaaatggttctccagtactaaaatgctaagcctatatctaatttagaagaccattaaccttacccatttaaatctggccctgtctagggttgattctcatgtttaaagattatacgtacatttaagagcatgttgtaatcaagtatt

SEQ ID NO: 17454 - DNA, 552 bp, Homo sapiens
aaaaaaaaaaggaaacaaatacatcacatcttttgatcacaatgttataaggctgtcatattttttaccacaatgttataagactgaaaattaacaaaaaagcataggctaaataaatgtatccactggagactttcaaatgcatttttctaattaaaatttgagttgaggccaaacgcggtggctcacgcctgtaatcccagcactttgggaggctgaggcaggctgatcacctgaggtcaggagttcgagaccagcctggtcaaaatggcaaaaccccgtctctactaaaaatacaaaaattagcygggcgtggtggtgtgcgcctgtaatcccagctacttgggaggttgaggcaggagaattgtttgaacccgggaggtgcaagttgcagtgagctgaggttgtgccattgtactccagcctgggcaataagagtgaaactccatctcaaaataaataagtaaataaattgagttgaaggtgaaatcaaatgtgaaattttagattatttagaaataggataacaataagtttataccacatacccta

SEQ ID NO: 17455 - DNA, 561 bp, Homo sapiens
tgaggcagatacatagcatagtgctcatccaggaaaagcaaaaattgtcagggcctgagcaatggtggggcctaatatatatattagtagatagatctttttattttaacattaaacagttttgtcatttctgtttcyaggagcttccacctactttgctaagttgtattcctcttttaccctcccacccatgccatgcaaaatggctttctatattaggctatattaagacagactgctttatcctgacattgtcttcacacaaagtagccctttctcttcccttccctaatatctcactgatagaagttcccacaacctcattccacagtctcaggaaggggcgtgtgcacgtgtggatgtttcactcaaaagcactgtagaagacacataaaggtagtttgatacatcaagtagcttcttctactataaccagcacaaatacctctgctgttgaaataattcccatgggacattataaatcagtaagattgaccaagtatttactgaaattacctcctcatacacaaagaggctgtgtggtttacttttttatttaat

SEQ ID NO: 17456 - DNA, 581 bp, Homo sapiens
cgagcacggggaggggaggcgagaaaaggggagggtggagcaaaagctcgtgggtgtaggccttgggccggggagagggaggaagcgcggagggaggcgaagacgcttggggccgggcactcacccgccgggcgctcgggctgaatgggccgccaccgcagtgctcgctcgctcagcaccacgtcacaactgtccctcccgatctcraagatgccccggagcagaatccgctcggccgccgcctccgtctgctgcggggacgttaacagcgccggaggcacagcggcagcctccgggggcgcctcttcctcccggccgccctccagggcactcacccggttcctgcgcctcctccagggcatggcggagtcgcaggctgggcccgagccaggggtccggggaggcctttggagaaggaggtggagggcgcggcagccccagctctagccgcgtccagcgctgccacagcaacggcgcgcagggcagggacccaggagggaggcgggccgcgcctgacccagtccagcaccctggcctgccagcctcgccgcttcgccactcaccacaaaaagacccagctg

SEQ ID NO: 17457 - DNA, 525 bp, Homo sapiens
aacctattttaccttaatcaccactcaatataaaacagcatttcttttctcatgtcattgtttgctttttttgtacacaaatactgcaacattggtttgtatgacctctcattgcacaatgtctcattttaattctatagcatttcagctgcactgtaggttaaaytggctctttgggctaatccaaactgtaattataaacttctatattgcataactcgaattgcctgaaagacttacaaataattccatagctatatccctagcttttaacttaaaaggttcaagaaaatactacaccttggtttttaaaacacctgaaaacactttaaggtcaaagactgttttcgtgaagcgagcgagcatggcacatgcagcacaggcagaattcacaatcgcaaccagtgctgaatccctggctagttggtttcattttgttagacttttgagcaagactttaagacagtgagtctattctgtaacataaataccacactgtgtcttgttttccaacaggggaaggca

SEQ ID NO: 17458 - DNA, 591 bp, Homo sapiens
tggggccaaaacaagttcaaaaaatatgaaaaagcaaaattaagtttgtaacttagttagcattcagctcgtgagtgaaaagcttgtgccaaagtaccataatctggtttatgctacatttgccctttaggacatatattaaaattttagggcaagccatatggagaggtttgtaaaattacacactgaaatgtaggcagtgtaccttattcccaaaaggctataatgttcacctcttagagctaaaagagtaacaagatcaccaatttgcatgagatatatttaacactgaacatttgcaactcctgaataaaagtaaattagtctattgaggctagctcataaaaatcatcttagagctacaaaacaattctgaggttttattcataataatatttggagstttcataagaaagatttgaagacttcaaattaaaatataatgaataggtctcagcttttctccactaaacacttgaaaattaagatgtactagaatgtagtgaaggcttagttttagcccttccttcaacagctctccctccctatcctcttctatttcaaagggatcctgtgtacaagaaagcatga

SEQ ID NO: 17459 - DNA, 1192 bp, Homo sapiens
  misc_feature (1)...(1192): n = A,T,C or G
tattataactataatactagtcacaataaataaattttgaaaatattcaaaaagttatatatttagcaattattcatggaataaagaaaaatatgatgtaagttttaaaaattgacctaaattataacaaaaatagttgagatcaaaacttgtagtaccaggagaaaacatatagccaaattttaggaaaaaaaaggtaaaaattaataagacttaattttatttattttgtacagacaggggtctcactatgttggccaggctgatctcaaactcctggcctcaaattatcctctcaacttggcctccaaaaatgctctttttctaatgttaaaagttaggtctggcagcaagccactgtgcagtgagccactgtatctggccagacttttaacattagaaaacgggcaacagaacaagatattaaaagtgagaaaataatcaaaatataaattaaagaaacggaaaacaaatacacaccaaagagcatcaacaaagaaaaaggttgtttttgaaatgccagccaaaattggnnnnnnnnnnnnnnnnnnnnnnnnnnnnnnnnnnnnnnnnnnnnnnnnnnnnnnnnnnnnnnnnnnnnnnnnnnnnnnnnnnnnnnnnnnnnnnnnnnnngaataaaacatgagcttctgtcatgaacaaatattatgagggtttttcttctttctttcttccttttttctggccacaccccaagcagctattaggaactgactaaacacccactgtgtatccagaactgtgttagctacttggaactattaaaaagcagttggaaaaatgattcctgtccttgaagaagttaggtaatatgtctcaggagtaaaaattagtgtacccagaacaatcaggtaccaaataaacagttgctttgctgtctccactaataatgtaatgacttcccctccatttcagtctgttgaaattttacccattcttcaggatctgtctccagaactgacctttctrtagcttcattgatttcttgaatataaggtcgggcccatattcctgtgaacaaaccacccaaacatttgatttaaattgtccctcttcagatgtctttggctctttatcatctacaggccgcagttcagtcctgaccacctctcttgtcttttccccaccagctcttctaggtacctactgttttgaaggcaaaccaaatcct

SEQ ID NO: 17460 - DNA, 590 bp, Homo sapiens
ggagttgaatttccactctggcactaatttgtgacctgctatggtgaaattgttttgagtcgcttatcctcggtgttctcatctgtgaaatgaaggcatgaaggtgcatgacatgattcatgagttccctttgatctctagtactcaacatatggaaggataatgaattcttagccaacttattaatctacccttgttcttctttttctttctgttttttttgagatggagtcttgctctgtcrctcaggctggagtgcagtggcgcgattttggctcactgcaacctctgcctcccgggttcaagtgattctcctgtctcagcctcctgagtagctgggactacaggcacatgccaccacgcccagctaatttgtatgttttttttagtagagacggggtttcaccatatcggccagtctggtctcgaactcctgacctcgtaatccgcctgcctcagcctcccaaagtacttggattacaggtgtgagctaccgcacccgacctgttcctggttttttttgcttgcttgtttaccagttttctggtgtcagagttgctttattaaactggtctctgacagtcccacag

SEQ ID NO: 17461 - DNA, 590 bp, Homo sapiens
ggagttgaatttccactctggcactaatttgtgacctgctatggtgaaattgttttgagtcgcttatcctcggtgttctcatctgtgaaatgaaggcatgaaggtgcatgacatgattcatgagttccctttgatctctagtactcaacatatggaaggataatgaattcttagccaacttattaatctacccttgttcttctttttctttctgttttttttgagatggagtcttgctctgtcactcaggctggagtgcagtggcrcgattttggctcactgcaacctctgcctcccgggttcaagtgattctcctgtctcagcctcctgagtagctgggactacaggcacatgccaccacgcccagctaatttgtatgttttttttagtagagacggggtttcaccatatcggccagtctggtctcgaactcctgacctcgtaatccgcctgcctcagcctcccaaagtacttggattacaggtgtgagctaccgcacccgacctgttcctggttttttttgcttgcttgtttaccagttttctggtgtcagagttgctttattaaactggtctctgacagtcccacag

SEQ ID NO: 17462 - DNA, 542 bp, Homo sapiens
tgtcttttagtaacatcagcctttcctctctgaccctcccttctccttgtcattgttttcacttttaattttagaaattgattcattctaggaacatcacttcctaaagttgttgtttggcgctatgtgagaagattctctgagggctgtaataggggttgtgaagctgagagatttcagacgtgtcgttctcaccagaattcaacagtggctatctatttccacatggagataagtgcaaagtgtggtagtgacttcaggaatgttgggccgttggtcctatgagataagcacttactgatttttttcacaggaggcctggcatattccaataggcaccacacatataaaatgcatgcgtgccctggtcctgaccagtctttgtttggtctatagtttatgaaaatatattaaaccatggttatgttatacatcctgtataatggtgatgatctgtggcaataycacaaaatcatttatgaaattcataactacgtaatccataaattatgttataaaatccataaatatttgagagtatt

SEQ ID NO: 17463 - DNA, 644 bp, Homo sapiens
tgccatgcattttcatgccgttgctcatgctgattcctttcctgggaagccccctactgcatttctctgccagctcagaagtcacctgcttgtaagattataaaagctaaactccttctgcactgcaaacttcacacaggaccactacctacctacttctttgtgctccatgaaactattcatgcctcaagtcattcatactgtatcagattgctagaggtctacttctttgtctttcttgctagatcctggatctagagggcagatgttgacttagtcttcttttgtggtcccagcacmgtataaggaacatagatgcagtacgggtcgtttaatattccattttccaactttgggcagttattctaatcttgtgttatgccttctgtccttaagcagttaatgttagcaagataaccctcttgtatgaaaaatgccaaatgctgtaacatgctaatgtgatctgaattttcaagcacttcttgtattcctagcaacagcaaataatggtcgctgtcctataggaagccagtcatattttcaagaaagttagcccttcttagtatttgctcttttgcattatgaagaaaacatgcaaaagatttttaagttcttacattagttctcctccttggaataagaat

SEQ ID NO: 17464 - DNA, 519 bp, Homo sapiens
aacatttgatatagaatagtgtgacatttcgctattaattgctcctttcggcctgtcttataatctattcctccccccacccagcaaatttatcatggtattacgataaaagatatttatttccccctcctatgtttttgcatgaagaagaattattagcatgctaaactatgacccttcattcttaaataccatgtcttgacttgatttatgtaatacaagcctctaaggacttggatttcatttagattacctagttcaaccctccttatttgacagatgagaaaacaggtccaaagaagctaagtgacttgctcccaatcacagaacaagttaattgcaacatatggactggttttcttatttcctgatccaatgtggttcatcttcttataagcttcacttcagaatcaagggttcctgaattatctggtgtttrtttggctatgtggcattaaatctttggctatgtgcacactccaattatttttgcaactatttatggtggggaggagggag

SEQ ID NO: 17465 - DNA, 530 bp, Homo sapiens
ctgtcacatactcccaaggaaaagaagagctcatccttmcacaaatttgcttttaactgtcaaaagaaaatcccagagagacgcccactgccttacaagtaaatctaggattacagtaccaaatctgttataaaaacaacaatgaaataagttccaagttgtttcttcctttgacaaatacccaaataacttccataatttgaataccaggtcaaaaagttttattacaagcaaaacaaatacttcagtcctactcattgttagcaagacacaaaccatattaaaaagcagaacatgtgactaacaattagcataccttggaagggaagggacttactcaaatttgaaaggctagataaaattatgggaaaatgagacaaaagttcagacaaaaaataatcatacgctaataattcatttttatactctgaaaattattcttttaaaattttaaatatacttctcatttatttgaaccccagagtaaaaaatttagtgagggttatcaagagttcccaatattcaatccc

SEQ ID NO: 17466 - DNA, 530 bp, Homo sapiens
ctgtcacatactcccaaggaaaagaagagctcatccttacacaaatttgcttttaactgtcaaaagaaaatcccagagagacgcccactgccttacaagtaaatctaggattacagtaccaaatctgttataaaaacaacaatgaaataagttccaagttgtttcttcctttgacaaatacccaaataacttccataatttgaataccaggtcaaaaagttttattacaagcaaaacaaatacttcagtcctactcattgttagcaagacacaaaccatattaaaaagcagaacatgtgactaacaattagcataccttggaagggaagggacttactcaaatttgaaaggctagataaaattatgggaaaatgagacaaaagttcagacaaaaaataatcataygctaataattcatttttatactctgaaaattattcttttaaaattttaaatatacttctcatttatttgaaccccagagtaaaaaatttagtgagggttatcaagagttcccaatattcaatccc

SEQ ID NO: 17467 - DNA, 530 bp, Homo sapiens
ctgtcacatactcccaaggaaaagaagagctcatccttacacaaatttgcttttaactgtcaaaagaaaatcccagagagacgcccactgccttacaagtaaatctaggattacagtaccaaatctgttataaaaacaacaatgaaataagttccaagttgtttcttcctttgacaaatacccaaataacttccataatttgaataccaggtcaaaaagttttattacaagcaaaacaaatacttcagtcctactcattgttagcaagacacaaaccatattaaaaagcagaacatgtgactaacaattagcataccttggaagggaagggacttactcaaatttgaaaggctagataaaattatgggaaaatgagacaaaagttcagacaaaaaataatcatacgctaataattcatttttatactctgaaaattawtcttttaaaattttaaatatacttctcatttatttgaaccccagagtaaaaaatttagtgagggttatcaagagttcccaatattcaatccc

SEQ ID NO: 17468 - DNA, 607 bp, Homo sapiens
tgatgtatatggtcctacctaagtatacaggacttgttttagtgtcttcagttcaccagaaagatgagtaatcttaatttctacatctaaattttatggtgttctttcaaaacaaatcaacctcctggataaatgtagggattattttttaaatgaaaaactgaaaagataattttcatctctatatctccttatcacagcaaaagggcatgattcagtgatttgttagtctatcatttaaggaatggccattggcaaatactaaagacaattttttttgcatggtttgtggaatcagcctcagtactttactctcactcactcacatatttaaaaattaaaaaaaaaaattaaaaaccttcttgccacagagaaataaagggtagccacaacagwtcagcagcttagaaatggaaatattttaattaattaattcattaagtaagtacttattaagcctctgtctagcacagaattaaactagcagatgaacactggctctaaatataagaaggtcattcattaattcacaactgcaagtaccttatgttaaaattcacatgtcaggctgcttgggtgatatttttaattgattctattaagaaaa

SEQ ID NO: 17469 - DNA, 553 bp, Homo sapiens
agaaattaaaaaaatagccttatgaaaatggtagctagattaaacagcagattatatatagctgattagagaatgggtaaattgaaagatagatctgaagaaattactccaagacagcacagtaatataaaaaattgaaaaaaaagataaaaaagtacacacatcctcatatatatatatatacacacacacacatatatcaggatatatgtatatatacatatacatatactgattattgcttttagattattcctcatgggctttgtaattttgtaattgtgggctgatcttcatcagggattattacagaactcttatatagccaagattgagaacacattcctccaaagaggttattttaccttctgccatatgtacacatatgtacacacatttctatatatacacatatatgtgtatatatatatatgaggatgtgtgtgaatatatatagatttatatatgtatatatatgtgcatgtgtgtacaggcagagacctagagggttgcacattctgctaarcttttattcaatagtaagagtgaaata

SEQ ID NO: 17470 - DNA, 604 bp, Homo sapiens
tattatccttcttctctgcttgataaatacttgtgtgttgcgagcctgccatggcaattcctgcccttcccctggcccagcttagctcttacgtctccccaccgagctgctgtacttcagagatttacacagctgctccccygcctgcccccatggggtcccctcacctgagctcctcagcttgcttgagctgctctgcaagcttctcctccttgaactgtcgctcattcctcagcatagattttatgaggtctttgcactcttcatattctgagaaaagacagacacgcctgcctcagtggaaggctggacatgctgctgtggtcattgcctacagggcaggagccaggtccatcccaaggacaaaactctccccagtatcagggtctagacagggatttccacatctttactcttcagtctcctgactttctggcatctgatcctccaaaatttagagatgaagaaagggaacctcaagggcacatcaaggaagttgacaagatgattcaaccacaacgaagtggagtcagaattcacagcccctgaggtctgactctgaatgcagggccactttcccaagacttgcagcctctcctctaaa

SEQ ID NO: 17471 - DNA, 604 bp, Homo sapiens
tattatccttcttctctgcttgataaatacttgtgtgttgcgagcctgccatggcaattcctgcccttcccctggcccagcttagctcttacgtctccccaccgagctgctgtacttcagagatttacacagctgctcccctgcctgcccccatggggtcccctcacctgagctcctcagcttgcttgagctgctctgcaagcttctcctccttgaactgtcgctcattcctcagcatagattttatgaggtctttgcactcttcatattctgagaaaagacagacacgcctgcctcagtggaaggctggacatgctgctgtggtcattgcctacagggcaggagccaggtccatcccaaggacaaaactctccccagtaycagggtctagacagggatttccacatctttactcttcagtctcctgactttctggcatctgatcctccaaaatttagagatgaagaaagggaacctcaagggcacatcaaggaagttgacaagatgattcaaccacaacgaagtggagtcagaattcacagcccctgaggtctgactctgaatgcagggccactttcccaagacttgcagcctctcctctaaa

SEQ ID NO: 17472 - DNA, 604 bp, Homo sapiens
tattatccttcttctctgcttgataaatacttgtgtgttgcgagcctgccatggcaattcctgcccttcccctggcccagcttagctcttacgtctccccaccgagctgctgtacttcagagatttacacagctgctcccctgcctgcccccatggggtcccctcacctgagctcctcagcttgcttgagctgctctgcaagcttctcctccttgaactgtcgctcattcctcagcatagattttatgaggtctttgcactcttcatattctgagaaaagacagacacgcctgcctcagtggaaggctggacatgctgctgtggtcattgcctacagggcaggagccaggtccatcccaaggacaaaactctccccagtatcagggtctagacagggatttccacatctttactcttcagtctcctgamtttctggcatctgatcctccaaaatttagagatgaagaaagggaacctcaagggcacatcaaggaagttgacaagatgattcaaccacaacgaagtggagtcagaattcacagcccctgaggtctgactctgaatgcagggccactttcccaagacttgcagcctctcctctaaa

SEQ ID NO: 17473 - DNA, 604 bp, Homo sapiens
tattatccttcttctctgcttgataaatacttgtgtgttgcgagcctgccatggcaattcctgcccttcccctggcccagcttagctcttacgtctccccaccgagctgctgtacttcagagatttacacagctgctcccctgcctgcccccatggggtcccctcacctgagctcctcagcttgcttgagctgctctgcaagcttctcctccttgaactgtcgctcattcctcagcatagattttatgaggtctttgcactcttcatattctgagaaaagacagacacgcctgcctcagtggaaggctggacatgctgctgtggtcattgcctacagggcaggagccaggtccatcccaaggacaaaactctccccagtatcagggtctagacagggatttccacatctttactcttcagtctcctgactttctggcatctgatcctccaaaatttagagatgaagaaagrgaacctcaagggcacatcaaggaagttgacaagatgattcaaccacaacgaagtggagtcagaattcacagcccctgaggtctgactctgaatgcagggccactttcccaagacttgcagcctctcctctaaa

SEQ ID NO: 17474 - DNA, 559 bp, Homo sapiens
ttgcaatcagtgtgtcagccaggctgccttttttgaaaaattcagttacttgtgggtataggactgaggtccgtggcttgctggctaagagccaaggatcattctcaactcattgaggcctcccttaggtcttgacttgtagctcgtctcataacatggcaacttacttctttaaaaccaacgggggaatctccctgatctcagagaatgcctctggccttctttgaaagggctcatctgattaggtcaggaccagasaagaaaagcttgcttttgattagctctcagaaacttgattagggacgctgaccctaattacatctacagaatcctctttgcatataacgtaatgtaatcatgggaatgatagcatatcgtatttctgggtcccatacaaggggagggtattgtaccagagcatgagtcatctgagaattgtgtctaccacaggatattatactgaagagtaagtttttcagtacattcttatttcttcttacagtcgcttagagagttctttccttttcagggatttatgcttcctcaatgttaaatttaa

SEQ ID NO: 17475 - DNA, 559 bp, Homo sapiens
ttgcaatcagtgtgtcagccaggctgccttttttgaaaaattcagttacttgtgggtataggactgaggtccgtggcttgctggctaagagccaaggatcattctcaactcattgaggcctcccttaggtcttgacttgtagctcgtctcataacatggcaacttacttctttaaaaccaacgggggaatctccctgatctcagagaatgcctctggccttctttgaaagggctcatctgattaggtcaggaccagagaagaaaagcttkcttttgattagctctcagaaacttgattagggacgctgaccctaattacatctacagaatcctctttgcatataacgtaatgtaatcatgggaatgatagcatatcgtatttctgggtcccatacaaggggagggtattgtaccagagcatgagtcatctgagaattgtgtctaccacaggatattatactgaagagtaagtttttcagtacattcttatttcttcttacagtcgcttagagagttctttccttttcagggatttatgcttcctcaatgttaaatttaa

SEQ ID NO: 17476 - DNA, 522 bp, Homo sapiens
aaactgggggcagtctgaggacatcaggcatcccttctccatcagggagacctggtaaacattttaatgtttaggaatgaactaccagaaaaaataaaacaaggcccttggaaaatattcttcaggcccaataatgagaaataaagggcgtagaaaaaaagctgagaaaatcatttccctaattactcccaaaacaatatatttttagatactctctgatcttgatgtctctaaagaataaaatattcaatatctgcctattcaacgaacatgttgctagttgtagcacatgtaaagaaaatgctgttgggtatccaactagtttacaagcagtgctccaagggaaatgaatgggatcgggtatagctctttacttctaaaatgaaagtgattctgacctacagcttttttctggacaatatccatcctacagcattcaaagacacagttcagtctttcccatttgttttttaccactggattaaaaatttaaagtaatraaccatttaaaaaatttggaaa

SEQ ID NO: 17477 - DNA, 538 bp, Homo sapiens
ttctttaccttcctatatgcaattrgtcatcaaacttttgggattataacactgcaaagtctcttgttttttaaaaaactttctatttctactaatattgtctagatctcttcctaatcatcttttgccttgatatttaaacaataatttatctagttgcttgcattcaatctctagtctctcgagccttagtctcagtccttattctacatcagaatcacctgagagctttaaaaaactaccaaggtacagggcctaactcttagatattcaaatttaattggtctacggtcaggccttggcacaagtatttttcaaagttccctaggtgagaataataagtggtcagggttgagaaccacagccaaaccagattattcactattctcaacaaactgctatgtcagctagatgtcttttcaagctatcctttcttctaatgactttgttcaatgcacacaacttccaaaatcatacaaaaccttaaggttaagcccaaataccactccttcaaaagccttaatcaagaatgacagga

SEQ ID NO: 17478 - DNA, 521 bp, Homo sapiens
acagtttaataccttttatctttcaaataagaattctgtaaataaatataaaccaaggacaaatataagtttggatacartaacaatcacataactccaaatacagaaatttttaaaatgaagatccacgaaataaggcccttttagtgttaaagggttgctaaaggtctcttcagatttagtagttttcatgctcaatgtttatatgctagattaactagaaaacccaaggcatttgttgaatgggctgtgctctgctgtttttaattccaaattctgacacttagcaaaagtcttttatttgaggcttgattaaactaatttaagattatttggttaatgtaattggacaacatatgaagcaaatttgaaagctcaaattctaaaaaggaaactgctttaagattgccattgccgaaaaagtttctgcagcaaaacgtgcttctgcagaatttagctggatctgactcagacggtaggggaatcaataattcatcaagaaatcagagaagataatgatg

SEQ ID NO: 17479 - DNA, 530 bp, Homo sapiens
tctttatggcataaaaaaaggaaaagctttatatacaccctgattggaggctgttggcacggggaagctgaattcaggctaactagaagcaaggcatcttacatgattgattaaagaagcatagttggctttctccaattggtcttaagttggaagtagggacaaaaattagggaagctggcagttattaaccaagtactagctgtttgaggctgacttcaaagaggctgtggtttgatttcatgaacmgtttgctgcagagttcaagatttggctttctaggttggatgttgcaagttatgggttagatatctatttttttataaaaactgtccatcgtctgtctctatattcagtttctccactccaggagatgctaaaagatgtgaagtgtgagctagaagatatagaatattcaaactcagaaaatgaatgattagagacctttgtgaacctgatgacaaataagtagagggaaatatacaaatcactcacagtttaaagttcatttctcctttaaaataaagaca

SEQ ID NO: 17480 - DNA, 663 bp, Homo sapiens
tttcctcttcggaggaacacaagagtgctatagaaattctttggcagtaattatccatatatgctctcacacatttagactttcttcttcatttatttccatccttttcctcaatgacctattgacataaacatttcctgtcattattataatagtgataattattataattactatttgtcagggaaattttatgttattatgattagcacactttagtgtcacagacattagtgatagctctttattcataattgagcatgacagccacttcagagagctgttacgaggatcttactggtcaccacacactacttcttcatatcacttagtacaggtaaagttaaatcattacatgtgctattgcttgcttaatgtcttctccacagtggtatgcgtgctttcagktatggcatattatcacatgtgttttattcactgggatatctccaatgctgagcacagtaccttagacttaggaggctgaagaaacaacacacaaatggaatgcttgttaaagtgccaacagagtgctggcacttagtaccttcccagacagtggtttgtaagagaataattgctaacatttgatctagctctttacatatattatgtaatatcctcagttgtgcccataattaaaatatgagagttttgaaacca

SEQ ID NO: 17481 - DNA, 590 bp, Homo sapiens
gtgctggttcaaaggaaataaaaactttattaataaaataagagattttgcaaaagtcatcmaaccaaactcccttttatacgtcttgccaacgattataaccatacccttgagcacattaattctttttatctcgctagagattcagagacatacacttccatctatgggggtagatgagagatttcaagcaacaatattccattagaagaaaagaaagtaatataaggatattagcttatctgtgcctaagctacttccttctaaatagagcataagaaaaactaattaatctgaaggcagtacaaactgacatctcacaataatctatgtcaaggagctagtgcttctgcggccacattgtccttcctccactatacccacctcaagtcaggaggctcattctactattttttgagtgtgtttagtgttttctttgtattgtcatgtgtacacctaatagtaaaaccatgcagctcactaattctcctactcaagtatggtggatgggatgggtagaaaactaacattgaatgacaaccatatgctctgtgataccatgacaactttagaaatgaggaaacaagact

SEQ ID NO: 17482 - DNA, 590 bp, Homo sapiens
gtgctggttcaaaggaaataaaaactttattaataaaataagagattttgcaaaagtcatccaaccaaactcccttttatacgtcttgccaaygattataaccatacccttgagcacattaattctttttatctcgctagagattcagagacatacacttccatctatgggggtagatgagagatttcaagcaacaatattccattagaagaaaagaaagtaatataaggatattagcttatctgtgcctaagctacttccttctaaatagagcataagaaaaactaattaatctgaaggcagtacaaactgacatctcacaataatctatgtcaaggagctagtgcttctgcggccacattgtccttcctccactatacccacctcaagtcaggaggctcattctactattttttgagtgtgtttagtgttttctttgtattgtcatgtgtacacctaatagtaaaaccatgcagctcactaattctcctactcaagtatggtggatgggatgggtagaaaactaacattgaatgacaaccatatgctctgtgataccatgacaactttagaaatgaggaaacaagact

SEQ ID NO: 17483 - DNA, 590 bp, Homo sapiens
gtgctggttcaaaggaaataaaaactttattaataaaataagagattttgcaaaagtcatccaaccaaactcccttttatacgtcttgccaacgattataaccatacccttgagcacattaattctttttatctcgctagagattcagagacatacacttccatctatgggggtagatgagagatttcaagcaacaatattccattagaagaaaagaaagtaatataaggatattagcttatctgtgcctaagctacttccttctaaatagagcataagaaaaactaattaatctraaggcagtacaaactgacatctcacaataatctatgtcaaggagctagtgcttctgcggccacattgtccttcctccactatacccacctcaagtcaggaggctcattctactattttttgagtgtgtttagtgttttctttgtattgtcatgtgtacacctaatagtaaaaccatgcagctcactaattctcctactcaagtatggtggatgggatgggtagaaaactaacattgaatgacaaccatatgctctgtgataccatgacaactttagaaatgaggaaacaagact

SEQ ID NO: 17484 - DNA, 568 bp, Homo sapiens
atgcaatggccttacttgaggctgatggaccctgggcctgtgtgtacaacttgctcttgacttaggtttccctctgcaggggctctgatcccttcccccaccccaccccctctccaccgctgcaccaacaaccagcaaaggctccagtacattccccatgtgctcccctggcttccccattggggctcacaaaatggggtgaaagagctaataccccagcaaaagatatgccaggccagggtcaaaccagagggaaaaagagttatctatcccctttgacctcacattcagatatcaattttctctggtcatgctgatttctgttttattatttatgtttcttttgttacttggattcttgaaagccacctaaactcatttataaaaaaagacagacttttttttctttttcttttttgagacaaagtctcattcttgtcccccaggctggagtgcaatggcgcaatctcggctcactgcaacctcgcctcccaggttcaagttctcctgcatcagcctcccgrgtagctgaaattacaggcatctgccaccatgcccagctaatttt

SEQ ID NO: 17485 - DNA, 544 bp, Homo sapiens
gacccgaatgaagaggctgggtcacccagtggttaggggctcgggctctgggagctgaaagtccacgtggcgcaaatggctctacttccacaagcctcggtcgcatctcctggaaaatgttgccgcttctcttcctctttccacacgtgcgctgctgtgggcgagggaacttctaaaggggccatgccgggcgagtgctgggcttggcagagaggaagaaggacgtcggtttttaccttacgcccgtctatgagaatrcaccactttgatcattcaagaaaattagctagtaaagttcatctgggccgggcgtggtggctcatgcatgtactcccagcactttgggagaccaaggcaggcggatcacctgaggtcaggagttcaagaccagcttggccaacatggtgaaaccccatctctactaaacatacaaaaattagccgggcgtggtggtgagcgcctgtaatcccagctactcgggaggctgaggcaggagaatcacttgagcccaggaggaggaggtggcagtgagctgagatggtgc

SEQ ID NO: 17486 - DNA, 522 bp, Homo sapiens
ggagcaagatgataatgccaccattcttacctgtaatgtctcatgccagtgtgtatggtgaattgaaatatgaaaatcagcgataattcactgtcatcagtaggtctgcaatttaattgctggctacataattttagtcaagtcattcaacatcattgaattttcataatctcatccatcaacactgggattgtagtaaacctaaagctatattgtgcttgaattacatgagttaatccttgtgcatatgtttggcaaagtgtccaagttttataaaaaactttctcttctttagagttatgcttatttgctttaccttatagtctactcacattaataaaaactgaccaagagtaatttatatatttcataacgaataaagctargaacctagctttattaattataaagaagtacatttgttattgtagtatatctgtgcataaatatgtgcttacagagattcaaccttatatacatatgcaaagagagagagaactagtctttttcgaatattttatt

SEQ ID NO: 17487 - DNA, 1022 bp, Homo sapiens
taagagtgagcattgcaagagagtcaggcagagactacatagccttttacgacctaatgttgaaaatcttgatgggtcactgccacaacattctatgtattatggagtcactaaggtcagcccatattcaaggggaggagaattggactccatcacttgatgagagaaatgccaatgaatttgcagacctgttttaaaaccactacagtccatcctctagctgcacacatttacattccttccacataaaaattaccttcctatgcttcraagacatctcccaccaccaagcagtttcatttattattactacagtctcaagctttttttttttttagcttttacaacacatgaggtattttaataacctactttttatttttacttttacaaaagctttgggttggtgaaaaattaagtaatctaggcatgatttatgggatgcaggaggatgtggataggttacatgcaaatgtcattttataaaaggaacacagcatctgtggatttaggtatgcttagggggtctggaaccaatcccctgcatatggttaggggataaccatattcaaaagaaacatcaagctttaagttcaagatctaatcaccaaatttttataaaatggaaatgacgctttccccaactacatcacatgactacatcaaggatcatgttaagtacaggtgagtagatatatatatatatatatatatatatatatatatatatatatacacacacatatatagatatacacaaaataatttatacacaaacataaaatcatgaaggctttttaaaaataggaactgttaattatacataaagcatctccattcgtgcaatttttatgtcttcttccaggtaattaattttatggaaatatacaatcctcctcctgcctgcacctctcccacatacacactaccttcctagtactctggggaatattgggcaaacattctcaccacaaaattatattaagaagttaaataaacattaaatattgtatgatacatgc

SEQ ID NO: 17488 - DNA, 544 bp, Homo sapiens
gtgagaggataaatttttgttgtcataagccactaaggttgtggtgatttgtttcagtgcccctaggaaactaatacaggtcaggtccattcttggttcaggagaggcagggtaccttaactgacagcttcactgtaacagaatgcagtgggttaaaaraaaatacagtggttgtcttcaaagactgtgggcagaaaccacaggaatgcccactacctattgagactcatacagctttcattgcattcatatatttttctgggatgctgggagacaaggataggacatgggctgtgtcttgcccctccctcaggtgagatttgaagcccatcctcatttttcccaagttacaactagtaatgctacaagtcttttgggggagaattggtggtgtagtggttggcaaaagataccagaagacaatgtgtaggacaaagaccttgttcatatgggtctggaaggaagactctgaaatgaatgaaaacttactattgtaaattgttgtactaattaaaagcagttgggaatcatgagtccaacctca

SEQ ID NO: 17489 - DNA, 544 bp, Homo sapiens
gtgagaggataaatttttgttgtcataagccactaaggttgtggtgatttgtttcagtgcccctaggaaactaatacaggtcaggtccattcttggttcaggagaggcagggtaccttaactgacagcttcactgtaacagaatgcagtgggttaaaagaaaatacagtggttgtcttcaaagactgtgggcagaaaccacaggaatgcccactacctattgagactcatacagctttcattgcattcatayatttttctgggatgctgggagacaaggataggacatgggctgtgtcttgcccctccctcaggtgagatttgaagcccatcctcatttttcccaagttacaactagtaatgctacaagtcttttgggggagaattggtggtgtagtggttggcaaaagataccagaagacaatgtgtaggacaaagaccttgttcatatgggtctggaaggaagactctgaaatgaatgaaaacttactattgtaaattgttgtactaattaaaagcagttgggaatcatgagtccaacctca

SEQ ID NO: 17490 - DNA, 544 bp, Homo sapiens
gtgagaggataaatttttgttgtcataagccactaaggttgtggtgatttgtttcagtgcccctaggaaactaatacaggtcaggtccattcttggttcaggagaggcagggtaccttaactgacagcttcactgtaacagaatgcagtgggttaaaagaaaatacagtggttgtcttcaaagactgtgggcagaaaccacaggaatgcccactacctattgagactcatacagctttcattgcattcatatatttttctgggatgctgggagacaaggataggacatgggctgtgtcttgcccctccctcaggtgagatttgaagcccatcctcatttttcccaagttacaactagtaatgctacaagtcttttgggggagaattggtggtgtagtggttggcaaaagataccagaagacaatgtgtaggacaaagaccttgttcatatgggtctggaaggaagactctgaaatgaatgaaaacttacyattgtaaattgttgtactaattaaaagcagttgggaatcatgagtccaacctca

SEQ ID NO: 17491 - DNA, 592 bp, Homo sapiens
tttaaatgttggtccccatagggttcctttggaaagaaaacagtttcrtggctaaaagtaatcctgaagcctctgctctagtccaatctctgccattcataggttttcagggccagagaggggcggggcctttcccagtgtcccacagccagttaatggccaacctgagactgggtccacatcttctgacttccagaccaaagggatctcctccatggactttgccttctgtggtttgcatgtggttcccatctcctcctcttctttttccaggggaaggagaagttcctgggcatcctgaacaaatacatggagatccatggcaccgtgtactacgagagccagcggccccccgaggtgccagcctttgtgaagaaccacggcctcttaccgcagcctgagtttcagcagctgctgcgcaaggccaaagtgagctcccatcccccgcaccattctcacacttgccggctgcagacactgaggtcaccacccatgcctgccaccaccactcaggccccttccacatatggacataccccagcatgctctgctgccctgagccccacatctggccagagcccaggggcagaga

SEQ ID NO: 17492 - DNA, 588 bp, Homo sapiens
catataaagtatattaaagatgttaaatgaaaaaagcttatgaataatgaagacagagagtgaatagttcagatgaatattattttgacccttgaatatacaatctgctctttaaaaagagaaaacaattttgttctctgtcttgaaaacagaaccccactgttaactcttctcacaagagtcaacctctgagaggtcattctctattttgtagctttgccctgatttcttgagtcattttaaataagtctctaattytgaaaaagtcaaatttaggtagtagtatgcctaatttaaatattatttttctggctttaataatttcctgttttcagaaaactatcccatgtttatatcctgattgattaaatgtttgacaattcttttttcttttccttttcctaatctaggtacacagattaaacccggcaaaaaaaagaaattaattacgtagtgataaaatataactaatataaatttcaataatcatttgcttttcaggttggatagaacatacttaggttatgtataatgattgaggcaaagctgtcaacaaattagtttattcctggatacaaaactccttgt

SEQ ID NO: 17493 - DNA, 601 bp, Homo sapiens
cctgggggaggttcagcccagacccgtacgctggtccttatctgctcttccccttgtgccaaactagatgcaggtggcrcaatctccatgttggggacagcaagactctggggactcatctggccctggccgggtgaccaagttacttaatttttcagatttttccacatcggaacagcagcagggagtcacagcacctccccgtggagccagtgttaggggtgcaggagccacagaagccagctgcccgcccgcccagcccataagcctgtgccccatctttaattttggagacccaaaagtgaggtttccaaatgaaagaattggctccattgggacccttctgcgctggggcagtcctgacgcttttgtgttatccttcaggggctccacgtggaaggcttatgctagagcgaaactacctcccaacaacattcagaacaaccagcctcccttgtcaagagccagttgtgcactgcaggaaatactcagaagcgcctgccctgtgctaggctcagttctaagggaactcaaatccagtgcctgacctcagggagtttaccttctagtcaggaagacaacgaacacacagacattagta

SEQ ID NO: 17494 - DNA, 601 bp, Homo sapiens
cctgggggaggttcagcccagacccgtacgctggtccttatctgctcttccccttgtgccaaactagatgcaggtggcacaatctccatgttggggacagcaagactctggggactcatctggccctggccgggtgaccaagttacttaatttttcagatttttccacatcggaacagcagcagggagtcacagcacctccccgtggagccagtgttaggggtgcaggagccacagaagccagctgcccgcccgcccagcccatragcctgtgccccatctttaattttggagacccaaaagtgaggtttccaaatgaaagaattggctccattgggacccttctgcgctggggcagtcctgacgcttttgtgttatccttcaggggctccacgtggaaggcttatgctagagcgaaactacctcccaacaacattcagaacaaccagcctcccttgtcaagagccagttgtgcactgcaggaaatactcagaagcgcctgccctgtgctaggctcagttctaagggaactcaaatccagtgcctgacctcagggagtttaccttctagtcaggaagacaacgaacacacagacattagta

SEQ ID NO: 17495 - DNA, 768 bp, Homo sapiens
gaaccctggagaacctgccgctgccttctggcaatttccagcagccagcatggggtcttacacagggaggtgcccagcctcggggacatgcagtgacatcccactcacatcccctggggtccccccttgctcagccccccaagaacaagctgtcatttagaagactgccaaaatgcttcctctttaagcagccttccaggactgtgagaagagaaataacacggaattccacccaaaatgcgcacgcagatgaacacacacacacacacacacacacacacagtctacctcatcatctcctccagataaaagygcttacccttgtcgagcacagaaaatgagatgtgtttggtgttcatgagtgaggcatagactatatgggcccagaggcttctatctgatttgctgatgccacaaggtcagcagtgggcagggcaatggtttggaacaaaaagaacataggctattgtcctggctttgttactcacttgctgtgctaaatgagcaagttgctagcctcttctgagtccgtgatctcagcaggtgtgggagtaaagggtatcgaagctccccattgctctactgtttcaggattcttagtagagcacccagggatgaaagaacggggtgtatggtgagggagtgggagccaggaggcaggggccaccttccaggggcatctctgggtttctgcacagctcccagccctactgcacacagcctgtcctcctcctctggctgggagccccatgcagtcacaggtgggcc

SEQ ID NO: 17496 - DNA, 511 bp, Homo sapiens
atayatatatatatatatatataaaacataatgtggtatttgttcctgtatactctcatagatatttgaactaaaatttctatacaatgagagaggttgaacaattaatgctttatgagattcctaaataattaaagggttagatttgatgctaacaggagttagtaacacagaggggatggaagttggagccgagagctgcaacagtgcctcctgccacatcatgtgaactcaggaaccctatgagtaaacaactgggtgcttacatgatttgccagccaccaaacacacgttgggatctcttccccctctgcttgtaggacccctgatcattcaagatcaatatttccaaagaaaacaaaatcattcattgacacttaggactctgtggctctgtgcccactagtggtattgtcaccaaagactaacaatgatctttggcgaattgtcaagactttgatgagctcctgtgctcaggtgccaatctgcaaacctgaatgctccgagggta

SEQ ID NO: 17497 - DNA, 564 bp, Homo sapiens
tccaggggaaaagtcctttgtttagaagacagccctgaggttcccccaggggcacaagggttaatgcaggtctcaggatgtgcataatcaaactcagacagcagctgctgagttgcagctaatccttagagaactgcatcagacctcctctttctctcacagtgaaattgcctggcaccaggcctgttccggctgtttggaccttatgttttcggcacattgcaaacaacatcttcttgtggattcaactctcaacacgccaatgggtttctctgttttgctttttctagctagctctccagaagcaaatacttaaaacataagcacacaccctgtccacaagctgaacatcacatataaacagcttgggaatgtgaggagaggctctggaaaggaaaaggcagtaagactccctgtaaatgaattattactgctcctctaatcactttgacaatcaatacttcaagaaacagtaagagtgagkgaagcagcagaaatcacctttagaaactgctaaatgtatagatctcacgctaatttctaatactaatctggtgttcccat

SEQ ID NO: 17498 - DNA, 1615 bp, Homo sapiens
tgaattcaacccatgtagcaaagcagaaacttgaaaaaacatagctaaacaaacgagtagaatccatcaatatctgtaacagcatttgaattaaaactttttccctaaagggtactcagttaaataaattgcaatgtattaattcaacaagtatttgttaagcatctgtttttgtttgtttgtttgtttgttttgagacagagtcttgcactgcccccaaggctggagtgcaatggcgcaatccgggctcactgcaagctcagcctcccaggttcacaccattctcctgcctcagcctccccagtatctgggactgcaggcacccaccaccaccccagctaattttttgtatttttagtagagacggagtttcaccgtgttagccaggatggtctcgatctgctgacttcgtgatctgcccgtctcggcctcccaaagtgctgggattacaggcgtgagccaccgcgcccggccaagcatcttaaaataagcccaacgtagtaataagtggtaggaatctagtaaattagaaataaagtcactttttctccacattcttccaatgggagaacgtaactgaaaataaaaatttgcaataaaatgtggcaagagaagtaatggaagaacaccagaaatggtgaatgaaattgggcattttggtgaaaacagttaaaatcttcaagaaaacataaaatatttaaactgtaaatttaagcaggtccattatgctgtttgaaagtacaggagtattcacttcatagagagaagcatgaatagaaagtctagaaggattaatgttaagcaaacatttagattttaactttttgcttttgtgaataatagagcaaaaagtctttgtacctctattrtattattggctaaaagcagaatactgatttaaagactatgagcttcctaaaaataaggcttgtgactattatacttattaccactggtagtgcatattgtttttcataacctttgtattgtagttctttgtgcaataatgtttaggtggcactttgtcatgtagctgtcagtattgcaaatgaagcattattaacataattgtttttcctttttcagaagtctgctctttttgcatggaaacttgtaaaactttctgcttatcttttatggttagtcacatatgttgatttatatattttctttgtattcctcaagacttgggagaccttttacacaaagatttacatgttgcagttcaaagaaattttaaaactatctattgaattattacttctccattctttaatttgtatctttttaggacttcttatacttaagttaccgttttctggggtttgtccttgaaatcagtagttgttttttcacttttaatttagattacattccgtttttttatccaagatatgacacatttctttcaaaagactgtttgcttttgttttgttattgttgtcttatgtaaccttttgggctgtaatcaaaaatccttggaaatctgttttgtttcttgttaaaattttcttctttgagtttcattgttgctgattccacaggatctttctttactaatttttaatttgtttttactcatcgccttactgaatctctactttttacatgttca

SEQ ID NO: 17499 - DNA, 522 bp, Homo sapiens
tcatggaagttgtcacatagtttctaagtaaaggtctaaagggaacttacattgcagtacagagctttttgtatgcctgttacatgacttgaggaggtcttcagaaatgtattctaatcatagaatataccctcttctctgaaattaaatagaattatggtagaatatgtttatcagcaagctggatagaattcagttctgactgcttatctaccccacccccagaaaaaccagttagctcagtgtggcaggagcttaggaccagtttatagaagtatatttacgggttttcttgagctcagaccttgcacacagctattgcatctctactttgtgactggaacaccttccctctttgagagttttgtacgttatctacagaatgaatgagagcaatgagcttgtacctaagcaatatctgtcccatggaaaaggtgccatccaygaactcatcatcagccatttaagatggcaatgaacgaagtgaaagttaaatcttcaggtgttatacttgaaaagtct

SEQ ID NO: 17500 - DNA, 1947 bp, Homo sapiens
tgatagttatgaaataactgagaatatctttaagttgcccctgagctcctgagagaaatgacaatgtctaattcttattaatttacatacaacccttctttggttccaaaatgaacaggcagtggtatttatttttatgtataacacagcactgagtgtagaaaattaaacataaaataaatgttttaattaaaatgaactgagagttcaattttatttattaaataggcaaatcaaaggcgttgattttatgcattttaaacaagttatcaatatgtgggttttacattaaatacaaaaaagctgaaaacayggaaagtatttaatatagatatgcaaatgtttataactaaactatattagatgagatctaatctaattaattgtttcttagttgtattatttcttagatgaaatcatctaagaaagcttaaatctttaataaaatggtgatatatatttctcaataagataaaaaatattgtcatggatattcttacattagtatagacacttaaattatttgcatatacagaaattgttgatcaactctaaaatagtttagttataggatctaactaaactaaaaagcttctgcacagcaaaagaaactaccatcggagtgaacaggcaacctacagaatgggagaaaatttttgcaatctactcatctgaaaaaaagctagtatccagaatctatgaagaactcaaacaaatttacaagaaaaaaacaaaacaaccccatcaacaagtgggcgaaggatatgaacagacgcttctcaaaagaagacatttatgcagccaacagacacatcaaaaaatgctcatcatcactggccatcagagaaatgcaaatcaaaaccacaatgagataccatcttacaccagttagaatggcgatcattaaaaagtcaggaaacaacaggtgctggagaggatgtggaagaataggaacacttttacacttttggtgggactgtaaactagttcaaccattgtggaagacagtgtggcgattcctcaaggatctagaacaagaaataccatttcacccagccatcccattactgggtatacacccaaaggattataaatcgtgctgctataagaagatgtgcacacgtatgtttattgcagcactattcacaatagcaaagacttggaaccaacccaaatgtccatcaatgataggctggattaagaaaatgtggcacatatatgccatggaatactatgcaggcataaaaaaggatgagttcatatccttcatagggacttagatgaagctggaaaccatcattctcagcaaactatcgcaaggacaaaaaaaccaaacactgcatgttctcactcataggtgagaattgaacaatgagaacacttggacacaggaaggggaacatcacacactggggcctgtcatggggtggggtgagtggggagagatagcattaggagttatacctaatggaaatgatgagttaatgggtgcagcacaccaacatggcatatgtatacatatgtaacaaacctgcatgttgtacacatgtactctagaacttaaagtataataataacaaaaaaaagaaaacaattaagtgttctgttgaatatacaagagttaattcaaaagaaaaacgatctaagtacttgaagcatgatcatggttgcacagggggtttacctacattttttgaaaagtaaaagaataaaagtcattaccaccaaaatttggcatccttttgcaaatcatctaatatgtcaagaagaatttagcttaatttatcttttttttttttttttttgagatggagtcttgctctgtcgcccaggctgaagtacagtggcacgatctcggctcaatgcaagcttcgcctcccaagttcacacattctcctgcctcagcctcccgagtagctgagactacaggcgcccgccactatgccc

SEQ ID NO: 17501 - DNA, 1947 bp, Homo sapiens
tgatagttatgaaataactgagaatatctttaagttgcccctgagctcctgagagaaatgacaatgtctaattcttattaatttacatacaacccttctttggttccaaaatgaacaggcagtggtatttatttttatgtataacacagcactgagtgtagaaaattaaacataaaataaatgttttaattaaaatgaactgagagttcaattttatttattaaataggcaaatcaaaggcgttgattttatgcattttaaacaagttatcaatatgtgggttttacattaaatacaaaaaagctgaaaacacggaaagtatttaatatagatatgcaaatgtttataactaaackatattagatgagatctaatctaattaattgtttcttagttgtattatttcttagatgaaatcatctaagaaagcttaaatctttaataaaatggtgatatatatttctcaataagataaaaaatattgtcatggatattcttacattagtatagacacttaaattatttgcatatacagaaattgttgatcaactctaaaatagtttagttataggatctaactaaactaaaaagcttctgcacagcaaaagaaactaccatcggagtgaacaggcaacctacagaatgggagaaaatttttgcaatctactcatctgaaaaaaagctagtatccagaatctatgaagaactcaaacaaatttacaagaaaaaaacaaaacaaccccatcaacaagtgggcgaaggatatgaacagacgcttctcaaaagaagacatttatgcagccaacagacacatcaaaaaatgctcatcatcactggccatcagagaaatgcaaatcaaaaccacaatgagataccatcttacaccagttagaatggcgatcattaaaaagtcaggaaacaacaggtgctggagaggatgtggaagaataggaacacttttacacttttggtgggactgtaaactagttcaaccattgtggaagacagtgtggcgattcctcaaggatctagaacaagaaataccatttcacccagccatcccattactgggtatacacccaaaggattataaatcgtgctgctataagaagatgtgcacacgtatgtttattgcagcactattcacaatagcaaagacttggaaccaacccaaatgtccatcaatgataggctggattaagaaaatgtggcacatatatgccatggaatactatgcaggcataaaaaaggatgagttcatatccttcatagggacttagatgaagctggaaaccatcattctcagcaaactatcgcaaggacaaaaaaaccaaacactgcatgttctcactcataggtgagaattgaacaatgagaacacttggacacaggaaggggaacatcacacactggggcctgtcatggggtggggtgagtggggagagatagcattaggagttatacctaatggaaatgatgagttaatgggtgcagcacaccaacatggcatatgtatacatatgtaacaaacctgcatgttgtacacatgtactctagaacttaaagtataataataacaaaaaaaagaaaacaattaagtgttctgttgaatatacaagagttaattcaaaagaaaaacgatctaagtacttgaagcatgatcatggttgcacagggggtttacctacattttttgaaaagtaaaagaataaaagtcattaccaccaaaatttggcatccttttgcaaatcatctaatatgtcaagaagaatttagcttaatttatcttttttttttttttttttgagatggagtcttgctctgtcgcccaggctgaagtacagtggcacgatctcggctcaatgcaagcttcgcctcccaagttcacacattctcctgcctcagcctcccgagtagctgagactacaggcgcccgccactatgccc

SEQ ID NO: 17502 - DNA, 1947 bp, Homo sapiens
tgatagttatgaaataactgagaatatctttaagttgcccctgagctcctgagagaaatgacaatgtctaattcttattaatttacatacaacccttctttggttccaaaatgaacaggcagtggtatttatttttatgtataacacagcactgagtgtagaaaattaaacataaaataaatgttttaattaaaatgaactgagagttcaattttatttattaaataggcaaatcaaaggcgttgattttatgcattttaaacaagttatcaatatgtgggttttacattaaatacaaaaaagctgaaaacacggaaagtatttaatatagatatgcaaatgtttataactaaactatattagatgagatctaatctaattaattgtttcttagttgtattatttcttagatgaaatcatctaagaaagcttaaatctttaataaaatggtgatatatatttctcaataagataaaaaatattgtcatggatattcttacattagtatagacacttaaattatttgcatatacagaaattgttgatcaactctaaaatagtttagttataggatctaactaaactaaaaagcttctgcacagcaaaagaaactaccatcggagtgaacaggcaacctacagaatgggagaaaatttttgcaatctactcatctgaaaaaaagctagtatccagaatctatgaagaactcaaacaaatttacaagaaaaaaacaaaacaaccccatcaacaagtgggcgaaggatatgaacagacgcttctcaaaagaagacatttatgcagccaacagacacatcaaaaaatgctcatcatcactggccatcagagaaatgcaaatcaaaaccacaatgagataccatcttacaccagttagaatggcgatcattaaaaagtcaggaaacaacaggtgctggagaggatgtggaagaataggaacacttttacacttttggtgggactgtaaactagttcaaccattgtggaagacagtgtggcgattcctcaaggatctagaacaagaaataccatttcacccagccatcccattactgggtatacacccaaaggattataaatcgtgctgctataagaagatgtgcacacgtatgtttattgcagcactattcacaatagcaaagacttggaaccaacccaaatgtccatcaatgataggctggattaagaaaatgtggcacatatatgccatggaatactatgcaggcataaaaaaggatgagttcatatccttcatagggacttagatgaagctggaaaccatcattctcagcaaactatcgcaaggacaaaaaaaccaaacactgcatgttctcactcataggtgagaattgaacaatgagaacacttggacacaggaaggggaacatcacacactggggcctgtcatggggtggggtgagtggggagagatagcattaggagttatacctaatggaaatgatgagttaatgggtgcagcacaccaacatggcatatgtatacatatgtaacaaacctgcatgttgtacacatgtactctagaacttaaagtataataataacaaaaaaaagaaaacaattaagtgttctgttgaatatacaagagttaattcaaaagaaaaacgatctaagtacttgaagcatgatcatggttgcacagggggtttacctacattttttgaaaagtaaaagaataaaagtcattaccaccaaaatttggcatccttttgcaaatcatctaatatgtcaagaagaatttagcttaatttatcttttttttttttttttttgagatggagtcttgctctgtcgcccaggctgaagtrcagtggcacgatctcggctcaatgcaagcttcgcctcccaagttcacacattctcctgcctcagcctcccgagtagctgagactacaggcgcccgccactatgccc

SEQ ID NO: 17503 - DNA, 1947 bp, Homo sapiens
tgatagttatgaaataactgagaatatctttaagttgcccctgagctcctgagagaaatgacaatgtctaattcttattaatttacatacaacccttctttggttccaaaatgaacaggcagtggtatttatttttatgtataacacagcactgagtgtagaaaattaaacataaaataaatgttttaattaaaatgaactgagagttcaattttatttattaaataggcaaatcaaaggcgttgattttatgcattttaaacaagttatcaatatgtgggttttacattaaatacaaaaaagctgaaaacacggaaagtatttaatatagatatgcaaatgtttataactaaactatattagatgagatctaatctaattaattgtttcttagttgtattatttcttagatgaaatcatctaagaaagcttaaatctttaataaaatggtgatatatatttctcaataagataaaaaatattgtcatggatattcttacattagtatagacacttaaattatttgcatatacagaaattgttgatcaactctaaaatagtttagttataggatctaactaaactaaaaagcttctgcacagcaaaagaaactaccatcggagtgaacaggcaacctacagaatgggagaaaatttttgcaatctactcatctgaaaaaaagctagtatccagaatctatgaagaactcaaacaaatttacaagaaaaaaacaaaacaaccccatcaacaagtgggcgaaggatatgaacagacgcttctcaaaagaagacatttatgcagccaacagacacatcaaaaaatgctcatcatcactggccatcagagaaatgcaaatcaaaaccacaatgagataccatcttacaccagttagaatggcgatcattaaaaagtcaggaaacaacaggtgctggagaggatgtggaagaataggaacacttttacacttttggtgggactgtaaactagttcaaccattgtggaagacagtgtggcgattcctcaaggatctagaacaagaaataccatttcacccagccatcccattactgggtatacacccaaaggattataaatcgtgctgctataagaagatgtgcacacgtatgtttattgcagcactattcacaatagcaaagacttggaaccaacccaaatgtccatcaatgataggctggattaagaaaatgtggcacatatatgccatggaatactatgcaggcataaaaaaggatgagttcatatccttcatagggacttagatgaagctggaaaccatcattctcagcaaactatcgcaaggacaaaaaaaccaaacactgcatgttctcactcataggtgagaattgaacaatgagaacacttggacacaggaaggggaacatcacacactggggcctgtcatggggtggggtgagtggggagagatagcattaggagttatacctaatggaaatgatgagttaatgggtgcagcacaccaacatggcatatgtatacatatgtaacaaacctgcatgttgtacacatgtactctagaacttaaagtataataataacaaaaaaaagaaaacaattaagtgttctgttgaatatacaagagttaattcaaaagaaaaacgatctaagtacttgaagcatgatcatggttgcacagggggtttacctacattttttgaaaagtaaaagaataaaagtcattaccaccaaaatttggcatccttttgcaaatcatctaatatgtcaagaagaatttagcttaatttatcttttttttttttttttttgagatggagtcttgctctgtcgcccaggctgaagtacagtggcrcgatctcggctcaatgcaagcttcgcctcccaagttcacacattctcctgcctcagcctcccgagtagctgagactacaggcgcccgccactatgccc

SEQ ID NO: 17504 - DNA, 600 bp, Homo sapiens
cttaattgatctgctacagggaggggagaatttggagcaggaaagctctcatctaggaacaactgagccagagtcagaacaccttgcgagacagctctgggtayggatttgagccctgccactcatgagctctgagcatattccttaacgtctgtgccttgggttcctcatctataaactaggactaaccgttcacctcacagagtggctgtgaagattacaggataaagtgtatataaaaagccctataggctcagagcaatggcttgcacctgtgattccagcactttgggaggtcaaggcaggaggatcactggagcccaggagtttgagaccagcctgggcaacactgcatgaccttgtctctaaaaataatttaaaaattagccaggtatggtggcgcatgtctgtagtctcaactactcgggaggctgaaatgagccatgatcacaccactgtactgtagcccagtccacaaagcaaggtcccaccccacaaaaaaaaaaaaaaaaaaaaaaaaagccctaaagccctacacaggcctagtacatgaaagcacccccaaaatggcaaccactatcaccattaccattattttta

SEQ ID NO: 17505 - DNA, 540 bp, Homo sapiens
caccatactggccaggctggtcttgaactcccaacctcaggtgatccacctgccttggcctctcaaagtgctgggattacaggtgtgagccaccatgcccggctgtacccagtkattttctttgggaaaaaatgtactggtagtaaagttgatgtggaaaaaaaaaaagactttcctactcaagcatgtacttgttacctgtttcgcaagagtctatggaaaatactgaaatggggcccgagtcttcatatttgcaatagactttgactattgcttataatgaagtgagattctgcaaaaatttttctccctactgaaatgggccgtgtctctgcaataagggagaataatgtatatatattttctgtttaaaaaaactgtttagaaatcacattggtctatttttttcacatttccataaataagtaagaagagactcctccttagtgtcccaaatgagtaaaaaagttacaacagaatgtcttatggaaagcgttagaggggtcagaatgtcctcctttctttcccacttcctgtcag

SEQ ID NO: 17506 - DNA, 1115 bp, Homo sapiens
gatggatctcacccacaccctctaatgagcacatttctccatcctggggctgctatcctaatgtatttccagtagctccaagttctctagcaagaaagtaaccatcaattcagttacaaagattaccagctggttctctggtttattgctgtaattcctctaaagcaagcatctgcgggtaaggacgatgttctgcctttccacattaacgttgcttaaatgagaagagtcacttccatgtgtccttggagcgcaggattccagcagcacatgggaggctcccatcaccctgtgaaagccaggatttgcctggaaaatattgggggtgtgtactctgtgagtacacatgggggtagaggcaggaggcgacctggatacagcaggtgactttgcccctcacctgggtaaatgcagacacagggatgcggtgccccactaggtgtggagcccttayatacaataatagcaggcatttatttagcaaacacttacacagttctcactgtgtaccagtactaagtactaagaacttccaagtactaattcatttgatgctccaaatatccctacaaagtactttattattcctgtttcacagacaaggaaactggggcacagacaggttgaacaatgttcctgtagctgagccaggatttgaacccaggtagttggttgcagggatggagttcaaaatgcgtttcccattgagaggaccaaaaatatgtagtgaagccataccaagtctgagttgagcaaaaccaagcatgaatgaaataaaggcctcagcacagctcatagtcactgacatacagaaggaggataaaggaggccctgcctagcctgggggttggggaagggtcaatcacagcggttataacacctcattctcttgagtaggacttaccacatgggaatctggcatctcgaccctcctgagacatgtcccattgtgcagatgtggaaactgaggttcagagacattgagcgggttacctgaggtcacacagcctggaagtgcaaggctgggactcaaagccagcctccccgtccctatacctcatgctttttttctgcacctttcagcccagctgccagacctcagcactagagagcag

SEQ ID NO: 17507 - DNA, 829 bp, Homo sapiens
ttcaaataattatattattcagattcaccaagaccctatattgctgaaacgagacaggccaataaagatatttattaaattatgatgacaacatctgttttagaaatgtaaattaattatactgaacagaataattatttgatctttagccgttttaggtcttcagttgggacagacccagaagagtgtgtgtgtgtgttcgtgtgtgtgtgtgttctggctgtttctgcaggtgtctctgagagacttcgattagtaaagggtctaggttaggttcactaatgtccacaaaaggatgacagtcaaaccatcagcttttctggtctccagtgtaakagcttcaccttcaaccagtaactgtgaatctacagtcaaggccagacttgatggcaataacaatcacaattgattgcaacaaaatcatcattttaaaaatctgaaaaaaacagcgattatatcttatggagaatttctaaaagtggactttcaaatcagtgtaaatcagcgtagtcaataaacagcaatcacttatttgctacatgttaccttagcattctgaggagttgccaatcatgacaatggtcataatcaaaagatgctgtaaccatactattacatcttttcattacacttgctgaaggcacgttgttgaggacattttctattatatgactaccttccctatattaagtcttatgtttgaaacatcttttagaatttagtactagagatatatctttaacctccaaccaggacctgttatgcttaatccccactgaaaataaaattatgtaactgtctatgtttccctttttgttttgatgaccaa

SEQ ID NO: 17508 - DNA, 1109 bp, Homo sapiens
tgcactaggcaccaacagaccaaactaaatatcaaaatggagtcactcatgctaaagttccaaagcgaaaactaggttgttatctgacctgagaaatcaggagaaagagataacagccaatttcccaaacagcccagtctaaaatctttaactggcacaatgatgaagttccctctgctttaatccttactaaaaaaggtagcccgaagtaacctgatgttaactggttaattttctattgttctgtttaaaagtaaccaatacactgttcagacttcttaagcccttctgtccataagccaaactcttctgctcaacttactggaacacttattctatgaaatgaaatgttgtccgattctagaatcgcaaataaagccaactgggatcatcaaactaaacttgcaattttgtcttttgacagaaggaagccctgcgttcttggctgcagtagcctggacgggaatttccaccttgctgaccagactttgtttcttaccgaatttgcacagatgttcttgaataatgttccttcattttctgcttactcttaggacgatttccagagactttaaatgactgggttttgttttctttaatagttttcacttgtttcagcaagcaaggcaggtcagcagagctcctcacaccttggcggcagaagttgatctctctctcacatgaaggcgtaaggaagcactgtgctagagctctatatatgcgatctcatttaatcttcacaactataatacaaatattctagatcttaccttatacagacctggaacctgtgcaccagaatcatctagtaatttgctctaagtaaaagggcaaataggtgacagagatctgaktcaaacctaggtctaaatacatccaaagcccaggttttcttgactaagcccctttcatcttttttacacagacatttttaaaaatcagagctcatgagacagttctatccctgtgcagtctcaataatttctttaggtaatacactattttcttccacatctggatcttttataataatattacttaatagtatcaataataacatttcaaattctattgttatatattacataatatgtgttacaatatataat

SEQ ID NO: 17509 - DNA, 1109 bp, Homo sapiens
tgcactaggcaccaacagaccaaactaaatatcaaaatggagtcactcatgctaaagttccaaagcgaaaactaggttgttatctgacctgagaaatcaggagaaagagataacagccaatttcccaaacagcccagtctaaaatctttaactggcacaatgatgaagttccctctgctttaatccttactaaaaaaggtagcccgaagtaacctgatgttaactggttaattttctattgttctgtttaaaagtaaccaatacactgttcagacttcttaagcccttctgtccataagccaaactcttctgctcaacttactggaacacttattctatgaaatgaaatgttgtccgattctagaatcgcaaataaagccaactgggatcatcaaactaaacttgcaattttgtcttttgacagaaggaagccctgcgttcttggctgcagtagcctggacgggaatttccaccttgctgaccagactttgtttcttaccgaatttgcacagatgttcttgaataatgttccttcattttctgcttactcttaggacgatttccagagactttaaatgactgggttttgttttctttaatagttttcacttgtttcagcaagcaaggcaggtcagcagagctcctcacaccttggcggcagaagttgatctctctctcacatgaaggcgtaaggaagcactgtgctagagctctatatatgcgatctcatttaatcttcacaactataatacaaatattctagatcttaccttatacagacctggaacctgtgcaccagaatcatctagtaatttgctctaagtaaaagggcaaataggtgacagagatctgattcaaacctaggtctaaatacatccaaagcccaggttttcttgactaagcccctttcatcttttttacacagacatttttaaaaatcagagctcatgagacagttctatccctgtgyagtctcaataatttctttaggtaatacactattttcttccacatctggatcttttataataatattacttaatagtatcaataataacatttcaaattctattgttatatattacataatatgtgttacaatatataat

SEQ ID NO: 17510 - DNA, 569 bp, Homo sapiens
ttatcatacatagtgaaggcctactataccttcttgacaaacaatgctatccttcaaatcttgtaatgctttcatttctttaaaataaagtatcccctcccatactatattgagtataaatttctatcaccattagctytgacattaactaatcacatatacaaagccaattaaatataaaattaagaaataatgatacctcttttaaaaaggactagcacttaccctaaagatactttgacacacaaaaaaacactagatcgctagggaaactttaaaaacacaaacacacacacacacacatccatgcagccacaactgactagtcattaataagaagattcattttaaaagtgattctatgcttttaaatacattttatcgtgcaggaaggagcaaatgtttaaaataaaaattaaaaaattttaaactagcaagtgttcatattgataaattttttttaaaatgaggaaattagacaaataaagtatataaagaaacttttctctgtagttagttgccaaaagaaaaaataaaagacacatcaatttagatttggaagtttaccc

SEQ ID NO: 17511 - DNA, 569 bp, Homo sapiens
ttatcatacatagtgaaggcctactataccttcttgacaaacaatgctatccttcaaatcttgtaatgctttcatttctttaaaataaagtatcccctcccatactatattgagtataaatttctatcaccattagctttgacattaactaatcacatatacaaagccaattaaatataaaattaagaaataatgatacctcttttaaaaaggactagcacttaccctaaagatactttgacacacaaaaaaacactagatcgctagggaaactttaaaaacacaaacacacacacacacacatccatgcagccacaactgactagtcattaataagaagattcattttaaaagtgattctatgcttttaaatacattttatcgtgcaggaaggagcaaatgtttaaaataaaaattaaaaaattttaaactagcaagtgttcatattgataaattttttttwaaatgaggaaattagacaaataaagtatataaagaaacttttctctgtagttagttgccaaaagaaaaaataaaagacacatcaatttagatttggaagtttaccc

SEQ ID NO: 17512 - DNA, 655 bp, Homo sapiens
tgtgtgcaagaaatgctaccatcattagggcaccaacaaatgagtgccctcgggcttccctgcaaaccccaaggcctagttgggccccccagagtggcgcgggttccccttactccctgccgcccagcggggcacttggcacggcctggggcgaacgtgccactcggagaataaagcgcttcctccgcagggcggccctgccaggctgccggggtcttgcgtcccggaaacgcctccccccagccagccaggggaagcctgggcggagctttctaggaagcagccctagcctgcctggccttctcccgcctggaggagagagagcttgaggtcacaaggccctactggctgctgggcacgagcccagggagcgggtcacctcattgctgagtgacaggtctctcctggaccccaaagtccctctaaacagggccccaagcactgaaaatatcccagtgtcccagtacctattcataattttataattacattatatttatttatataaaaagaaagagacacaaacagatatgtaagagtaggattggggcaagaatacaaggacactyagctctatctgaaatgtttatttattgcaaaataaagtgattagaagcaaatgggagaaagaaggcttgttttaggtggtgaaaat

SEQ ID NO: 17513 - DNA, 592 bp, Homo sapiens
cattatatacaaatgatttgaatttcaaatgtgagtacatgataaaatccaggtgtttaatcttttcagagaaaaagaacaaatcaatagttctctcagaaacttaaatgagakaaatgagtgtaacaaaaaggatttaagtcacatgatttttgaaaattgctgatttctttatcattgtgtttgagaatgacatgaatcctttagcagctaaaatttcaaagaaatagtggtgctgattttataattttgggatttattttcttgttctatcaaataattttatcatatgaaaaggagtgacagttacagattctaaaggcacaaatcaaaaatttaacatcagagaaaaatacaaagttattttaaacctgagcactcattaaaaaaaccttaaatttaatcttaggagatttagtagcattacatcataacaatttattaaataaccttagctacccaggtatctgggaactttttaaaaaatggctctaacttttgataaccactttatcatattcaacattgttgaactgcaatttatgagaaactataagatgccattttgggtgctcagcttactgaaaggacc

SEQ ID NO: 17514 - DNA, 592 bp, Homo sapiens
cattatatacaaatgatttgaatttcaaatgtgagtacatgataaaatccaggtgtttaatcttttcagagaaaaagaacaaatcaatagttctctcagaaacttaaatgagagaaatgagtgtaacaaaaaggatttaagtcacatgatttttgaaaattgctratttctttatcattgtgtttgagaatgacatgaatcctttagcagctaaaatttcaaagaaatagtggtgctgattttataattttgggatttattttcttgttctatcaaataattttatcatatgaaaaggagtgacagttacagattctaaaggcacaaatcaaaaatttaacatcagagaaaaatacaaagttattttaaacctgagcactcattaaaaaaaccttaaatttaatcttaggagatttagtagcattacatcataacaatttattaaataaccttagctacccaggtatctgggaactttttaaaaaatggctctaacttttgataaccactttatcatattcaacattgttgaactgcaatttatgagaaactataagatgccattttgggtgctcagcttactgaaaggacc

SEQ ID NO: 17515 - DNA, 592 bp, Homo sapiens
cattatatacaaatgatttgaatttcaaatgtgagtacatgataaaatccaggtgtttaatcttttcagagaaaaagaacaaatcaatagttctctcagaaacttaaatgagagaaatgagtgtaacaaaaaggatttaagtcacatgatttttgaaaattgctgatttctttatcattgtgtttgagaatgacatgaatcctttagcagctaaaatttcaaagaaatagtggtgctgattttataattttgggatttattttcttgttctatcaaataattttatcatatgaaaaggagtgasagttacagattctaaaggcacaaatcaaaaatttaacatcagagaaaaatacaaagttattttaaacctgagcactcattaaaaaaaccttaaatttaatcttaggagatttagtagcattacatcataacaatttattaaataaccttagctacccaggtatctgggaactttttaaaaaatggctctaacttttgataaccactttatcatattcaacattgttgaactgcaatttatgagaaactataagatgccattttgggtgctcagcttactgaaaggacc

SEQ ID NO: 17516 - DNA, 592 bp, Homo sapiens
cattatatacaaatgatttgaatttcaaatgtgagtacatgataaaatccaggtgtttaatcttttcagagaaaaagaacaaatcaatagttctctcagaaacttaaatgagagaaatgagtgtaacaaaaaggatttaagtcacatgatttttgaaaattgctgatttctttatcattgtgtttgagaatgacatgaatcctttagcagctaaaatttcaaagaaatagtggtgctgattttataattttgggatttattttcttgttctatcaaataattttatcatatgaaaaggagtgacagttacagattctaaaggcacaaatcaaaaatttaacatcagagaaaaatacaaagttattttaaacctgagcactcattaaaaaaaccttaaatttaatcttaggagatttagtagcattacrtcataacaatttattaaataaccttagctacccaggtatctgggaactttttaaaaaatggctctaacttttgataaccactttatcatattcaacattgttgaactgcaatttatgagaaactataagatgccattttgggtgctcagcttactgaaaggacc

SEQ ID NO: 17517 - DNA, 552 bp, Homo sapiens
ctctgtctctgcttgttggaaaggcttcttggaagagatggcagctcccttatcagagctgagtgagatttcttaagtgcaggaaaggggttgaggctttcctccatttagtgggggactacagcttccttctcttcctcctactgcctgaactgggcctggttaatatcctttgtcttcacctcatctttttggctgtgactgactccctctaaatcaaacctttgccacctcgtccttcttatctcccctttctcttccttmccttgtcctattttagatagagtggggcagcaggtcaggtctcagaccagggtgggagtcagggaccagaaagctagggccagagctgcccctagtcttcagctcctgcatctgcaaaatgagggttaagggctaatctctacggactctttaaagcccgatgttctaggaatttccagagcagtgagctacccagctgagtcagagtccagaggtgcggtttcatggctgtttcttccttgttgtgacttccaccaccaccatcagtccggcagctcccaaatctgc

SEQ ID NO: 17518 - DNA, 596 bp, Homo sapiens
ctctttatgcctaaagatgaaggaagaaatacaagctcatgttacaaagagtatttcctgggtttatcagctctccccctctcagcttgagctctgaatgatttcttagttctcagcttttcttcctctgatcaaagtgcctgaggcagtgagcactgggagggcaggagcatttctggctgagcccaatgctcacctcttctgggccgttttaggaagctgtggcccagtgttctctggtcagacaagcatggcctggctgtggaagggtctccaaaggctcatgggtcccaggtgccctggattttgaaggcagctgccctgcctccactgggagaagattaaagccccctttgcctttcttcgtccctccctttcccactctgttcmctcaatcactcttttctctccaatgaattaaatgcagaaaatccatgagcaggatttctctcttcaaaggaccaaataaccttctttctattccccctaaatttttttccaaactgcaaaaagaaaacatgcaaacagacttcaagttaaaggtgagagaaagaaagaaaaattgaagcaaagtaattttaacttgagaagtagag

SEQ ID NO: 17519 - DNA, 579 bp, Homo sapiens
cttgctgtagctcaggggttataggagaacccaccctgttgagaacaactgtggaattctctagagccaaatccaaagaggacttatctctcaatgtgtgtcccccaccctaccccattgagagtggcacaacaatttaaggcctttattaagaaaaggtctaccagggtgagtgggggaagaagctgactttgggggaaatgcagtttgtcaagtggcaatggtatcttcttcctctttttgccttggggaagagaaggtatttgttttgttccttctactttctacaagattgaggggtttagtcttttctctccatagttagaaacacagtttattctctgaaagttactatgctcctaaacctgaaaccatcagaatgtgcagcactgcccatgaggggaaggagctagagagagrtggcggaagaaagagggtgctggtgtggggcaggaggcagtctgctttcccattgtctgacttgaccaagggatagggtgttccctgtggtcaagggaagactgccaatgggggcagggcttaagttatcttgctaggagcctccaagtgtgatgtcta

SEQ ID NO: 17520 - DNA, 636 bp, Homo sapiens
tccagcacacaggctagctgggaagcagcagagcaggaaggcacaagcacagattgtgggatccccctgctcttcaggtctggcccctccctcctcagtgctgtsgccttggggccagcttcttcatctctccctgcctcagttttctcatctctagagcagggataatagtaagacctacctcacaggggcattacagcattgaaagggcatcaggtacttcagatggtgcctttctaataatcactcagtaaatgcttacagttcattataaatctgaaggaacccaaaggcgaagattgagcaaagttgatttggtctgcccagtgaagaatactttctgtattttgtagtaaggctgactttaaaaatagaggtagtggatgttgttgtttctctttctctgcccttccccatgtatgtgaggcccttcaggagcacaggcacacatgcagtgccaatttactcccagatccaagggtgttcaggagtggacctcgaatttcaaatagctgtgattttatttaactttattggattctagttttattatattaccaccagagagtttggcctttaagatctctaattctttgaaatgattaagttttcctttgtggccttctttataattga

SEQ ID NO: 17521 - DNA, 636 bp, Homo sapiens
tccagcacacaggctagctgggaagcagcagagcaggaaggcacaagcacagattgtgggatccccctgctcttcaggtctggcccctccctcctcagtgctgtggccttggggccagcttcttcatctctccctgcctcagttttctcatctctagagcagggataatagtaagacctacctcacaggggcattacagcattgaaagggcatcaggtacttcagatggtgcctttctaataatcactcagtaaatgcttacagttcattataaatctgaaggaacccaaaggcgaagattgagcaaagttgatttggtctgcccagtgaagaatactttctgtattttgtagtaaggctgactttaaaaatagaggtagtggatgttgttgtttctctttctctgcccttccccatgtatgtgaggcccttyaggagcacaggcacacatgcagtgccaatttactcccagatccaagggtgttcaggagtggacctcgaatttcaaatagctgtgattttatttaactttattggattctagttttattatattaccaccagagagtttggcctttaagatctctaattctttgaaatgattaagttttcctttgtggccttctttataattga

SEQ ID NO: 17522 - DNA, 549 bp, Homo sapiens
actctaagataattacatttttgctgatagttgtactgcacctacaggttacttttttttttcttcaagcaaactgcatagttagaaagaagcagaggaagttatttccactttakttttttattttgtatttttctgagacagagtcgctttgtcgcccaggctggagtgcagtggcataatcttggcccactgcaacttccgccccccgggttcaagcgattctcctgcctcagcttcccgagtagctgggatttcaggcacctgccaccacgcctggctaatttttgtaattttagtagagagggggttttgccgtatgggtcaggctggtcttgaactcctgacctcaggtgatctggctgcctcggcctcccaaagtgctaggatttcaggcgttagccaccctgcccagcctatttccactttataaaaagattctacacaaagatatcttctaatttcctaagcaagacttttcttatacagaaaaagatatatttacatgtatatttttcagttttcctaattgtcgatccaagaattggt

SEQ ID NO: 17523 - DNA, 549 bp, Homo sapiens
actctaagataattacatttttgctgatagttgtactgcacctacaggttacttttttttttcttcaagcaaactgcatagttagaaagaagcagaggaagttatttccactttagttttttattttgtatttttctgagacagagtcgctttgtcgcccaggctggagtgcagtggcataatcttggcccactgcaacttccgccccccgggttcaagcgattctcctgcctcagcttcccgagtagctgggatttcaggcacctgccaccacgcctggctaatttttgtaattttagtagagagggggttttgccrtatgggtcaggctggtcttgaactcctgacctcaggtgatctggctgcctcggcctcccaaagtgctaggatttcaggcgttagccaccctgcccagcctatttccactttataaaaagattctacacaaagatatcttctaatttcctaagcaagacttttcttatacagaaaaagatatatttacatgtatatttttcagttttcctaattgtcgatccaagaattggt

SEQ ID NO: 17524 - DNA, 1027 bp, Homo sapiens
aacttccaccccagtggaattaacactaattatatttaattccacacaaacttttgtcccagttgtagaccatttacctacttcctgacagcaaacactacaccgctgtgaaattttattttaacacatttgtgcccattttcarcattaataatcgtgtgtggaagtggcagcaaaatgaagatatcgcctgagcatggaaccacaaatgcctgaacgtgtgatggcatttgtgaaacaaaagcatgacatactttttctttccaaatgaggcagtgccacaactaaaaaagccagttcgcctttcgctttctaaaatcatcttgctggagagaacggttatcaaatcccatccactgcccatgtaaaataaataccattcagaaaagcgtggcatggatggccatacttctgatgggtttataactgtagattgcatacgatcccaacgtgaagcctgaaatacgacattcaacgtcaggcttattccaggctactgctgtggctacttttgtaattcaaccagtggggcgttttaggctaacgtatattgcctctaagctgataagcattttcctgatcccaggccccttctaaaattgaacacacacgttcagctggggacacctagatggaaggaagggaaagaggagaacccgaagtgaaggaaaagtcaccaagaacagtttcgtggaaaaaaaaaaaaaactctcaagaattaagaatgttgagttgcttgaatggagcttgggcaggaaaaagaccataactctcacacacgtgaaggttactgatacccaggaggtaaaagaagtatttaacatgctctaaagaagggtaaccagagtaatggggcgaaaccaagggaggacgtcctggaatgtaatattagaaataaacttccaaacagggaagtgtccatccgagtgtgaaatgggtttatcagaaacaagctgcatgccagtttcattgacattgcaaagaaggttagaataaaaagctaatgaacagaaagaagaaagaggca

SEQ ID NO: 17525 - DNA, 1027 bp, Homo sapiens
aacttccaccccagtggaattaacactaattatatttaattccacacaaacttttgtcccagttgtagaccatttacctacttcctgacagcaaacactacaccgctgtgaaattttattttaacacatttgtgcccattttcagcattaataatcgtgtgtggaagtggcagcaaaatgaagatatcgcctgagcatggaaccacaaatgcctgaacgtgtgatggcatttgtgaaacaaaagcatgacatactttttctttccaaatgaggcagtgccacaactaaaaaagccagttcgcctttcgctttctaaaatcatcttgctggagagaacggttatcaaatcccatccactgcccatgtaaaataaataccattcagaaaagcgtggcatggatggccatacttctgatgggtttataactgtagattgcatacgatcccaacgtgaagcctgaaatacgacattcaacgtcaggcttattccaggctactgctgtggctacttttgtaattcaaccagtggggcrttttaggctaacgtatattgcctctaagctgataagcattttcctgatcccaggccccttctaaaattgaacacacacgttcagctggggacacctagatggaaggaagggaaagaggagaacccgaagtgaaggaaaagtcaccaagaacagtttcgtggaaaaaaaaaaaaaactctcaagaattaagaatgttgagttgcttgaatggagcttgggcaggaaaaagaccataactctcacacacgtgaaggttactgatacccaggaggtaaaagaagtatttaacatgctctaaagaagggtaaccagagtaatggggcgaaaccaagggaggacgtcctggaatgtaatattagaaataaacttccaaacagggaagtgtccatccgagtgtgaaatgggtttatcagaaacaagctgcatgccagtttcattgacattgcaaagaaggttagaataaaaagctaatgaacagaaagaagaaagaggca

SEQ ID NO: 17526 - DNA, 543 bp, Homo sapiens
tgcctcatatatgcctggcttggagctaaaacagctggcagccagtgtatctaacaccctagatacatcaatgagtgccaaaaacaaaaacaaaaaacccaagcttcattgcatttctgggtaaactatggctcagagaaattaaatgagttgtgttagtcaaagagctagtaattaagaaaacagatttcaaacacatatcttctaatgtcaaaccgtgtcttatatagcctagaataaataacaaatgagtaaattcaaatttgtagagactgaattatgaatgcaagataaaccaacttctagggaaaccgacaaaacaaatgcatcccacacccaccaccaccaccaaaaaaaaaaaaaraaaccaactcactgatacccatcaaaatgaacaaaagtaatagaaaagaaaatgtaacctgaagactgcactgcccttctggttaaaacatttcagttgcgggtgatgaaaaattaaactcaaatcacttaagctaaaacacaattgatcagaaagaacgtcagtgagaaggcaaagta

SEQ ID NO: 17527 - DNA, 2323 bp, Homo sapiens
ttagaatcacttggacagacagtaaaatacgtatttccaggtcccatcctggaaatacaggggtaggaatcatgggtagaaatcccatgattctgacgtagtcaacagttggcattttgcaaactgctgattttggacgcctaaaacatggacagattagagaaatggactattgcaaactttgggaatcaccggaatcctcttttaactaccagagcctctaaggaggcttatttctgaaacttagtaccaattatacatccttcagtcatcacgatttagcaactcttacagaaagagaacagaaaagaagaagatgagtccaggctcagacaggtgcacagagtcggtgctggggaggtgagggggcacctgatggcttttgtttttctaacgaaatgagaggcaatgccatctgtgggcagcatgtgaggggagtggtgcagaggggaattatgggtgatgagcttgaatagaaaaacaaaggtctaaaatagttagtgcagagagtgggataatgagcttagtagaggaaaaccggtaggatttcttagaatttttgagtgagaattgaaattcttaattatgaatgtatgaagatgatattatactcttttgtctttttctaaacattctatactggtgttcaccttcacagataaaggcatgaagactatatgtgaatctaaccaagattagtgttttgaaaaacaaatggaaggaaacagcaagcatgcaagagaaatgacggtctttctaaagggaaagttattttcaaaagatgtagtagattgaactattgcttcttcatattcactctgctttcttgtaaaagaattatatacagttgcaccatgcacgggatttgtagtgtctcccattggagaagtatgtatcctcacccagatgacatcaagcttgtttgtgtgacttgctttggccaatggcatgtaaatgaatgtggcatgtatcacatctaagccaaagcattgagagtcgtgttttgccagccatatcatttgcttttccaccctttgggaaacggttgagtttctactcacactgcctctgatcctttaagccagaagatcaaagctatcttcatccaacgtggagtagctgataaggcaagctacagttggcccagcactgtttggggtaataaacgtgaaccttctgatttgctttggggctattgttatttcaactttgtttccacttacccaaaacttcttattccattagcccatcctaactcagtcttttaccctttggacttgatgttagtattttgtaccttgctgcttgagcttgactctcggctccaatgaatgcctcagggacttttctggaaattttcctggccttctcttcttccaacctgtccagctattcctgcactgtctggacccacaagctcagagaaagggcagatttgaacagttcctgttctgaggaatgctcaagggggactgattgttcctgattgcaaaggctacgtagtaggttgtgcctcctcctcaatttaactagacacagaagatgatactcagggcccttaaggaggtcattccaatctggagaagctggttctaatgagatccagtagccaagaaagaaacttgtatcagccaattcaagtggcttctgccacaaacgtagcatagattttccttgaaaatctaggtgcattgttttctaaaggtcttcttttgagctcaagacattcaggctgtactattatgcatatagcttagaaatatgattttaaaataaattaaagcctaaatattgttggagatatgagaagtgttgcagactgagttgttataaaagatgttgcaaacaaattgtatcctttgaagtcctaacccctgatgcgacagtgtttgcagatgggaccttggggaaataagtaggtttagatgaggtcctgggctctggtccaatggaagaaacacctgaacattttctctgtgtgtgtgtgtgtgtgtgtgtgtgtgcctgcatgcaccaaggatgtcacaaaaaggtgcccatctacaaaacaagaaggaggccctgacagagaacaaattggctagcaactcgatcttgaatttcccagcctctggaagtgtgagaaataaatttctgttgtttaagccacccattgtatagtattttggtatggtgacccaagccgactaacacaaaaggtaaaaagaaaaaaatrtgttttctatgacaaatctgactcaattttcaatattcccacttactagaattttgtgaaaatcttttggtttacaatatttcctatttaggaaacagtatacctaag

SEQ ID NO: 17528 - DNA, 526 bp, Homo sapiens
taatgaaatgatcttttcactctcacagttgtagtattaaggtgacaaaaatcaaaattatagcttaatcttgaatgacaatgttggtagaattccacaacttgcctggttgtgaatgtgcaggttaagayattgattaggaaagagtggcacattctctccagattcacaccacgcacacctccaggacagggttagggctggtgaggccagctaggcacctagggtataaaatttaaggaggcactcattctaagggttttctaagcacttgcttctgtcaccctagtcctgtctctcctactgaactagacaggctccataagggagaattttaatcagtgaggtacctggaaggccgaagtccactccactgcccttgacaggagataatgagtcctttgcctcttcttttgtttttgcatcctcagaaccttcagtttttgacaattccaggggctcagtccatgcttctgaattaaattgcaggacagcctgaccacacaggctgtgaattttctttaaa

SEQ ID NO: 17529 - DNA, 526 bp, Homo sapiens
taatgaaatgatcttttcactctcacagttgtagtattaaggtgacaaaaatcaaaattatagcttaatcttgaatgacaatgttggtagaattccacaacttgcctggttgtgaatgtgcaggttaagatattgattaggaaagagtggcacattctctccagattcacaccacgcacacctccaggacagggttagggctggtgaggccagctaggcacctagggtataaaatktaaggaggcactcattctaagggttttctaagcacttgcttctgtcaccctagtcctgtctctcctactgaactagacaggctccataagggagaattttaatcagtgaggtacctggaaggccgaagtccactccactgcccttgacaggagataatgagtcctttgcctcttcttttgtttttgcatcctcagaaccttcagtttttgacaattccaggggctcagtccatgcttctgaattaaattgcaggacagcctgaccacacaggctgtgaattttctttaaa

SEQ ID NO: 17530 - DNA, 526 bp, Homo sapiens
taatgaaatgatcttttcactctcacagttgtagtattaaggtgacaaaaatcaaaattatagcttaatcttgaatgacaatgttggtagaattccacaacttgcctggttgtgaatgtgcaggttaagatattgattaggaaagagtggcacattctctccagattcacaccacgcacacctccaggacagggttagggctggtgaggccagctaggcacctagggtataaaatttaaggaggcactcaytctaagggttttctaagcacttgcttctgtcaccctagtcctgtctctcctactgaactagacaggctccataagggagaattttaatcagtgaggtacctggaaggccgaagtccactccactgcccttgacaggagataatgagtcctttgcctcttcttttgtttttgcatcctcagaaccttcagtttttgacaattccaggggctcagtccatgcttctgaattaaattgcaggacagcctgaccacacaggctgtgaattttctttaaa

SEQ ID NO: 17531 - DNA, 498 bp, Homo sapiens
tgttgaaatgtaatccccaatattgatggtggcacctggtggtgggtggggtttggatcattggggcagattcctcatgaatggtttgggccatcrtcttggtggtaagtgagctctcgctctgagttcataccagatctggtcatttaaaagtgtgtggcgcctcccagcccactctctttctctcttgctcatgcttttgccctgtgacatgcctgctccctctttgcctctgccatgattggaatcttcctgaggccttcctagaagccaagcagatgccagcaccatgcttcctgtaaagcctgtaaagccatgagccaattaaacttctctcctttataaacaacaaccctgtcttgggtgtttctttatagcaatacaagagcggtctaatacaactgattttcattaatatttaagtggttgttgggaacccaaagtacagaaaagcctgccaaaaggatcagtgtagaaggataaattaaaaatcaagag

SEQ ID NO: 17532 - DNA, 498 bp, Homo sapiens
tgttgaaatgtaatccccaatattgatggtggcacctggtggtgggtggggtttggatcattggggcagattcctcatgaatggtttgggccatcgtcttggtggtaagtgagctctcgctctgagttcataccagatctggtcatttaaaagtgtgtggcgcctcccagcccactctctttctctcttgctcatgcttttgccctgtgacatgcctgctccctctttgcctctgccatgattggawtcttcctgaggccttcctagaagccaagcagatgccagcaccatgcttcctgtaaagcctgtaaagccatgagccaattaaacttctctcctttataaacaacaaccctgtcttgggtgtttctttatagcaatacaagagcggtctaatacaactgattttcattaatatttaagtggttgttgggaacccaaagtacagaaaagcctgccaaaaggatcagtgtagaaggataaattaaaaatcaagag

SEQ ID NO: 17533 - DNA, 579 bp, Homo sapiens
tttttttttttttttttctgagacagggtcttgctctgttgcccaagctggagggcagtggcaccatcacggctcactgcagcctcaaacttctgagatccaacaatcctcctgcctcagtctcctgagaaactgggacttcaggtgtacaccatcacacctggctaatttaaaaatgttttayagagacagggtcttactatgttgccttggctggtctccaactcctgggttcaagcagtcctctgccttggcctcccaaagtgctgggattacaagtgtgagccagcacacctggcccacactttcctttaaaaacccctaacctccaagtctttggggagactgatttgagtaataactctagttcttccacatggctggccttgcattaattaaactcttgatttactgtaataccatggtctcaatgaattgcttttgtatgcacagcaggaaaaatgcatcaggcaattacagaccaagggagcaaacaaccatttcagtcgaagcagcatgggcagaggacagtcagcgaccagacaacacattcccctttatgtcaagatgctccatagc

SEQ ID NO: 17534 - DNA, 592 bp, Homo sapiens
atgtaaaatttaaaaaaaatttaacaataataaaaaaattgtattggacagcagtaatgtaaataaacatataaatgtatgtgtgcatgtgtgcccatacatattttccttcattttgttcaataagacgacctgaggcagtgacaatttagtaacaatggacacacttgggattatagaacttggtttcacaatgtttttctccacttaaagtaacaaggacattttggtaaaatatctgatttgaaggctgggcagagaaaatatctttcctagaatgttctttttgcaaaatatcaaggcagtactcaaagaatgmagggaaacatcaaaaagacacagaaaccaggctgggcatggtggcttatgcctgtaattccagcactctgggaggctgaggcaggcagatcacttgagatcaggggtttgagacctgcctggccaacagggggaaacttcatctctactaaaaatacaaaaattaatctggcgtggtggcgggcatttgtagtcccagctactcgggaggctgagatgggaggatcatttcagcctgggaggcggaggctgcagtgagccaagatagccccac

SEQ ID NO: 17535 - DNA, 592 bp, Homo sapiens
atgtaaaatttaaaaaaaatttaacaataataaaaaaattgtattggacagcagtaatgtaaataaacatataaatgtatgtgtgcatgtgtgcccatacatattttccttcattttgttcaataagacgacctgaggcagtgacaatttagtaacaatggacacacttgggattatagaacttggtttcacaatgtttttctccacttaaagtaacaaggacattttggtaaaatatctgatttgaaggctgggcagagaaaatatctttcctagaatgttctttttgcaaaatatcaaggcagtactcaaagaatgcagggaaacatcaaaaagacacagaaaccaggctgggcatggtggcttatgcctgtaattccagcactctgggaggctgaggcaggcagatcacttgagatcaggggtttgagacctgcctggccaacakggggaaacttcatctctactaaaaatacaaaaattaatctggcgtggtggcgggcatttgtagtcccagctactcgggaggctgagatgggaggatcatttcagcctgggaggcggaggctgcagtgagccaagatagccccac

SEQ ID NO: 17536 - DNA, 581 bp, Homo sapiens
aataacactaacaatttccatgtcctttcagactttaccttctcaagatggatttttatataaatttgatgcagagaaaaatctgttccaattcccttgttgttctttccttccaactatccaaccaaatgtttaccaggcaacttcagtttgggaaggaatatatcgtgttggtccagggaacagccccgaggtccaacaacctgaattcaaatcctgcctccagcaactttataatacctctctgagccaatgttcttggcattgagtaaatgtccactaatgttatcttgctgctgctgmtgatgatgatgattaattatgtgggaagaattacactaagggctgacgcaatgaagataacggcactctcacacagttcagttgggagaggaggcacataactagataatgtggcgtgggctacaataggagggccacacaagatgataacagcaattattgagcttcacactgcctgacctatgtgccaagctgtcgtaagtgctttagtcattgaatccagcaaatcctcacaactgctctataaaacaaagcacagataccatcctaactttaca

SEQ ID NO: 17537 - DNA, 581 bp, Homo sapiens
aataacactaacaatttccatgtcctttcagactttaccttctcaagatggatttttatataaatttgatgcagagaaaaatctgttccaattcccttgttgttctttccttccaactatccaaccaaatgtttaccaggcaacttcagtttgggaaggaatatatcgtgttggtccagggaacagccccgaggtccaacaacctgaattcaaatcctgcctccagcaactttataatacctctctgagccaatgttcttggcattgagtaaatgtccactaatgttatcttgctgctgctgatgatgatgatgattaattatgtgggaagaattacactaagggctgacgcaatgaagataacggcactctcacacagttcagttgggagaggaggcamataactagataatgtggcgtgggctacaataggagggccacacaagatgataacagcaattattgagcttcacactgcctgacctatgtgccaagctgtcgtaagtgctttagtcattgaatccagcaaatcctcacaactgctctataaaacaaagcacagataccatcctaactttaca

SEQ ID NO: 17538 - DNA, 581 bp, Homo sapiens
aataacactaacaatttccatgtcctttcagactttaccttctcaagatggatttttatataaatttgatgcagagaaaaatctgttccaattcccttgttgttctttccttccaactatccaaccaaatgtttaccaggcaacttcagtttgggaaggaatatatcgtgttggtccagggaacagccccgaggtccaacaacctgaattcaaatcctgcctccagcaactttataatacctctctgagccaatgttcttggcattgagtaaatgtccactaatgttatcttgctgctgctgatgatgatgatgattaattatgtgggaagaattacactaagggctgacgcaatgaagataacggcactctcacacagttcagttgggagaggaggcacataactagataatgtggcgtgggctacaataggagggccacacaagatgataacagcaattattgagcttcacactgcctgacctatgtgccaagctgtcstaagtgctttagtcattgaatccagcaaatcctcacaactgctctataaaacaaagcacagataccatcctaactttaca

SEQ ID NO: 17539 - DNA, 541 bp, Homo sapiens
gacatgttcaggcaatcatgagtggcttggcatatgaagrttatgtggaggggagcctgtgtcgggggcagggagctagtgagaaaggaggctggagagcaaaatattattgattattgatgttatctagatgttctcaaatgagcaaaaggtgatccaagacaataacgagaaagattgaagacaaaacatctgaaagttatttaggaagaggaatatacaggacttggaggccaacaggatacagagaataagggaaaaggcagagtgatggaactattaggtgggtgcaaaggtaattactttttcaccaacctatagcttggtgcccttactcactacctggtactgcctccagggggtgtccagcaacaaccagagaaggagctgagctcaggaggaacactgaacgaaagaagggctagcaggtatgataaaatctcatagtaagaccaggcaatacaagcacagaatgtttttaaaagtgaagtccattcaatcttgtgactaagagtgtgtgttggagaatgcctgctgactc

SEQ ID NO: 17540 - DNA, 541 bp, Homo sapiens
gacatgttcaggcaatcatgagtggcttggcatatgaaggttatgtggaggggagcctgtgtcgggggcagggagctagtgagaaaggaggctggagascaaaatattattgattattgatgttatctagatgttctcaaatgagcaaaaggtgatccaagacaataacgagaaagattgaagacaaaacatctgaaagttatttaggaagaggaatatacaggacttggaggccaacaggatacagagaataagggaaaaggcagagtgatggaactattaggtgggtgcaaaggtaattactttttcaccaacctatagcttggtgcccttactcactacctggtactgcctccagggggtgtccagcaacaaccagagaaggagctgagctcaggaggaacactgaacgaaagaagggctagcaggtatgataaaatctcatagtaagaccaggcaatacaagcacagaatgtttttaaaagtgaagtccattcaatcttgtgactaagagtgtgtgttggagaatgcctgctgactc

SEQ ID NO: 17541 - DNA, 596 bp, Homo sapiens
tattagaacttgggtgcagtggctcacgcctgtaattccagcactttgggaggccaaggcgggtggatcccctgaactcaggagttcaagaccagcctggccaacatggtgaaacccctatctctattaaaaatacaraaattcgccaggcatggtggcacatgcctgtaatcccagctactctggaggctgaggcaggagaatagcttgaccggggcaggaggaagttgcagtgagctaagattgtgccactggactccagcctgagctacagaatgagactcaaaaaaaaaaaaaaaaaaacatattaggttttcttagttctgaatcattttagttcaccatggtctgagagtcagcataggtagtgctcttctctgttaaagaacaggccaagtattctttgacaatgcaataggtagtataatttttctcctccgggtaagccatggctcatgtttagttccatgaggaatgcaaaggtcataagccattctctcatccttctctcaagacaaactcagaaggatgtgtatttgggctacaaatctgaagcatgagagccattttcagtttttaaatcatccaagtcattt

SEQ ID NO: 17542 - DNA, 521 bp, Homo sapiens
tgtggcctccattatcactgcagacagatttttctctccctttcctcagcacacaatcagtgtaccttgaagttccctcttacccatccatcagcctgggaatggcatttcctcagagaagcaattctcaaacacatgtgggtgtgtagcttgtaggaaggatatatcatgttcacttggagggcattttcaaagtacatgtgcctttgcatcacatgcccctcttgctctgaaattctaataggccaaaggtttgaggggggtttctaggggaactagcattttgtaaaagtttattcttttaaagaatagagatctagacatggaaactctaatcaagacatactcctctcaattccttagttgttattaaaatactacaaaatctgcatttatattataatagtgacacctcttatagttggtcgaaagttggccccaaaaaggatgtgtccatgtcctaatacttggcccctgttaatgttaccttatttraaaaaaaaaaaaaaaaaaaaaagtct

SEQ ID NO: 17543 - DNA, 648 bp, Homo sapiens
catgcaataatctttgttgtttttagtggttttttagtggagggaggagatatatctaggattattaaaggtcaaaaaggtgagattggcaatattaagtgttacggtatttctgctctaagaacaaatatttataatagtggttctcaaccaggggagattttactcttcctccccacccccatgtattagtcccttttcatactgctatgaagaaatacccaagactgggtaatttataaagaaaaagaggttgaatggtctcacagttccacatggctggggaggcctcacaatcatggcagaaggcaaaaggcacatcttacatggcagcaggcaagagagtatgtgcaggggaactgctctttataaagccatcagatcttgtgagacttactcactatcatgagaatggcatgggaaaaacccacccctataattcagtaactacccacaacaagtggggatatgggagctacaattcaaggtgagatttgggtggggacacaccaaaaccatatcatgyttctaggggatatttggcattacaacatttagaaagatacagtatctagaaagatttttgattgtcacaagtgtaaaggagggggcatttgctactgcatataatagtagaggccagggatg

SEQ ID NO: 17544 - DNA, 1017 bp, Homo sapiens
gcattcaacactgctgctcattccctcccttcttgatactttcttcactttattcctgggacaccacattcttactttttctcctactttattgkttgttctctttcagtgcccttttgttgattttttttctccctattatcagagaaattatcttcttctcttctcttctcacatatttagtgtattgccagtttccaatttatttcctctctgctccaaagccacccttcattgactgttctgcaataatggaactggactctgtaaacatttctcctgcatagctgatacaatgttcagttttgccaacacagagtgttggaggagggggcttcctttcctggttctggtgtgcttccatatggttcctgccacatggttaccatgtacatgtgagggacatccagcagcacttcatgcaccctggcagggtgcttcctgcttccccagtggctgtagaccaacacaggcccagggaacccaacaaactctgctgtccagtgccataacttctccatgtccacctctctatgtcctactctatgtccaccgccataccttctccaatgaagctcaggtcccagccttggggagggacttgtcttccaaatttgttcctcaagtgctgtccctcggcacaagaatattcttcagagttctcattagccttttagaattaatctttgctactcgataattctttatattacactgacctcattcacaatactgcatggcttctgtcttctggaccctggccaacacattcccttagtgatctcacctagtctcataactttaactgcttaggacccccagatctctcaggacccctagatctctctctctctcaaacaccagacttaatacaactgcccacttaacatctccactggggtattaatagagtaaacctctatgtccaaaacaacactccagatactcccaatacttgctctatccacagccttctctatcacacttgctaacttaatccatttgctcacgtgaaaa

SEQ ID NO: 17545 - DNA, 541 bp, Homo sapiens
acaggctactaagtaagtcctgttattttgctaaacagaaaagatgcagcaatcagaatacctaaaattttaaaaaaaatttttcccattatagttgatcagttgayatttcagcattccctagtggttaaaaaaaaaaaaagtctctcctgcaatattaccaccaactgtcagaaaatatgaaagctcctattgtgcaaattttaaaacattctaagcttgctaaacatttaccacatttactcatacatctcattcacctaaaccttgatttttcttagacataaaatgaggggataataaaaaataaagctaaaaaggacctaaaaatactttacagttctaaaatttaagaatgctataattctcttctttcctacctactatagttgtatagatttaaatcaattatcaagttttgataggtttcattaatcattgagatttttatctctatttacaaaaatgatgaaccatccaaagttaaacttttgaagagaaaaaagtaatcagagttcattcaaaactatattaaataact

SEQ ID NO: 17546 - DNA, 577 bp, Homo sapiens
cttgtagcttcattaaaaatttttatcattttttcttttgtataatatagcatcatttttaaagtaacccatgagaaacagcttctgtctccaaatgtttctcctctccccatcagcataatttcttcctgttagtttttgtacagaaccatattatcaaagacagagtgtaactacatttgggtaagtgtgattaccaaattcatagtaaagaatctacgaagcaaagatcatttaatgtatatggaaaacccagtctactcataaggtgagtgttcccttgaaatctataatcaaatgtatgaaatccatcaacctcttggcagttatttaaaattttaataattctaagtttttgtggcttctgacactaatgtcttcgaggagttcatrtttaaagtaacagctggcggctggtgagcgtggctcatgcctataatcccagcactctgggaggccgaggcaggagcatcaattaagcccaggagttcaagaccagcctcggcaacatggcaaaaccttagtctctataaaattttgaaaattagccatgtgtggtggcatgcgcctctgatgc

SEQ ID NO: 17547 - DNA, 577 bp, Homo sapiens
cttgtagcttcattaaaaatttttatcattttttcttttgtataatatagcatcatttttaaagtaacccatgagaaacagcttctgtctccaaatgtttctcctctccccatcagcataatttcttcctgttagtttttgtacagaaccatattatcaaagacagagtgtaactacatttgggtaagtgtgattaccaaattcatagtaaagaatctacgaagcaaagatcatttaatgtatatggaaaacccagtctactcataaggtgagtgttcccttgaaatctataatcaaatgtatgaaatccatcaacctcttggcagttatttaaaattttaataattctaagtttttgtggcttctgacactaatgtcttcgaggagttcatatttaaagtaacagctggcrgctggtgagcgtggctcatgcctataatcccagcactctgggaggccgaggcaggagcatcaattaagcccaggagttcaagaccagcctcggcaacatggcaaaaccttagtctctataaaattttgaaaattagccatgtgtggtggcatgcgcctctgatgc

SEQ ID NO: 17548 - DNA, 552 bp, Homo sapiens
ttatctgtttattttacttatttatttttgagatgggggtctcgctatgttgcataggatggtcytaaactcctggcctcaagtgatcctcccacttcagtctcctgagtagctgggattacaggcttaagccatcatgcccagctttttatttgtaaaggttgtttatatattagagatactaacactaggagtacctttgcccattttgtcatttgtctgtttactttgcctgtgatgtcttgttacttgcaaatgcttaatttttggtaagcaaaattatacttctggaatttgagccacagttaggaaagttttccctactccctggttatagaggaaatcacctatgtttctttgaaatggtttggctctgtgtccccacccaaatcttatctcaaattgtaatccccatgtgttaagggagggatctggtgggaggtgactggatcatggggcagtttcccccatgctgttctcatgatagtgagagagttctcatgaggtctgatggttttaaagcatgggacttccccattgctcatgttccct

SEQ ID NO: 17549 - DNA, 552 bp, Homo sapiens
ttatctgtttattttacttatttatttttgagatgggggtctcgctatgttgcataggatggtcttaaactcctggcctcaagtgatcctcccacttcagtctcctgagtagctgggattacaggcttaagccatcatgcccagctttttatttgtawaggttgtttatatattagagatactaacactaggagtacctttgcccattttgtcatttgtctgtttactttgcctgtgatgtcttgttacttgcaaatgcttaatttttggtaagcaaaattatacttctggaatttgagccacagttaggaaagttttccctactccctggttatagaggaaatcacctatgtttctttgaaatggtttggctctgtgtccccacccaaatcttatctcaaattgtaatccccatgtgttaagggagggatctggtgggaggtgactggatcatggggcagtttcccccatgctgttctcatgatagtgagagagttctcatgaggtctgatggttttaaagcatgggacttccccattgctcatgttccct

SEQ ID NO: 17550 - DNA, 552 bp, Homo sapiens
ttatctgtttattttacttatttatttttgagatgggggtctcgctatgttgcataggatggtcttaaactcctggcctcaagtgatcctcccacttcagtctcctgagtagctgggattacaggcttaagccatcatgcccagctttttatttgtaaaggttgtttatatattagagatactaacactaggagtacctttgcccattttgtcatttgtctgtttactttgcctgtgatgtcttgttacttgcaaatgcttaatttttggtaagcaaaattatacttctggaatttgagccacagttaggaaagttttccctactccctggttatagaggaaatcacctatgtttctttgaaatggtttggctctgtgtccccacccaaatcttatctcaaattgtaatccccatgtgttaagggagggatctggtgggaggtgactggatcatggggcagtttcccccatgctgttctcatgatagtgagagagttctcatgaggtctgatgkttttaaagcatgggacttccccattgctcatgttccct

SEQ ID NO: 17551 - DNA, 581 bp, Homo sapiens
ctccttcaaactaacatttttgtattcatttttcagagacagggtcttgatctgttgcccaggctggagtgcagtggtgcaatcatagctcactgcaacctcagactcttagacttacatgaccttcctgactcaacaccctgagtagttgggaatgtaggcatgtgccaccatacctgactaaatttttttttattttttgtagagatatggctctcactgtattgcccagactgrtcttgaaccaatttgattggcctcaaataatcctcccacctgggcctcccaaagtgctgatattactttgggaggcaaagtaatatgagtgatattactttgggaggcatgagccaccatgcccagccagtattctttaaattttcattaaaagttaattaaattttctattctattaatttattttctatcattaattaatttctgctacaattttaattctattaatatactgttaatattatatacatattatcaaataatttatattaattttctaagttgaacactgcaacaggctcatcaattaattcactttttctgaaaaaaaaaagtaagaaaaa

SEQ ID NO: 17552 - DNA, 553 bp, Homo sapiens
agtcattattctttgaaccacgctgcatatcttcccaagggttggacttgaagtacattgtgcagtctaggtacagaagactgcagctttcccaccttatacacaactttacttaaaacaatttaattatgtggcaaactattgtgccacatcaaatttttttgtgtgttgtggggaatgcaacatatgcaatttattgtcacttcttacagactttgcaagaccagcactgaagaggctattagtatccttttgggcattatatatraacttaagcttagctggtttagtttcttagcggttgtctcatagttaaactgaaagaaattctatagaaatagtcaacgaattaaatttgtttgctttttcaaactcatttgtgctgtttaacaccctaaatataattttgatgagaattggattaacataagaatcaaattatgattttcctactgactttataaggggttacttttccattttatttgtctttatgccaataacacagacatctacagtgtttaataactgtgtgtagaaatggtaaatgatg

SEQ ID NO: 17553 - DNA, 558 bp, Homo sapiens
ttcaggttgtctttattattcccagagaacaaaattggtgatttgggccctcagtacwttcatgttgttcctgttcttatggattcgtcaggctggtgctctttcatctgaaaaaggctaccataggcctgacctgacctccctttctgctctagattctgatccatgctcacagttcctctgcgcaaagcctgtgatcatctcacacatgggctggtctgtaggtcttgccggtggattccaacatctacaaggctgtctcctactttgagtgcaagagttcagcagcagcaagaggcagaactttactttctgtctttcaggtagactcttctcagccctgggctttacgttatggcaaactagaattttttttagagcaacatcattaagtactaggaagaagctataatacgccctgtgcctaggttggttagaagtacaataaactccaagtctccagttatgccctccaaggggcatttggtatgtggggtaagtcccatggaaagctaacacagatcacagcaggaacccctgtcacaagtcctccacttt

SEQ ID NO: 17554 - DNA, 558 bp, Homo sapiens
ttcaggttgtctttattattcccagagaacaaaattggtgatttgggccctcagtactttcatgttgttcctgttcttatggattcgtcaggctggtgctctttcatctgaaaaaggctaccataggcctgacctgacctccctttctgctctagattctgatccatgctcacagttcctctgcgcaaagcctgtgatcatctcacacatgggctggtctgtaggtcttgccggtggattccaacatctacaaggctgtctcctactttragtgcaagagttcagcagcagcaagaggcagaactttactttctgtctttcaggtagactcttctcagccctgggctttacgttatggcaaactagaattttttttagagcaacatcattaagtactaggaagaagctataatacgccctgtgcctaggttggttagaagtacaataaactccaagtctccagttatgccctccaaggggcatttggtatgtggggtaagtcccatggaaagctaacacagatcacagcaggaacccctgtcacaagtcctccacttt

SEQ ID NO: 17555 - DNA, 558 bp, Homo sapiens
ttcaggttgtctttattattcccagagaacaaaattggtgatttgggccctcagtactttcatgttgttcctgttcttatggattcgtcaggctggtgctctttcatctgaaaaaggctaccataggcctgacctgacctccctttctgctctagattctgatccatgctcacagttcctctgcgcaaagcctgtgatcatctcacacatgggctggtctgtaggtcttgccggtggattccaacatctacaaggctgtctcctactttgagtgcaagagttcagcagcagcaagaggcagaactttactttctgtctttcaggtagactcttctcagccctgggctttacgttatggcaaactagaattttttttagagcaacatcattaagtactaggaagaagctataatacgccctgtgcctaggttggttagaagtacaataaaytccaagtctccagttatgccctccaaggggcatttggtatgtggggtaagtcccatggaaagctaacacagatcacagcaggaacccctgtcacaagtcctccacttt

SEQ ID NO: 17556 - DNA, 566 bp, Homo sapiens
agaagcaaaaggaggaattggtcttgctgtctcatggatggcagaggcaaaagaaaacccatatataagcgaacctgtatagttcaaagcagtgttgttcaagggtcaactgtactatttaatttgctgctcaaattgttctagctttgaccactgggttctctttagattagctactgtgtccttttgacatacctcatttcttttttttkttgttgttaagtactaccttacttcctggcactacaagatgttccaggctcatcattttccctgccccagctgccccaatcctaaaaccagccatctatccaaggagctctgctaccctttgttgaagaatgatacttaaaaaataaaatctggcactagatgtgcttgttgctactgagctgtaaatgcttctaggccctctcagtggacagagctatggaatatataaaacctaaggaataatatttgtatttctaagaaacatcaatagagcgacctaaacttagtgaggtggccatcagaaatatttttagttctagaaattaataaaatatacttcattagtttttttt

SEQ ID NO: 17557 - DNA, 565 bp, Homo sapiens
aggggaacacagcatgagcaaagaccctgagattacatgtgtcaagtgtgttcttgccacagtcataaaaagcaagacttcgcagaacagggagcattgaatcagggaacagaaggactagatgagaaaactgccgaaggccatatgtattcaacgtcttttggtcatcatctgacccagataatttcctacttttgacaaccctttgtattatcaagggatacaacattgtgaattaatgatttgacttagtgatatatgagtgaggggggraaaagggatccacagatttctaggactatgtaatataggtagaatttaaaaggaatttggtggctgggcatggtggctcgtgcctgtaatctcagcactttggaaggctgaggtgggcagatcacctgagatcaggagctcaagacccctctggccaacatggtaaaaccctgtctctactaaaaatacaaaaattagccaggtgtggaggtgcgcacctgtcatcccagctacttgggaacttgcttgaacctgagaggcggaggttgcagtgagctgagattgtgtgctg

SEQ ID NO: 17558 - DNA, 542 bp, Homo sapiens
tctctctcaaacaaatatttctattttgcttagtgtgttgtgaaaacctctgagtacctccatctgccttatttctgactcccctttgaagaggcaatcctattgaaaaagtggaccttatcgacacagctatgtcaatgacyttaaatgtgaagccaggactccctcacacacctgaactccatccctccccatgcttgaatcaggttctcagataaagcctttcacaagtaataaatccttattatttcacaaataatatagccttcagaatccagattctgtcccaaagcaggtttaaatcatatcccactcataggtagtaaatacagcaaatttccctcgccagatacaagagatctaactatatggctattagattttctatgccacaaatcatttgtcagtttaagtttgaactaacttccttccaaataatcagagactgggttctttctgaaacccagtgtatatgataggatattatttatacttgatcttgcttataaagatacagttaatagaaatttgctgcttagcca

SEQ ID NO: 17559 - DNA, 542 bp, Homo sapiens
tctctctcaaacaaatatttctattttgcttagtgtgttgtgaaaacctctgagtacctccatctgccttatttctgactcccctttgaagaggcaatcctattgaaaaagtggaccttatcgacacagctatgtcaatgaccttaaatgtgaagccaggactccctcacacacctgaactccatccctccccatgcttgaatcaggttctcagrtaaagcctttcacaagtaataaatccttattatttcacaaataatatagccttcagaatccagattctgtcccaaagcaggtttaaatcatatcccactcataggtagtaaatacagcaaatttccctcgccagatacaagagatctaactatatggctattagattttctatgccacaaatcatttgtcagtttaagtttgaactaacttccttccaaataatcagagactgggttctttctgaaacccagtgtatatgataggatattatttatacttgatcttgcttataaagatacagttaatagaaatttgctgcttagcca

SEQ ID NO: 17560 - DNA, 1190 bp, Homo sapiens
tgccacaatcccctgaatctctgcagtgtttattgttccatccaaacctacacatgtgcctatactttttttgttttgttttttgtttttggttttctttgaaacggagtctcgccccattgcccaggttggaatacagtggcgcgatctcgggtcactgcaacctctgcctctcaggttcaagtgattctccctgcctcagcctcctgagtgtctgggattacagatacataacaccatgcatggctaatttttgtatttttagtagagatgggatttcaccatgttggctaggatggtctgaaactcctgacctcaaataatctatcctccttggcctcccaaagtgctaggattacaggtgtgagccaccatacccagtctacatgttctaaaaaatgaaattgttcctcactgatacataatccctcaatattagaatttctcaaattaaattcctgaaaatgttagaattaaaaggtattttctaaaacagaaaaggatttcacagaaaaggaaatttgggaaactccacatagagcacttccttttacatactaacagagtatacagaaagcttatgatttaaaaacaaacaaaaaggttaaagtcgcttaagccagcattgcctaaaatatttaaaaattaagaacatttttttgtaacaactatgaatattctgctgaactctgagaaattctgctctrtatctcttttaatgacaaatgtgtattctgctataatgaagcattataatgtttttaagcataaaaaatgttaaggcttttatcttaatgttaacaaactatacatagctctataactgtttttgcatatctgtaatcattttatgattatttttagaaacgtttcagaaatatgtagttatacatgcatatcaaaaagtatgtgtacatagatacatagatataaagtgtatgtatttttatgctaaattcgctttgactatatcctactatatgcttctaccagtagtgaaagagatttttcatgtttctgagctttttactatctggatacctttttagtatttttataatatattttaccaacagatgttcctcattctgtgcgtctttacacattttttttctttcagtctttttctagtattcattctgctttattcttctaggtagttttttttactgaatctaaagtgtttccca

SEQ ID NO: 17561 - DNA, 387 bp, Homo sapiens
atggtgaaagacggaatgctygtcccttaagattaggaacaagacaagaatatctgctctcattactcttactcaacctagcattagaagttccagccactgcaataggcaagaaaaagaaatacacggcactcagattagaaaggaagaaggaaaactatctctatttgcagatgtcatgatcatcttgggattttctacataaaaatcttggaattttctgcataaaagcaactcctggaactaaaactaataaatgagttttagtttatttttctgcaaaaaagcaactcctagaactaaaactaataaatgagttgagcaagattgtaggatataagatcaacacacaaaaattaatcacatttctatatactaacaatgaac

SEQ ID NO: 17562 - DNA, 587 bp, Homo sapiens
tagaaagatagatagatataattgaactttataaaacccaccaaaataaattctaatggattaaagagtgcaataaaaatggcactttaaaggagaaaaaaatgtggatattgatgtaatctttagtattagagaaagagattttagaggcatagcactaacarcaaaaaaaaaaaaaaaaggaaaaaaaatagatctgtagataagaacagctttatacttcttaatttaaagcaccataactaggctgagcatggtgctcatgcctgtaatcccaacactttggtaggtgaggtcaacggatctcatgagcccaggaatttgagaccagcctgggcaacatggtgaaaccctatctctgaaataaaaaaataaaataaaataaaaataaaaataaagcactataaataaataaaaatataaattacaatgtgaggaagtacttgcaacatatatgacaggcaagaggtttattctttcaatatttaaaattcttttacaaatcaataagataagataaagaacccattaaaatggaccaaagacatgataaacaacacagttccatccaataatacatgtgataa

SEQ ID NO: 17563 - DNA, 587 bp, Homo sapiens
tagaaagatagatagatataattgaactttataaaacccaccaaaataaattctaatggattaaagagtgcaataaaaatggcactttaaaggagaaaaaaatgtggatattgatgtaatctttagtattagagaaagagattttagaggcatagcactaacaacaaaaaaaaaaaaaaaaggaaaaaaaatagatctgtagataagaacagctttatacttcttaatttaaagcaccataactaggctgagcatggtgctcatgcctgtaatcccaacactttggtaggtgaggtcaacggatctcatgarcccaggaatttgagaccagcctgggcaacatggtgaaaccctatctctgaaataaaaaaataaaataaaataaaaataaaaataaagcactataaataaataaaaatataaattacaatgtgaggaagtacttgcaacatatatgacaggcaagaggtttattctttcaatatttaaaattcttttacaaatcaataagataagataaagaacccattaaaatggaccaaagacatgataaacaacacagttccatccaataatacatgtgataa

SEQ ID NO: 17564 - DNA, 580 bp, Homo sapiens
attgaactctgcacgtctcagcctcccaaagtgctgagattacaggtgtgagccaatatgcctggcctggatttcatttttttaatggctgaataatatcccattatgtatatgtactgcattttctttatccgtgcatctgtgaactatttctgaaagtgatttgaccataaccaactactattttagactaatgttatatatatatatttttttgtttgtttgtttgatttgagacggggtcttgctctgtcacccaggctggagtgcagtggcatgatctcggcttactacgatctctgtctcccgggttcaagtgatcctcctgcctcagcctcccgagtaggtgggactacaggtgcatgccaccacacctggctaatttttgtaattttagtagagacggggtttcggcatgttggccaggttggtcttaaacacctgacctcaagtgatccgcctgccttgggctcccaaagtgctgggattaccagcgtgagccaccgtgcctggcctataawatgtttataactaatgtttataatatgtttaacaaaatttaactcttttcttccaggta

SEQ ID NO: 17565 - DNA, 580 bp, Homo sapiens
atcgtagcatagctgtagtcccagctacttgagaggctgaggcagaagaatggtgtgaacccgggaggcggagcttgcagtgagctaaggtagcgccattgcactcaagcctgggcgatagagcgagactccatctcaaaaaaaaagttgtactttagccttccaggaactcggaaattgaagacataagagcttgattacagaagaggagtccaaaagcagtgacagctttgttaaggggtgggcctagaccaggcaagatgctcagcgtggcttggattaatgaaacaagtctcaggctagaggtcaaagtatcttagagatactataagttctggagggtggggttaaaagtaaccccctacagggtcaagtttttaggcttccgatagggtttggctgtgtccctacccaaatctcatcttgaattgtaactcccataatccccacatgtcacaggtgggmcaagtgggaggtaattgaatcatgggggtgagtctttcctgtgctgttcttggatagtgaataagtctcaggagatatgatggttttataaaggggagctcccctgcacatgccc

SEQ ID NO: 17566 - DNA, 526 bp, Homo sapiens
aggaagtactggtggccctggtaattgggacgctcatagagcatccagcagccgctgtctactcggatggagttgcagcggctgaagtagacccgcaggttggggcagtcactgatgcaattgtagcagcgaccctgaaagtctcggtcctcgtagaaggtgatctgaggtagaaataaggtgayagtagacagtcagctggaaggaacatccccacacaccacagacccccaatagacatggcacagcacctccacaggctcaccttccccatggttgttgacagagggtgattagcatctagtatgatagggacaaaggggcaactggtatatatagcagggaagctgctgtgttggcaaaaacaacacaaaagggacctgggggtggtgcgtagggggatttctgtattctcttttttttttcatttgagatcatggggcagtgggctctctctctttctggcattttcgagttgtcctcactagctccagtgaaaggtattaaagtcagcagagccattatg

SEQ ID NO: 17567 - DNA, 907 bp, Homo sapiens
caagactccgtctcaaatttaaaaaaaaaaaggcttcaatagtaagtgatagggagacatatactagagccccagggttaaacgctctccttgggtgtctcctcctctgtcttttcgagttctagaatatgaccaccttctctcaaattgtccctctatctggaatcctcttatatctctagtaggcaaattctaactcactgttaaatgcctctttctctgggaaatctatgctagtacttccagacagaattatatcatatttccactggttccctttgtacttgcacatttcatcatgtgtgttctaacagggcaggggccagccattcatctctgtatcccagcaataaataatgtttggcatatagtaggtggttaacgaccaatatgaaccactaaaagaatataaacacaattgctttccccgcctacactacttctgctccatatgttctggtcaaaggcaatggattcggtatgaataagcctttgttattcaccatgaagttacctgaaaacaaaaatccatggttctctttatgagtactccaacgaaataggaaatacatgacaggtgtacaacagaaggaacaggaaagaaaaggtttctgcctgagcagaagtcaaagggctgtccaggcagaaatgcagggcaagaaacaagcagaaatgcagggcaagggccaggcgcggtggctcaggcctgtaatcccagcaatttgggaggccaaggtgggtggatcagctgaggtcaggagttcaagaccagcctggccaacattgggaaacccagtctctactaaaaaacacaaaaattagctggatgtggtggtgggcgyctgtaatcccagctactcaggaggctgaggcagaagaattgcttgaatccaggagacggaggttg

SEQ ID NO: 17568 - DNA, 574 bp, Homo sapiens
tattatttataatcttaaattttattatataatcaagtaatctttgatgtcttttaaaaatgtttagtatttttctcaaagatgtcctgcacaaatttgtagtattttttctgagaaactgtgtatttttgttgcaatgtttaatgagactgttaaaaatgraaattataaaataaagtactattacatataattcacctcagaaaaagtaaaattcatgttccaacatcagaaaatctattggcatcatattaaaagagtaaaaaggaaaaatcatatcttctcaatggacacaggaaaaagtattcaataaaatgcaacagtcatttataataaaattctaagtaaactaagaatggcaaagaagttttttcacctaataaaggacatcaaaaggctttacttgatatttgtataacagcgaaacttcaaaacgttcccattaagattaggaaataaagatgccccctactctttctattctgtattccattttagaatcaatattacaccaattattctagccaatgccataagtcaaaagaaaggaaaataaagatgtccaaatttaaaa

SEQ ID NO: 17569 - DNA, 1756 bp, Homo sapiens
tcagccatttcaattgtaaacatttatgtctgatagtctcatagcttagcatcccgggagagagggagagaaaagaaaatgcagaacagaaaggggtagatggaagatccccaaaggaaagcctcagcagaaggtccagggaaataaagtggaaccgctcctccatcaaagtcgtggagctgtggcttccccgtccttcatcggagtcagctggggcatagagccacaggaggaaaccttcctgcrgcagcttcgttagaaaacacggctctgttttcctcccaaggctcccctgcaaccttgcccccataggctggcacatgcccagcacccaccctgggacccagccttcagctgcagccacccttcccctgggacatgtctctagcccatctgcctccgtgtcatctctgaggaggaaaagcagcagtaacagtaattcaacaagacgagctcataacacccattacccccactgaacacactgtgtagtgctcaaccccttctgtctgtcagaagggattccaggagcagtcacataaggagaacaggagagggagctcaggattgcccaaggactccggtgacttaaggagacagatgctgtattagtccgttttcacgcttctgataaagacatacctgagactgggcaatttacaaaagaaagaggtttattggacttactgttccatgtggctggggaggtggaaggtgaaaggcagcagcaagagagagaatgagaaccaagcaaaaaggggtttccccttatcaaaccatcagatctcatgagacttattcactaccaagagaacagtatgaaggaaaccacccccatgattcaattatctcccaccgggtccctcccacaacacatgggaattatgggagtaaaactcaaggtgagatttgggtggggacacaaccaaaccatatgagatgtttaacattactaacaaaatgttcagaagcaatgtccctttccccactcacacacaaaaggtgacgtttgagtcttgaatgcagccttatttttagcagctgtttgttgttgttgttgttgttgttgcattgctcagtcagcatcatcttttggtggttgtggagtccttgtattcaccactggatagtgggggctggagttcatatcccaaacaggacacactgactgcaaggccaccatcctctgccgggccctgccctttagaccactgcttaaacctcaaagatgaactcctcaccaaaaaggagggaggatgccatctaccgtgccaggtagctaggaggactgggtgagaaccggttactgtgccaccccgtagaatgaggtccatgggtcgccttgccctgccttcagtgtcctgtcggtgagtctgtccaggaattcctgtggagtgataagaggagaaacacttctccttacctcgaaaggagcatggcacatgttctctgcttattgaatgaatgaaaaggtcactcataacttgtggaaaacgcctagaacagaacctgcctcagagaaggtgcttaacaaataaaaccagtgggaaggggcagtggaggggtgtgtgactgacagtgggaagcctcatgaagcaacgagacctctgctttgccacttcctgccttatgcatgtcactggccttttaagcctcaatttccccaactgtaaattccacctacaatgcaaagttgtttcagggactaaagataaatagttgtttaaaaaaaaaaaaaaaggccaagtactgggga

SEQ ID NO: 17570 - DNA, 1756 bp, Homo sapiens
tcagccatttcaattgtaaacatttatgtctgatagtctcatagcttagcatcccgggagagagggagagaaaagaaaatgcagaacagaaaggggtagatggaagatccccaaaggaaagcctcagcagaaggtccagggaaataaagtggaaccgctcctccatcaaagtcgtggagctgtggcttccccgtccttcatcggagtcagctggggcatagagccacaggaggaaaccttcctgcagcagcttcgttagaaaacacggctctgttttcctcccaaggctcccctgcaaccttgcccccataggctggcacatgcccagcacccaccctgggacccagccttcagctgcagccacccttcccctgggacatgtctctagcccatctgcctccgtgtcatctctgaggaggaaaagcagcagtaacagtaattcaacaagacgagctcataacacccattacccccactgaacacactgtgtagtgctcaaccccttctgtctgtcagaagggattccaggagcagtcacataaggagaacaggagagggagctcaggattgcccaaggactccggtgacttaaggagacagatgctgtattagtccgttttcacgcttctgataaagacatacctgagactgggcaatttacaaaagaaagaggtttattggacttactgttccatgtggctggggaggtggaaggtgaaaggcagcagcaagagagagaatgagaaccaagcaaaaaggggtttccccttatcaaaccatcagatctcatgagacttattcactaccaagagaacagtatgaaggaaaccacccccatgattcaattatctcccaccgggtccctcccacaacacatgggaattatgggagtaaaactcaaggtgagatttgggtggggacacaaccaaaccatatgagatgtttaacattactaacaaaatgttcagaagcaatgtccctttccccactcacacacaaaaggtgacgtttgagtcttgaatgcagccttatttttagcagctgtttgttgttgttgttgttgttgttgcattgctcagtcagcatcatcttttggtggttgtggagtccttgtattcaccactggatagtgggggctggagttcatatcccaaacaggacacactgactgcaaggccaccatcctctgccgggccctgccctttagaccactgcttaaacctcaaagatgaactcctcaccaaaaaggagggaggatgccatctaccgtgccaggtagctaggaggactgggtgagaaccggttactgtgccaccccgtagaatgaggtccatgggtcgccttgccctgccttcagtgtcctgtcggtgagtctgtccaggaattcctgtggagtgataagaggagaaacacttctccttacctcgaaaggagcatggcacatgttctctgcttattgaatgaatgaaaaggtcactcataacttgtggaaaacgcctagaacagaacctgcctcagagaaggtgcttaacaaataaaaccagtgggaaggggcagtggaggggtgtgtgactgacagtgggaagcctcatgaagcaacgagacctctgctttgccacttcctgccttatgcatgtcactggccttttaagcctcaatttccccaactgtaaattccacctacaatgcaaagttgttkcagggactaaagataaatagttgtttaaaaaaaaaaaaaaaggccaagtactgggga

SEQ ID NO: 17571 - DNA, 891 bp, Homo sapiens
tttttttttgagatgaggtctctctctctcacccaggctggagtgtagtggcacaatcatagctcactgtaaccttgaactcctgggctcaagcgatccccccatctcagtctcaagagtagctaatgctacaggctcgcacaccatgctctgacttgttttgtaaaaaggtggcagaatgatgaaactaggtgttttgtcacctaaatccaatgaacatttgtaattagatatatgcaattagactagagtccatattgttttaaaatctcccaaactaagaaaagcattatcaccagtgtggtgttttatcttttaaccaaaaaactatcacaccaagatctttcttccttcagcttatattctaatgacagacactgaataagcccacattgttaattccacaatcagtacataaaatgctcccctaatattcagcattctgtcttaaaagctctcaaaaatatggttgcatctcaaatgctgctggcactctactgagtttatgyacagccattacacctgaaaaaacatttctactcaaatggtcatgaatttattttagattatcaaacagcctccccattcccaccatttccctctgaaatcccaaagaaatgcagcaaagttaatgactacatggtaggataatcattcaaactttttaatctccctttacacattatattaacattcatattgcaaggcattccattcacaaatattacagtttgataaaaacttcacacacatactcccaaagtctataccagattcagtcaactttactaaatcattcaaataataaaagtaatgaaaacattattatattttaaagcaataaggtctgaggcactctgggaaagatgttctcttacaagtataatgtgt

SEQ ID NO: 17572 - DNA, 584 bp, Homo sapiens
atttgtcacacagagttaaattactatatagactatccagagacttaccagaaaacaaaaactcaaagcaaaaagctcagcacttacccgagcatcttggtcaatcagttcataatcaatgacagagccatcctctgctcttctaccctatgggggaaagaaaaagaacttcaaatacatttctttgtgtattttaaaactgaaaatgttttctccccagtccatgtacgccattatttaatttcctaaataagtaaccacgtaagatttttcttactttgaaacatagatggggccgggcacggtggctcacgcctgtaatcctaggactttgggaagccaakgcgggcagatcacgaggtcaggagatggagaccaacctggctaacaaggtgaaaccctgtctctactaaattagccaggcgtggtggcacatgcctgtagtcccagctactcgggaggctgaggcaggagaatcgcttgaaccaggttgctgtgatctgagatcacgccactgcactccaaccctggtgacagagtgagactctgtctcaaaaaaaaaaaaaaaaaagaaagaaagaaaa

SEQ ID NO: 17573 - DNA, 536 bp, Homo sapiens
cacaatgtcatctaggatctgcacattcttcctgctactttggctgtgctgtagcacttaagatttgttatttctttttttttttttttkgagacggagtctggctctgtcgctcaggctggagtgctgtggcagaatctaggctcactgcaagctccgcctcccgggttgatgccattctcctgcctcagcctccggagtagctgggactacaggcgcccatctccacgcccggctaaatctttttgtatttttagtagagacggggtttcactctgtcagccaggatggtctcgatctcctgacctcgtgatcgcccgccttgcctcccaaagtgctgggattacaggtgtgagccaccacgcctagccaagatttgttatttctattcgcttattctctgcattgaatcatagctgtccggagttccagccttcagaggcgaagcttttctgtgttccaaataaacaagactaatttgatataccgctattattttaaaaaggaagaaaagctatcactccataaggaaacaa

SEQ ID NO: 17574 - DNA, 556 bp, Homo sapiens
tgaaggaactgataacaaataaaatactgtagaatgtatttgctttccaatgcagcctataaattatttctttaaagagaaatgttataaaaatcattagtttcttaaatgaaagtatttatgtaaaaatcaacaaacattttccaaattggtaagcattcaatccgatagtagaagctgtatgctactttyatgagaggcaacacggagtgtaattaaagaaaaatttatgaacctcttttgttatgacaactctattgagctttgtaatttttctcttattgctaaaaagactattggaaaagctatgtggatttataatatgataagggattttaaaaaatagtttgttgcttgttatttgagtgtttacagatacaaatcactcaccaaaacctatactatggatgaaattattcagtcaattatcaaaaaatgtgagtcaatacaaaattctctatacacatctgcacatttacttgtaaaaagtatatacacatggatgtaaatatacacatatatccaaaggataaataagtaaagaatatttatattt

SEQ ID NO: 17575 - DNA, 514 bp, Homo sapiens
cagagcctttgcttatttttttctctcgtttatattctcttgatacttatagaaatttagcagattaaagaaaaggacaataaaaaagcaaaacagtttatatgcagtttctgttaatcrttaaactaatttgagagtgaatactagtacacaccccaggtgctttatatcttaatgtctctgaaaccacatacccaccacctgtgtgatagttataaatgtaaaattctgtgaggtcaagttaaatagatgtaatttagaaacgtggagttgtatcattgctattagcatcaagtatcagaatcaaatatataattttcataatattttcataaaatgaaaagttaagaattcaaaagattataaaaatgcattttaacatattttccaaaaagtttgcttgctgccaagaaaattagtcaaaaattgaaaagccacttaaacaaattttagacatagttatctctatgacagtaatttgttgactatttttctttctcagttgagtggattg

SEQ ID NO: 17576 - DNA, 521 bp, Homo sapiens
cctgaaatgctattaaaaatgagcaaactagtttgaaagagttaagtgacttgcccaaggtaatatatacttgtttgtgtttgtatgtgtatatgtgtgtgtgtgtgwgagagagatttgaaacccagatgtgtctgattttcaaaattgtcttttataagcctgttatttccaacctgtgagtcatagatatttagaggaatgtcagatttagtaaacatatggattcttcccaacaagcatgttctgaaagctaaataaatagttgtctccatgtaataccatttattgcatataggcattatgataaataaaatgcaaatccacctaaaatatacctgaaatatagtatagtcaatatttttgtttcactcaagatgcagtaaaagtagagctactaaaaatgagagttccatgagatttttgacatttgaaattaatatttttttccaaagaggagaacctattaaaccatatggaaatagagacacacttttaaatatttaacctctctaaacatt

SEQ ID NO: 17577 - DNA, 1841 bp, Homo sapiens
agtaatggctttgaaggggaatgagtaagctggtttaaagtctacagggagcaatatcctacatagatgaataagacaaacaagaaatattcttgaatggagcaagaatgtgggaaacatttaaatgagaaaacagagatgaaataaagaaatgcagagagctttgaagtccacatagaagactttagaagatagtaataactaacattatccaccyagcactcatctaagctctttagatatatcactttatgtaatcttcacaagtctatgaggtagatactagtatttttcccatttaacagattaggaaaccaaggcacaaaatgatggagtgccttacccaaagccacatagcaactaagtggtgaagacagttgaaatttgaagcataagctctattctatactagaattcatttgtcactaactgtgctagacagtatgctgaatctggccctaggaatcttaaagagctatgtgtaagagaaaaaatattttttctaccccttcaattgtcaacacatagattatttactctgtgaattgatggaacacaatctttaatccatggggttttttttgtgtttttttttttcgagatggagttttgctctgttgcccaggctggagtgcagtggtgcaatctcagctcactgcaacctccgcctcctgggttcaagtgattctcatgcctcagtttcccaagtagctggaattacaggtggatgccccaataatttttgtgttttcaggagagacggggtttcgccatgttggccaggctcatctggaactcctaacctcaagatatccacctgcctcggcctcccaaagtgctgggattacaggcatgagccaccacgcccggccaattctatgttttttatacacattcttctcataaagtgtgcgcatctatacactgtaagtgtgtgtatgttgtggtatttatataatcaaatacaatttaccaccattgttcaagatcgcaagatcgtgcttcattcttatctctactttttagcatggtttccattagctattcctgagaggaaattcacagtccttgcattttacagatggtgaaagtggtttagaggaggtcaatggcttaagcaaggtcacagatcaagttttagcaacatttggcttaaatcgggatcaataacctctgactgtccagcctgatccttacagggtctgcctgtcctggggcctgggccacattccaaattgggtcatctggtgcatgctgcctgtctgaaattccccttgtggttttgctcacatctggtgtttttcacttctctttctaaacacgtgctttgatcctattgctgctacagcagaaagatgtccatggttccaaggagcatagctaatttagtgagaggtgaaagatactcctctcaacaggacttctaaaaataaacagtatcatagcctcacaatgtcatgcttgaagcacttcccacaaaacccccaatttagtaacttctacagtatctctctacagccccaaaacctctaacatgcctggacttctagcccctcttctcaaatcctcaacccatttgaagtcttcctcatgttgttcttccttttagtcactcttgaagtagactgcaagggtgacaaatggttaaatgctttccataagagctctgtagtcgtgtttctccatcagctcacacacactaagctgggagctacgtatatttacttccataaaaccttatctaccagctttcctgttttatttattttagcaaactttgttcctcatttctgcccctactttattttagtaagtctgtttcttaattataaaagtatttt

SEQ ID NO: 17578 - DNA, 1841 bp, Homo sapiens
agtaatggctttgaaggggaatgagtaagctggtttaaagtctacagggagcaatatcctacatagatgaataagacaaacaagaaatattcttgaatggagcaagaatgtgggaaacatttaaatgagaaaacagagatgaaataaagaaatgcagagagctttgaagtccacatagaagactttagaagatagtaataactaacattatccacctagcactcatctaagctctttagatatatcactttatgtaatcttcacaagtctatgaggtagatactagtatttttcccatttaacagattaggaaaccaaggcacaaaatgatggagtgccttacccaaagccacatagcaactaagtggtgaagacagttgaaatttgaagcataakctctattctatactagaattcatttgtcactaactgtgctagacagtatgctgaatctggccctaggaatcttaaagagctatgtgtaagagaaaaaatattttttctaccccttcaattgtcaacacatagattatttactctgtgaattgatggaacacaatctttaatccatggggttttttttgtgtttttttttttcgagatggagttttgctctgttgcccaggctggagtgcagtggtgcaatctcagctcactgcaacctccgcctcctgggttcaagtgattctcatgcctcagtttcccaagtagctggaattacaggtggatgccccaataatttttgtgttttcaggagagacggggtttcgccatgttggccaggctcatctggaactcctaacctcaagatatccacctgcctcggcctcccaaagtgctgggattacaggcatgagccaccacgcccggccaattctatgttttttatacacattcttctcataaagtgtgcgcatctatacactgtaagtgtgtgtatgttgtggtatttatataatcaaatacaatttaccaccattgttcaagatcgcaagatcgtgcttcattcttatctctactttttagcatggtttccattagctattcctgagaggaaattcacagtccttgcattttacagatggtgaaagtggtttagaggaggtcaatggcttaagcaaggtcacagatcaagttttagcaacatttggcttaaatcgggatcaataacctctgactgtccagcctgatccttacagggtctgcctgtcctggggcctgggccacattccaaattgggtcatctggtgcatgctgcctgtctgaaattccccttgtggttttgctcacatctggtgtttttcacttctctttctaaacacgtgctttgatcctattgctgctacagcagaaagatgtccatggttccaaggagcatagctaatttagtgagaggtgaaagatactcctctcaacaggacttctaaaaataaacagtatcatagcctcacaatgtcatgcttgaagcacttcccacaaaacccccaatttagtaacttctacagtatctctctacagccccaaaacctctaacatgcctggacttctagcccctcttctcaaatcctcaacccatttgaagtcttcctcatgttgttcttccttttagtcactcttgaagtagactgcaagggtgacaaatggttaaatgctttccataagagctctgtagtcgtgtttctccatcagctcacacacactaagctgggagctacgtatatttacttccataaaaccttatctaccagctttcctgttttatttattttagcaaactttgttcctcatttctgcccctactttattttagtaagtctgtttcttaattataaaagtatttt

SEQ ID NO: 17579 - DNA, 1841 bp, Homo sapiens
agtaatggctttgaaggggaatgagtaagctggtttaaagtctacagggagcaatatcctacatagatgaataagacaaacaagaaatattcttgaatggagcaagaatgtgggaaacatttaaatgagaaaacagagatgaaataaagaaatgcagagagctttgaagtccacatagaagactttagaagatagtaataactaacattatccacctagcactcatctaagctctttagatatatcactttatgtaatcttcacaagtctatgaggtagatactagtatttttcccatttaacagattaggaaaccaaggcacaaaatgatggagtgccttacccaaagccacatagcaactaagtggtgaagacagttgaaatttgaagcataagctctattctatactagmattcatttgtcactaactgtgctagacagtatgctgaatctggccctaggaatcttaaagagctatgtgtaagagaaaaaatattttttctaccccttcaattgtcaacacatagattatttactctgtgaattgatggaacacaatctttaatccatggggttttttttgtgtttttttttttcgagatggagttttgctctgttgcccaggctggagtgcagtggtgcaatctcagctcactgcaacctccgcctcctgggttcaagtgattctcatgcctcagtttcccaagtagctggaattacaggtggatgccccaataatttttgtgttttcaggagagacggggtttcgccatgttggccaggctcatctggaactcctaacctcaagatatccacctgcctcggcctcccaaagtgctgggattacaggcatgagccaccacgcccggccaattctatgttttttatacacattcttctcataaagtgtgcgcatctatacactgtaagtgtgtgtatgttgtggtatttatataatcaaatacaatttaccaccattgttcaagatcgcaagatcgtgcttcattcttatctctactttttagcatggtttccattagctattcctgagaggaaattcacagtccttgcattttacagatggtgaaagtggtttagaggaggtcaatggcttaagcaaggtcacagatcaagttttagcaacatttggcttaaatcgggatcaataacctctgactgtccagcctgatccttacagggtctgcctgtcctggggcctgggccacattccaaattgggtcatctggtgcatgctgcctgtctgaaattccccttgtggttttgctcacatctggtgtttttcacttctctttctaaacacgtgctttgatcctattgctgctacagcagaaagatgtccatggttccaaggagcatagctaatttagtgagaggtgaaagatactcctctcaacaggacttctaaaaataaacagtatcatagcctcacaatgtcatgcttgaagcacttcccacaaaacccccaatttagtaacttctacagtatctctctacagccccaaaacctctaacatgcctggacttctagcccctcttctcaaatcctcaacccatttgaagtcttcctcatgttgttcttccttttagtcactcttgaagtagactgcaagggtgacaaatggttaaatgctttccataagagctctgtagtcgtgtttctccatcagctcacacacactaagctgggagctacgtatatttacttccataaaaccttatctaccagctttcctgttttatttattttagcaaactttgttcctcatttctgcccctactttattttagtaagtctgtttcttaattataaaagtatttt

SEQ ID NO: 17580 - DNA, 1253 bp, Homo sapiens
gtacaaaactaatcttcaaaagtagttatcttcatctgtcaatgtgatcttatcaaggatttttataatttctataaacaatcattatattttagctgaatcagtagcattatgctgtctaaacagatagtcagattccttctattttaaaacactttctaccagttcccatcccaccactcaccactcaccccyacgctggccctgtaaaaggaatttggcttcaactttcttttcttaatccactaagcaatcgcatgaataaaaagataatcacatgccctgcatgcctgatagaatttttataaatcttctaagtgttttaatatttattttctattttgtgaaaataatatttactgaacaagctagatcatcttctttctccacagaaaaaaaggtaaggttggtgaaaatacactgaaagctctgctaggtacacattatttttgcataaaattttgcttaaaattctgtggaggctggcaaagcactgtagaatgattgacatggctgccttgatattgttcttgctttttctttgtccacttatgttgaccctgccactcctaaatatgctaatattacttttgctgaggtagggaatcactctctttatacaagttttgttgttcatcttggtctcccaaaaggatggcctcaccaaattttttcttactctctctcaaggagtttgtttccctcaaaacaggaaagacatctgagggacatacccagaactgtatccataagcattccatcctatcaacaattaacaagtagccagggacagaatttaggcagctccattttcttttttttttttttttttggagacacagtctcgctctgtcgctcaggctggagtgcagtggtgcaatcttggctcactgcaagctccgcctcctgggttcaggccattctcctgcctcagcctcccgagtaactgggattacaggtgcgtgccaccacgcccagctaatttttttgcatttttagtagagatgggatttcaccgtgttagccaggatggtctccaaccttggttggagagtatgagactagcagcccaacagtccaacaaagaactattggacttcttcccaacagtgacccttaggtgtcctctcctggtaagtgctcagagattagtctcccctagaaaccttctttccccatgtcagaccaaaaatatataggcgaacacttagaacatatttgaaattctccatatataagtcaccaagttgaat

SEQ ID NO: 17581 - DNA, 1253 bp, Homo sapiens
gtacaaaactaatcttcaaaagtagttatcttcatctgtcaatgtgatcttatcaaggatttttataatttctataaacaatcattatattttagctgaatcagtagcattatgctgtctaaacagatagtcagattccttctattttaaaacactttctaccagttcccatcccaccactcaccactcacccctacgctggccctgtaaaaggaatttggcttcaactttcttttcttaatccactaagcaatcgcatgaataaaaagataatcacatgccctgcatgcctgatagaatttttataaatcttctaagtgttttaatatttattttctattttgtgaaaataatatttactgaacaagctagatcatcttctttctccacagaaaaaaaggtaaggttggtgaaaatacactgaaagctctgctaggtacacattayttttgcataaaattttgcttaaaattctgtggaggctggcaaagcactgtagaatgattgacatggctgccttgatattgttcttgctttttctttgtccacttatgttgaccctgccactcctaaatatgctaatattacttttgctgaggtagggaatcactctctttatacaagttttgttgttcatcttggtctcccaaaaggatggcctcaccaaattttttcttactctctctcaaggagtttgtttccctcaaaacaggaaagacatctgagggacatacccagaactgtatccataagcattccatcctatcaacaattaacaagtagccagggacagaatttaggcagctccattttcttttttttttttttttttggagacacagtctcgctctgtcgctcaggctggagtgcagtggtgcaatcttggctcactgcaagctccgcctcctgggttcaggccattctcctgcctcagcctcccgagtaactgggattacaggtgcgtgccaccacgcccagctaatttttttgcatttttagtagagatgggatttcaccgtgttagccaggatggtctccaaccttggttggagagtatgagactagcagcccaacagtccaacaaagaactattggacttcttcccaacagtgacccttaggtgtcctctcctggtaagtgctcagagattagtctcccctagaaaccttctttccccatgtcagaccaaaaatatataggcgaacacttagaacatatttgaaattctccatatataagtcaccaagttgaat

SEQ ID NO: 17582 - DNA, 668 bp, Homo sapiens
ccatgaaggcctggcccatacatggaaaacaactcccatggtaaataacttccatggaaatggacaaggtggattccttttacccccacctgctcactttatttttcacctatctactttattctctcacaccattctgggatacaaaacattttgctgtcctttcagatctaacagatccttkggaatatcctttggacatttattccaagcgtgaaaacaattttttttcagtggtataatttggatgttatttatactttcttgaaaattttctttttttttccttcctctctccctctctcctttttccctttcctcctttctcattctttcttccttcctttctttgttcctccctcccttccttctttccttcttttcccataagtaggactgaagacattattccagtagagttatttccatataggcaggaattctcagcatgactgtccaaggaatggtttctactatgagctttaaaaaggattgttcccatgtgttgaccccatgttgatgctgacacggcattcagcattttctttcagcttaatagacatgtcaaatatcctctgtctttataatatatcttaaatgccattaagaccattctggaactgagtttattctagttccttcaccttctctgtgtagaagcagtttca

SEQ ID NO: 17583 - DNA, 514 bp, Homo sapiens
atttggagtggcattttttyttttgaaatgaattaataaaatacagaaatacctagaaaaatattgtattctgtgtgaacaaaatggtgaccctgccaaggaaggcttttcaaatcttcagaacagtccattcatttaatgacaattttaatttactgaaattttacaaaattttaatttactgaaagcttattatgtatcagctccttcatatggtttatgttatttaatcctgtgaacagcacagggaatttggaattattaatattatcatttttaaagatgactaatgctaagagaggttaaataacattcctaaggtgacacaatttatgagtcatgagtgagactcaaactatatttttgagtattaatttgctttatttatttattttcttcttagtttttttttttactaaaattgaggtgcattatacttataaaatttagcaccttcaccatttctaagggtagagttcagtgaagattcaaatttgaatttaattctcaaatt

SEQ ID NO: 17584 - DNA, 543 bp, Homo sapiens
cacaatgttgcaccaagggcaaagagagatgaattaatgaagtcttaagatatcaagaatttgaaagaaaaggcaggtcatctttgaaggttagtgacatagcattcatcttctgttgtcaccttttccgtcattccctgtatgcctgatggaccgctttcactcaagttcagagaacagcatgcaaagattagctaccaactttttrttatgaagtgagcttaaattcaagccagactgagcttacgttttagcaggaagcatttttgggaaatgtttatgttagagattgcccttcttgacaaggtgagacataaatgtctactttataaacatgaatttatatgggaagatatttgagggaaacattttctcaaatgctaaataacaaaggtacacaaaggggaaattatactagatttatttcccacttgttttctatgtctcatgcaattcaccttgattcccttcagtttctgtttaatgtagaaagcggcgttttcattattttaagcttctagcacaatgaaagtatttctcttt

SEQ ID NO: 17585 - DNA, 585 bp, Homo sapiens
gtgccaggctttgctattaggatgtcacaaatattactacacttatttgtcaagcatccctctgagacaggtattttattgcttttcccattaaaccaagacacagacgaaggccctgcagtactgaagcctggagtccagataagaaccaggaagtctcatgccaaggccttgctttaacctcaacaccatcaacaaaactctcaaaaaagaacatatgggccgggcacggtggctcatgcctgtaatcccaccactttgggaggccgaggcgggtggatcacctgaggtcaagwctagcctgaccaacatggtgaaatcccatctctactaaaaatacaaaaatcagcttggtgtggtgttgcacacctgtaatccctgctacttgggaggctgaggcaggggaattgcttggacccgggaggtggaggttacagtgagctgagaccacgccattgcactccagcctgggtgacaagagtgaaactccatctcaaaaaacaagaacagaaacaaaacaaaacaaaaccccaaaaacaaccatatgaagagggttttaatacagacagaagtgaaaattaatga

SEQ ID NO: 17586 - DNA, 585 bp, Homo sapiens
gtgccaggctttgctattaggatgtcacaaatattactacacttatttgtcaagcatccctctgagacaggtattttattgcttttcccattaaaccaagacacagacgaaggccctgcagtactgaagcctggagtccagataagaaccaggaagtctcatgccaaggccttgctttaacctcaacaccatcaacaaaactctcaaaaaagaacatatgggccgggcacggtggctcatgcctgtaatcccaccactttgggaggccgaggcgggtggatcacctgaggtcaagactagcctgaccaacatggtgaaatcccatctctactaaaaatacaaaaatcagcttggtgtggtgttgcacacctgtaatccctgctacttgggaggctgaggcaggggaattgcttggacycgggaggtggaggttacagtgagctgagaccacgccattgcactccagcctgggtgacaagagtgaaactccatctcaaaaaacaagaacagaaacaaaacaaaacaaaaccccaaaaacaaccatatgaagagggttttaatacagacagaagtgaaaattaatga

SEQ ID NO: 17587 - DNA, 578 bp, Homo sapiens
gcggaagtggcattttgcggttttctgttgtcatgaagcaagtgcgccacacttgcctgtcttatgtgcgtgtgtatatgagcatgcccatctcagtctccctgagcgcctcttttccacccgtctcaggcctctgtgttagctgttccctctctctgaaacaccaaactccctgatctcagcctgtctctccagtctcgaygtaacagcatcttcccagcgaggcctgctctgaccacacggcccgggaaagcagcccaggccccctctcacttcaccctgtgcccattcttgaccctgtgtattgtgtctctcccttgcctggtttgtgtcaggaaggcagaggccctgcctgtcctgctcactgccgcaccccaggcccagcatgctgcctggcatgggcaggcattgacttgatattagctgggcaatgaatgacagtgactgaaaatgtaatagcaagtcagggcctagcacaggaaaataagtgattgctatgtaagtgaagggttgctaagtaggatttgggtcataacatactgttaaggataatttttttgttctctacatgtaaaaat

SEQ ID NO: 17588 - DNA, 590 bp, Homo sapiens
ttttttctaaaggaagaaaacttagtcatttatttagctttaataattggctttttgagtttgttcaatactttaagctctgtgagcatatggatcatgycagccatctagcacagggtttagaaaacagtaactgctcaaacttttgctgtgaatgaatgaaggagcaaatgaatgattttcctgaaagggaaataaaaacagaattcagtttctgatcattgtccagggaatggcttggacacaaatagttgacctgttggaagagaatatacatttttaataaaggagaagggactgtgtttttcctggagggaggagacctgtaaagaaaaatatagaggtgtggggggctgggcgcagtggctcacgcctgtaatcccagcactttgggaggccgaggtgggcagatcacctgagctcgggagtttgagaccagcctggtcaccatggcaaaaccccatctctactaaaagtacaaaaattagccaggcgtggtggtgggcacctgtaatcccagctactcaggaggctgaggcaggagaatcgcttgaacccgggaggtggaggttgcagtcagccgagagaga

SEQ ID NO: 17589 - DNA, 590 bp, Homo sapiens
ttttttctaaaggaagaaaacttagtcatttatttagctttaataattggctttttgagtttgttcaatactttaagctctgtgagcatatggatcatgtcagccatctagcacagggtttagaaaacagtaactgctcaaacttttgctgtgaatgaatgaaggagcaaatgaatgattttcctgaaagggaaataaaaacagaattcagtttctgatcattgtccagggaatggcttggacacaaatagttgacctgttggaagagaatatacatttttaataaaggagaagggactgtgtttttcctggagggaggagacctgtaaagaaaaatatagaggtgtggggggctgggcgcagtggctcacgcctgtaatcccagcactttgggaggccgaggtgggcagatcacctgagctcrggagtttgagaccagcctggtcaccatggcaaaaccccatctctactaaaagtacaaaaattagccaggcgtggtggtgggcacctgtaatcccagctactcaggaggctgaggcaggagaatcgcttgaacccgggaggtggaggttgcagtcagccgagagaga

SEQ ID NO: 17590 - DNA, 551 bp, Homo sapiens
taaacagagtattaaatgcagatgaacaagatgtcggaaagcaatggtaatgttagcaaagctagagagaagataatttcktatattttacagcaaatgttgttgtctatgtaaagaaaattataggcatgactgtgaagaaatgaggtttatttaagatgccaaaagtggctgggcgtgatggcttatgcctgtaatcccatcgctttgggaggccaaggcagaaggatttcttggggctagaagttcaagacaaacctgagcaacacagcgagaccctatctctacagaaaatttaggaaattagctgggcatggtggcatgtgcctgtagtcccagctactcgagaggctgaggtgggaggatcacttgagcccgacaggttgacgctgcagtcagccgtgtttgtaccactgcactccagccctgtctcaaaaaaaaataaaaataaaaagatgccagaagttttgtatcagaaaatttcaacagtgcaaaaaagccttatggtaaaaaataaataaaaagaaataaaataaaacttcaagaggtta

SEQ ID NO: 17591 - DNA, 551 bp, Homo sapiens
taaacagagtattaaatgcagatgaacaagatgtcggaaagcaatggtaatgttagcaaagctagagagaagataatttcttatattttacagcaaatgttgttgtctrtgtaaagaaaattataggcatgactgtgaagaaatgaggtttatttaagatgccaaaagtggctgggcgtgatggcttatgcctgtaatcccatcgctttgggaggccaaggcagaaggatttcttggggctagaagttcaagacaaacctgagcaacacagcgagaccctatctctacagaaaatttaggaaattagctgggcatggtggcatgtgcctgtagtcccagctactcgagaggctgaggtgggaggatcacttgagcccgacaggttgacgctgcagtcagccgtgtttgtaccactgcactccagccctgtctcaaaaaaaaataaaaataaaaagatgccagaagttttgtatcagaaaatttcaacagtgcaaaaaagccttatggtaaaaaataaataaaaagaaataaaataaaacttcaagaggtta

SEQ ID NO: 17592 - DNA, 865 bp, Homo sapiens
cataggctggcaggttgtagctttggaagcctgagcagacagtgggcagcctggggccaggcaaacaaatccaggatgtaacagcaaacccccaagccaggcggggccaggctgcctgggaagaggaagctagggccagcctcccagctcgccttcctgcccgcctgctcctgaccctgatcctggaacccccaatccagggaggagtaggctatgcaactttgagtcctgttagggacctattgtgtgtgtgcttggggagggggagtgcaaggtaaggggcagagctgaaagtgggtgtttagagaccctttagttggccagccacccagccagcaacacctgcacccctcccttcagcagtgagagctgacatcagctggcaaacctgtttccccagttgtgggtctgggyggggatggagaggggggagtaactccttcctgcccttcctcttccttaaagaccccaggtttagacccacccaccccctccccctgggggcccggctcaactgggggcctcatagtgagggagggggctgtgggtggctgctgagggaagagggaagggtcagagcatcccaggacttcactcagttggagctccttagggccctggtggggaaaccaaggcagggtcctactacgattgtcagacctcacatgcagtaggtgctccttgggtattagctgaatgactggatagaggaggtgggtcccatggcagtgaccagtcaggaagtcaccccagaggaggctgagtttgggctttgaaggctgagaggaagaaacagcaggagcagtgggacaagagcaattgtcaggagttggggcagggcagagctagtcaagcaggcctggtg

SEQ ID NO: 17593 - DNA, 865 bp, Homo sapiens
cataggctggcaggttgtagctttggaagcctgagcagacagtgggcagcctggggccaggcaaacaaatccaggatgtaacagcaaacccccaagccaggcggggccaggctgcctgggaagaggaagctagggccagcctcccagctcgccttcctgcccgcctgctcctgaccctgatcctggaacccccaatccagggaggagtaggctatgcaactttgagtcctgttagggacctattgtgtgtgtgcttggggagggggagtgcaaggtaaggggcagagctgaaagtgggtgtttagagaccctttagttggccagccacccagccagcaacacctgcacccctcccttcagcagtgagagctgacatcagctggcaaacctgtttccccagttgtgggtctgggtggggatggagaggggggagtaactccttcctgcccttcctcttccttaaagaccccaggtttagacccacccaccccctccccctgkgggcccggctcaactgggggcctcatagtgagggagggggctgtgggtggctgctgagggaagagggaagggtcagagcatcccaggacttcactcagttggagctccttagggccctggtggggaaaccaaggcagggtcctactacgattgtcagacctcacatgcagtaggtgctccttgggtattagctgaatgactggatagaggaggtgggtcccatggcagtgaccagtcaggaagtcaccccagaggaggctgagtttgggctttgaaggctgagaggaagaaacagcaggagcagtgggacaagagcaattgtcaggagttggggcagggcagagctagtcaagcaggcctggtg

SEQ ID NO: 17594 - DNA, 527 bp, Homo sapiens
tggtgtggcagccccaggctgacaggcctctgctgcagccatcccaccgtgagtagggctctggccaaggtacacagaccctggggccagggtgggcatcagacaccaacaagcaaggcaagaggctcagctgtctgagcaatgcagcctggccttcctccctcagaaaaccccttggccagaccaggrgttctctgggactaatggctcacagctatttctgagtccttatatttccccagtgcttcatcccaacactagccccaaagtcaggctgcatccaagcttagccctgatcccagactgagctctatctccatcatgagccccagcctcaggctgagttcttatcccagtctgatttctagcccctggctgaactctgaccccaggttgtgcctccacccagccctcaaccccagacctctctcggcttctaggcccctctggaaactttttgaggcaagagcccagtaggggaggggatggctaggccataagtgaagcgaggtgccacttttacagcc

SEQ ID NO: 17595 - DNA, 527 bp, Homo sapiens
tggtgtggcagccccaggctgacaggcctctgctgcagccatcccaccgtgagtagggctctggccaaggtacacagaccctggggccagggtgggcatcagacaccaacaagcaaggcaagaggctcagctgtctgagcaatgcagcctggccttcctccctcagaaaaccccttggccagaccaggagttctctgggactaatggctcacakctatttctgagtccttatatttccccagtgcttcatcccaacactagccccaaagtcaggctgcatccaagcttagccctgatcccagactgagctctatctccatcatgagccccagcctcaggctgagttcttatcccagtctgatttctagcccctggctgaactctgaccccaggttgtgcctccacccagccctcaaccccagacctctctcggcttctaggcccctctggaaactttttgaggcaagagcccagtaggggaggggatggctaggccataagtgaagcgaggtgccacttttacagcc

SEQ ID NO: 17596 - DNA, 601 bp, Homo sapiens
tcccttacgcagcttgctggtccctcctcagccacctgtgaatctggggctggctcagaagttgaggtggacatgttccttagaaagccaccaatggcaagtctgagaaagcaggtgctgaccaaagcatctgatcacatgccagagagtcttctggcctcctcacctgcatggaagcagttccagagggcaccgcgaggaatcccatcttggaatgatcatgggcccttgaagcctcctccagctggacaggagggcaggtggccatctaagcccctcacgtacagcctcacaggcagcacccagcagagcaggagcttaggagcccaatcttcaaaggctggagagacaagggaggcagtgccacaatgcagagtccccttggaaacctgtatgctggcaaacctccaagccacaagtgaggatrtgcatggtttcgaggctccagggaccagcaaaagctctctacaccctagagtgtctgtctcccaagatccaagaaagctgtgtcttatggaggaggttgttagtgaatttgagcctggaatggccacaaagtcagagacccagcctcaagtttgtgccgctgttgtgctccttc

SEQ ID NO: 17597 - DNA, 532 bp, Homo sapiens
tgccttggtggggctcagacaatgcaagaggctgcagaagctccgagccgcaggtctgagcccccagctcctccctgctggaccacatgggtggctgcggtccccaggcctccctgggggcctctgcagcagtctcctgtgcttctccctgctctgggcctatggaggcatcctgctcttccttgaaggcgcccatgggaggaaccctggggcctggacacactggcccctgctcatcctgccccttcccagcctctgcaagcaacccctgggtggcctttcccctgcactgcagggaccccacttactccctgggctgcacgcccaggctggggttattatgggactagtattttgcctccttttactcyacacttggtcctgggtcctgggctctacagacagataagtgactggaattcaggggtgacgtgctgatggggcctctagactttccctcctccccagtcctcatccccacgtgggtggtggtcataaactcacagcaaggagatgtggtcgtgatgagatt

SEQ ID NO: 17598 - DNA, 591 bp, Homo sapiens
tattaagttattacattttatgatataggatttttgactttattggatttttccaatttgtctctaatgaggttgatttttttaaaatttcagttgaagtaggtaaatatccaagtcctggtactacacaaatcaggtcgaagaatgaggtttgctcattaaaagaagggatggcaatacattaaaatgacttcactgaataaatacctttgctacatgcttcaggctttgttttagtttttgtttgtttctttaccaagctatttttgaacacttttaagtaatagtcttatcaactaaagtaacagcttaaacatttatagtttattttaatgtatatattgataaaaatatatcaatttagatgatatcaaatatgtcaagtacytaagaattaatataacaaaagctgtgaaaaacctataccataaatttgtaaaaattgattgacaagctaattttaaaattggtatgaaactacaaagaaataagatagcaaaaatggttttgaagacgacaaaaactagaggccttatattgccagacatcaagctaattacaaaagtatagtaatcagtatgctgttggcaa

SEQ ID NO: 17599 - DNA, 589 bp, Homo sapiens
atgggacctccgtgagggctgaggcaccaagacagactgtcccactcctgagggtcactctgcctctggatgttgcctctggccagctcccgcagtctgggaaggagagggtcaggccagtcaggcccgggggacaggggtctcaccaggactttgatctacagccacatgtaggggaaggaagggcagcttgggacrggcaacgcaatcaggagtggatgtaccaaaagctgagaccataagaaagagaaatgaggagaagcagagtatcaggagatcattttcaggaacattagatagaggccagaaaggagaagtgggtaattttaatcccatgcagctgctggaaattaatttaattgtgctggtgctggctcttctcccttcaaacccgtttcatcagggcctgatggagtgatgagaccgaggaagacagcccggccgcgccagccagcagccctgggtatgcagctccaggccggacttcctcccgttcctatggctgctaccagagaagatgggaaaactggcactttttcaatctagacgtttctcctcttgacaggggactgaagtgagacaacaggaa

SEQ ID NO: 17600 - DNA, 595 bp, Homo sapiens
ctgtgggcgtggagccggcagccgacggcaaaggtgtcgtggtggtcattaagcggagatccggtgagttttgtctggtttgggccagagagcggcccctttcccgggtctgggagctgtgattttttactgtcaggcaggaagagcggtaactgccatcgcggcgggcatccctggcgccagggtgttggtctgggtaccggcttccctctcggccgacttgtcagctctgtgagccgcgcgcgtctgagcccgtgtcctcacctgtaaagtggagaaatgaaaaagracctgaacttcctcggtggttgttgagagttaaggcacggggttgatgttttcagatgaaattctcaaagcaagtcagggtggggatggatggtttcatcccacaggtgggaagattgaggcacaacaggggaggggccctcgctaccacacttaggaggggacaggctgggttggttgcagccatttgattcccattttgcctgtgtaggttagagaagaggtcttggggaccccactccatacattgtgctgtcaggtgcaggcctttttggggattccctgaatgttcgtgtgagtcgggggt

SEQ ID NO: 17601 - DNA, 544 bp, Homo sapiens
ttcataaggagtgagtgtagataagaatcagaaacaggtgcattactgttgggcaccattttgttatcacagatggtaaccatgagccatccccagaatgttgacatgaactgaacgtattttgaaggttcatttactcagtgctggatctaaacaaacatttatttggatttcccaaataactcttctgttttaaggcagagaactcagattcaccaaaatagttcgtgtgctaactgctttcattaagactgaagtcctcacttagtctggaataagcactgagcattgcacagtgaatgcgtggcttatccaactttttttccattcaaaagcattatttggagttggttggttttcacacaccctagtgtgaagattaattgtcttgatacagtttgaagttttcataayctcatttcggggttatgcagctggaagaggcaatacaagttaataaagtcccttcccaacattgtcctggctgtctttgaatatcaaaggatagccacacacacacacacacacacacacacacacacac

SEQ ID NO: 17602 - DNA, 544 bp, Homo sapiens
ttcataaggagtgagtgtagataagaatcagaaacaggtgcattactgttgggcaccattttgttatcacagatggtaaccatgagccatccccagaatgttgacatgaactgaacgtattttgaaggttcatttactcagtgctggatctaaacaaacatttatttggatttcccaaataactcttctgttttaaggcagagaactcagattcaccaaaatagttcgtgtgctaactgctttcattaagactgaagtcctcacttagtctggaataagcactgagcattgcacagtgaatgcgtggcttatccaactttttttccattcaaaagcattatttggagttggttggttttcacacaccctagtgtgaagattaattgtcttgatacagtttgaagttttcataacctcatttcggggttatgcagctggaagaggcaatacaagttaataaagtcccttcccaacattgtcctggctgtctttgaatatcaaaggatagcyacacacacacacacacacacacacacacacacac

SEQ ID NO: 17603 - DNA, 559 bp, Homo sapiens
tttatttccttgaattagtttctccttctgttttggattttaaaagccctcaaatactctgagtaaacacagactttggaatcacaatgataacagcgttttcccattcatgacattgatttattgtatcatgtttcacaaaaatgttctcactcatggcagctgaattggttgcttctacccaagaatggaaagaatcaaagggtcttttatcttaggtagataacatgtatttttctagccattctaaagaaagatgtgagtttaaaaacatgtgtggaaataagttagataatgataatgtgtgagttagtaattaaagcattgcatgcctccagcaaagacaaatatttagtaggctcttagctcttatagatttaaagtttgcatttttaactattttgaagtaaaccrgaatgtgcatgaagagatgtgaagtgttgaggcatgtccactgaaacattatgcaaataaccaacaaatatcaaccaacggtaatttgacccaaaactaaaataagtcactatgaataaggatactagttaaaaaaaaaaaaaaa

SEQ ID NO: 17604 - DNA, 593 bp, Homo sapiens
tgactcattttgaattcatatttggttaagatccatttataattctgaataaatttagactttatgaaaaatgttattcagttatacacgcctaagggagaaagccaacaggttttcttcctcctgctagaatgcaagcttcaaagaagacagcatttttttttatttgtttgtttgtctgttttgttaattactctatccccaagtgtctataatattacctgcatcatagttgaatacatggatgaatgaatgaatgaatggatggatgagcaagttaaggcagagggtggtagagaagaaagataaaaagaacctgagtccccaggaaagtcatttaggcattacatcaaccacgttactccttcctttttgggttccttgttatgtgaaatcatcaatgtccttatttktttaacacgttaatttttaagttaattggatgcctttcctacttgaagacgacagtcttcctcagtaaagcaaacattttagattattacagtagaacgagactggattttagattattacagtagaacgagactggattttagattattacagtagaacgagattggatggctgtattt

SEQ ID NO: 17605 - DNA, 641 bp, Homo sapiens
cagaggggtgactttgaatagaatggaaggcaggtttgccctaagcagtttccagcttgagttttccttagtgaatttgggggcccaagatattttcctttcagaagactatrtatgtcactactgattgtccaagttatgattccttgatagtgagaggctctgatgtgctaaggaatgggtaggtatgttttttagggctgagcatcccagggcctcctcctagccatcactgtagtacctcagtgatacgcagcaatttctttccctctgagtgcttgtcatccaaggaccccaagtgggaatgagatgacggctttctcatctcagggaacccacaattctctatcactttcctaattgtgggaaagctcactagctctcattacttcctgtctttctcctttttactacctcagaaagtacttagcaggatgtccttattaggcttaccttttgaaacaaagaactccacccctccccgcactggtctgggctattctgcttttccacctgtaacatgagctagtagggaaggctacattaaggaagaactcatttcttagggaaaatgagaagggaaagacataaaactcaggaaggaaaaacacacaagagaaaaacacaatacctcgaaaagt

SEQ ID NO: 17606 - DNA, 641 bp, Homo sapiens
cagaggggtgactttgaatagaatggaaggcaggtttgccctaagcagtttccagcttgagttttccttagtgaatttgggggcccaagatattttcctttcagaagactatatatgtcactactgattgtcsaagttatgattccttgatagtgagaggctctgatgtgctaaggaatgggtaggtatgttttttagggctgagcatcccagggcctcctcctagccatcactgtagtacctcagtgatacgcagcaatttctttccctctgagtgcttgtcatccaaggaccccaagtgggaatgagatgacggctttctcatctcagggaacccacaattctctatcactttcctaattgtgggaaagctcactagctctcattacttcctgtctttctcctttttactacctcagaaagtacttagcaggatgtccttattaggcttaccttttgaaacaaagaactccacccctccccgcactggtctgggctattctgcttttccacctgtaacatgagctagtagggaaggctacattaaggaagaactcatttcttagggaaaatgagaagggaaagacataaaactcaggaaggaaaaacacacaagagaaaaacacaatacctcgaaaagt

SEQ ID NO: 17607 - DNA, 641 bp, Homo sapiens
gattaaatacagagtcctaccctaacattcaaggtcctccataaatgtctgcaatctgcctttttgcctgtatttgtctgcgttaatcccaggtattagccagactggtttgttcaccaacatttgtaaatatgctttgcagcttcccamgattaagcttccacttctcatgcttccgtctttgtgtgaaatgcccttctccagtctatgtgccctccatgcggccagcctattgattggggcccatctcaatactgtgtcctccgtgtgctttttctatatttccatcctctgccaacgatatatatatatatatatatatatatcctcttaactcccacagctcttcatgtatcttctttaataatatttatcttatttggacacgtgcctaatctgctgaactagaatataatctccctgacagcagaggtctagtgctttagttttcctgaaacaatggctacaatgccatttatatagtagcagcagttgtaacaacgatgatggcagctaacatttagtgagcatttactatttgtagggcagtgttctgatcaattttcaagaattaacatatacttaacccttatatgccataaggtagatattccccatattgcagatgaggatacaggcaa

SEQ ID NO: 17608 - DNA, 1909 bp, Homo sapiens
atatatgtcccttctttttaggttgttccaaaaccaatcaatccaacttcacaaatagtaactactagccagccacagcaacggcttatcatgcctgccacaccactgccacagatccagcccaacctcactaacctgccaccaggcactgtcctggcaccagctccgggaacagggaatgtgggttatgcagtgcttccagctcagtatgttactcaggtatgtggaaaaaatgaagtcattgtattgcaaaagtgataatggggtccaagatgtctagtgctatcacagaagctactcaaacacatctaactcagtattgaagtggcactttccaaaatcttaaaatgttaacccaaacctttaagtttatttctatgtacytttagcatttagaaatatataacacaggtcagatatacaagtcagacaatttggagctgagagcagcttggcaggagcgcaagcctgtggcgatatgatagaaaatagactgaagttaaaatcagcagagtccaaatgaatttagaaaagactgtggctgttataaagctcttcctcacacataaatttgatgccactgacttggaaaataagcccaagtttatttattggaaaataaactgtgagatgcatttccaggtgacatatcttcagcgatctatctactcttactggtcatctttagaatgaaagacggggaaacaaacccacacgtgtactttttaatgaaatacactttggaacatgttatgtggctattgataaaaagaataatgttcagtatttttgtcataagcatttctaatgtttagaagttggtgtaaaatagaaactcaactattgtgcatgtaacttctcattctctgtaatttgtagtgtgataaatgatcagtatagtacctattttatttgtaagtaggcacattgcatttttctagcccaaacaagttattacagtactttgagagcattcatctagcatttcctatcattccgacatacttaactcttctgtgaaatactttctttatatttgtactatgtagtactgtaaaatgttcacattattttcacctatagtattggtttgagtctttaaaagagctctgtgaagtatgtgtttgtgtgatattctccattgtgtttttcttatcttaatggatgaatttgtatttcttactgatcatcatacctgacagtattgtccatttttggaaatatgatctaaaattaattttctttacatgtagctacagcagtcttcatatgtatcaatagcaagcaactctacctttactggaacatctggtatccagacccaggcacggcttccattcaatgggtgagtattttgaaaataggtacataagttgttagatcagcttaaatgcaacagtaaatatatatattccaaactacatcctcttttatttttttccccttaaagccatgtgagcatgcctctaaaatacttgttgaaatatttcaaacagaaaaattacagaaatagtcaattcccaaatactctattcagattcaccaatttcactacactagttttattattctctttcattctgagtatgtttccaaaatgatgatgctaactattttttatctttatttttcaagacaaggtcttgctctgttgcccaggctggagtgcagtgctgtgatctcagctcactgcaacctcccaggctcaagcaatcctcctgcctcagcctcctgagtagctggaactctatgcacatgccaccatgctctcctaatttttaaatttttttgtagagatgcggtctcactatattgcccaggctaatctccacctcctgggctcaagtgatcctcctggctcagtctcccagagtgctgggattccaggcttaagccactgcacctgccc

SEQ ID NO: 17609 - DNA, 582 bp, Homo sapiens
gatttcttttgttctgcatgttttatcattattatgtgcttatgtgatgcggttacattatcttggtacttaataaaaaaggtacacacggtggctcacgcctgtaatcctagcgctttgggaggctgargttggaggattgcctgaggtcaggagttcgagaccagcctgcgcaacacagtaaaacccaatctctactaaaatatgaaagaaatcagctgggcgtggtggagtagtcccagctactcgggaggcagaggcaggagaattgcttgaacccgggaggcggaggttgcagtgagctgagatcacaccactgcattctggcctgggcgacagagccagactccaccttgaccaaaaaaaaaaaaaaaaaaaaaaaatagaaagaaaggaaggaaaaaaagaaggtacccacacccaaatatagtcagagacctgatattttaaagtattccaagaaatgggaaaaggtaaaatatcctaataaaatataaaaggaaagatcatttcgaacctaagagagttagagaaaacttcaggaatgaggtgatttataaaataaagcagattctgacaaga

SEQ ID NO: 17610 - DNA, 536 bp, Homo sapiens
tcataattatttctcatactttttctacatgtgtgcatactaaactatgtgtgtagtttgtgaaccaaataaagtattatataattatttctattagatttgggaaggatttttttcacgtaaaaaatctaggtaaattttgcatacagtaaaatgtgttctttatgatgtatactcctatgaattttcacaaatttattctatcatgtaataagtatacagttatatcttattgtaattttaaattgcatttcagtagtcactattgatrttgagcatcttttcaggtgtttattcttaacctttctatctctttcacacagtttctgttcaaatatcttcttcattttgagacggagtgttactctgctacccaggctggagtgcagtggccccatctcggctcactgtaacctcttctccttcccgggttcaagtgattctcctgcctcagcctcccgagtagctgggattacaggcaggtgccaccacgcccagctaatttttgtatttttagtagagatggagtttcacca

SEQ ID NO: 17611 - DNA, 536 bp, Homo sapiens
tcataattatttctcatactttttctacatgtgtgcatactaaactatgtgtgtagtttgtgaaccaaataaagtattatataattatttctattagatttgggaaggatttttttcacgtaaaaaatctaggtaaattttgcatacagtaaaatgtgttctttatgatgtatactcctatgaattttcacaaatttattctatcatgtaataagtatacagttatatcttattgtaattttaaattgcatttcagtagtcactattgatattgagcatcttttcaggtgtttattcttaacctttctatctctttsacacagtttctgttcaaatatcttcttcattttgagacggagtgttactctgctacccaggctggagtgcagtggccccatctcggctcactgtaacctcttctccttcccgggttcaagtgattctcctgcctcagcctcccgagtagctgggattacaggcaggtgccaccacgcccagctaatttttgtatttttagtagagatggagtttcacca

SEQ ID NO: 17612 - DNA, 536 bp, Homo sapiens
tcataattatttctcatactttttctacatgtgtgcatactaaactatgtgtgtagtttgtgaaccaaataaagtattatataattatttctattagatttgggaaggatttttttcacgtaaaaaatctaggtaaattttgcatacagtaaaatgtgttctttatgatgtatactcctatgaattttcacaaatttattctatcatgtaataagtatacagttatatcttattgtaattttaaattgcatttcagtagtcactattgatattgagcatcttttcaggtgtttattcttaacctttctatctctttcacacagtttctgttcaaatatcttcttcattttgagacggagtgttactctgctacccaggctggagtgcagtggccccatctcggctcactgtaacctcttctscttcccgggttcaagtgattctcctgcctcagcctcccgagtagctgggattacaggcaggtgccaccacgcccagctaatttttgtatttttagtagagatggagtttcacca

SEQ ID NO: 17613 - DNA, 640 bp, Homo sapiens
agccagcttgaaggagctcccactggccaaatatgggccaatctgggacaatttcaacatcaaaaccaaaaatgatgatcatggatgattacacatggaataaaataagaatctgggtttatacaaatataaacaagtagatcgctacatgggggagaagggagagctctcccttgcagtaggatgccaactaaatagacatagaaggaatgatggaattggaaaaccatttgacactcatcccagtaattgattcaggcaagactcatcygtggtggtgatgctcagggcactcttcacatttcctcccacactcaccgtgctgggctcttcctttcacttagactgaacatatatagaagtgctttggaagctacaaagcaacctaccaatccaaggcctttggagagtgatgagaagtctgaagagctaactcttcgtgcctatacatatagtccacctcggagctgggaatcacagtgactcccctttggacaatcagtgtctggcaaagcaccatgtatacagtaggtgctcattagtaaccaggtatatggacggtaggtgtgtgttcccctcttcctccagcaccaacctctgcatgccacacacatgcccacccattgggaggatacatatg

SEQ ID NO: 17614 - DNA, 643 bp, Homo sapiens
ccactaaccattatcacttagcctggcacatacttatgtaaccaaagtaccttctgctttgatcgtgcctgcctgcatgacagtggtattccactccacataacgcatgttatttctgggtatctctaataggatgtctcacatgtctacaaaccagcctgttgacctcagtatcttcagtggtcttcctctcttgaaaatgcttcctcttgttcatgatactgtccacaaagtccccaagagcttaaccctacctctgcccatcttgagaacaacagggtccatgccacrccattgtgtgtggaggctcccaaagcctctagccgtctaggtaccagactaagcctcttcaccaatattatgctgtacattctcacccaagccccagagaaagtctgcttggctcagagtctcatcaagtctgtcttgaatagcacatgttggcttttatgttcacctgcaaggcacaataccaagacccagtccattggaacttactgagaaatgcaatgagatgctatcgaccaggggtgtccaatcttttggcttccctgggccatattggaagaagcattgtcttgggccacacataaaatgcactaacaccaacaatagctgatgagcttaaaaaattccaaaaatc

SEQ ID NO: 17615 - DNA, 643 bp, Homo sapiens
ccactaaccattatcacttagcctggcacatacttatgtaaccaaagtaccttctgctttgatcgtgcctgcctgcatgacagtggtattccactccacataacgcatgttatttctgggtatctctaataggatgtctcacatgtctacaaaccagcctgttgacctcagtatcttcagtggtcttcctctcttgaaaatgcttcctcttgttcatgatactgtccacaaagtccccaagagcttaaccctacctctgcccatcttgagaacaacagggtccatgccacgccattgtgtgtggaggctcccaaagcctctagcygtctaggtaccagactaagcctcttcaccaatattatgctgtacattctcacccaagccccagagaaagtctgcttggctcagagtctcatcaagtctgtcttgaatagcacatgttggcttttatgttcacctgcaaggcacaataccaagacccagtccattggaacttactgagaaatgcaatgagatgctatcgaccaggggtgtccaatcttttggcttccctgggccatattggaagaagcattgtcttgggccacacataaaatgcactaacaccaacaatagctgatgagcttaaaaaattccaaaaatc

SEQ ID NO: 17616 - DNA, 643 bp, Homo sapiens
ccactaaccattatcacttagcctggcacatacttatgtaaccaaagtaccttctgctttgatcgtgcctgcctgcatgacagtggtattccactccacataacgcatgttatttctgggtatctctaataggatgtctcacatgtctacaaaccagcctgttgacctcagtatcttcagtggtcttcctctcttgaaaatgcttcctcttgttcatgatactgtccacaaagtccccaagagcttaaccctacctctgcccatcttgagaacaacagggtccatgccacgccattgtgtgtggaggctcccaaagcctctagccgtctaggtaccagactaagcctcttcaccaatattatgctgtacattctcacccaagccccagagaaagtctgcttggctcagagtctcatcaagtctgtcttgaatagcacatgttggcttttatgttcacctgcaaggcacaataccaagayccagtccattggaacttactgagaaatgcaatgagatgctatcgaccaggggtgtccaatcttttggcttccctgggccatattggaagaagcattgtcttgggccacacataaaatgcactaacaccaacaatagctgatgagcttaaaaaattccaaaaatc

SEQ ID NO: 17617 - DNA, 532 bp, Homo sapiens
cctgaagccagcagcttaccctgcagggagaaggagagggagggccgagggctccccacactgggttgtcttatctctcccagggttagggatttccaacattttcccctggatttctctctcagcaaggcctgctgggcagtgtgggtagcaagggtaatattaagaacgaaactgttctctcccagtgctcgctgcaggcccaggctcaggtcttgcagcctgctctgcattcattctcatcatcgtcctgcaagtaggcaccatgatggccagcccctttttagatggaaagaaggaagcacagagagtttgcatgacttgagcaaggtcacacatgtggagagagccgggatatgacctgaagccatcaactctgaggcctgtgctcttacctaagacctcacagctcytctcgatcacaataagggctatttcatgatcgctgtgttctaggcacatgctgagtgcccaacagactcatcgcccacaagtagatctgttctgagcccagtgctggagattcagtgcc

SEQ ID NO: 17618 - DNA, 1500 bp, Homo sapiens
tcccctatcaacaaccaccatggcaaattccacaggtgagaaatttttttttctttacactgtaagtgaaaaataatattagtatgttataatttaaattaatataaattcatacattctaatggaataccatataccaatcagtagatggtatgaaacaaaaccagygcatcagtaatcatgcagaaaaagaatagagaattttttgaatttcatactcagacaaattggtgacataaatacaacctaaatcaccaaacagatactaataaattagctaataaattaattttaaaaggttgcactacttcattactatttccccacatccttaagaaatttttaaaaaacacacaaattatcttcatttaatgtaatggggaaactgggacacaggacaaaatggagtttgaaaaccacagggtgagctatgattagacattttcatcctatcttactgtttctagccacagatatatcattataaagaatcttggggctgggcaaggtggctcacgtctgtaatcccagcactttgggaggccgagatgggtgatcacttgaggtcaggagctcaaaaccagcctggccaacatggtgaaatcccgtctctactaaaaatacaaaaatttgccaggcatggtggtgcatgcctgtaatcccagcactttgggaagccgaggcaggcggaccacctgaggtcaggagttcgagaccagcctgaccaacaaggtgaaaccccgtctctactaaaaatacaaaaattagctgggcataatggcaggcacctgtaatcccagatattcaggaagctgaggcaggagactcacttgaacccaggaagcagaggttgcagtgagccgagatcgtgccattgcactccagcctaggtgacagagcgagactccgtctcaaaaaaaaaaaaaagagatcttgcaaaatattgtttacaagaagcctcaaagaatcttaaacgtttaaaatcattaaaataaaaaataatattgaaattgcatcataggcattaaaaatacgaatggcaaaataaactttttgaactaaagaaatgttaaaggccagttgctgctaaacaaacaaaacaacaggaaatatttgttgactgttcattcagctatgacataggttttccttgtctacaactctattaccaagaaggctttttatcagtgaggaacaattcattttaaggagtaagagttccttacatttttcctccttaaaagagtgacttccttttactggctatgctgaactaaggaaattaaggcagtacaaggtaaagattttaaaaacagataaacatgattctcatgctgaagtaactattaatctcatctacataaaacttgagaagcagaaactcggcctccaagtttgattaggagaattaactttagtcaaataaaaatatcatagtaataattcaaggattgtcagtttggagtttgtccccctaaacatgaagccacattctaaaaa

SEQ ID NO: 17619 - DNA, 1704 bp, Homo sapiens
gtggactgttagaaatctggacatttcaatagtatatcacatcatagtacttgtgtgggatatcatgagtttttctgttcaatgtcaatatctttacattgggcagcccaaagagtcatgccactttatctgcagttctcaaggtatttcagaattcatcagaaagatttaatcaatttatcttccacaattgacctccatgactggtctattttaagtacagtggaaaaaacaagttatttaggtatctcattacccagataaaaatcctttatttgcctcttaatggttctatgaatttaactatctatgttacctacctctatttgtattctcctctgtaaataggtagaaataataacaattgttattgtaataaaataggtaaaaatcatcctcatcatactcatcattatcattacctacctaatagaattattgcaaagattaaaggagatgagatactcacttttgattataaagggccatataatgttaaaaactaatgctgttcccagttagtattgtcctgtattttgagaggtgctcaaatgcaatctgagagtatgtattgttcttttgtttagatttcccttaaaaattattttagtgagtgagtgtgattatatcttgactatctcattaggagaaaaggaattcacatgctgacataagtaggtaagggatatggaaattatatcttaataacaaaggaacacctagagatgtattttataataggaatgagcattgggaatgccttttgttcttctaaattaaggaataccttggagcagatctttgtctttcttctatttagtacccaaacttcctttgggaaatgtcttctgctgggactgccaaccatagttctgaaagtctctgatgactttgggatccagccctagtctagcacaggccatgcccagaccttagggactgatcccaggttgagcatgagttttacgttagtaatcagtattttcccaagtgtttttcatttagagcttaagaaaaggcactgtaccttttgattttgtttatgggagtatattaataggggactggaagaaggaatcttccccacaagtagttggaattgagataaagaaagaaatagggtgaaggtgagctccaagttcctacactcagttgtgccagatgcaaagaccaataaattcattttttttctatttttgatttgagcctgtgtcttactgccaatactccygaatcatcaacctttttttttttttttttttttttgagatggagtctcactctgtcactcatgctgtagtgtagcggcatgatctcggctcactgcaacctctgcctcctgggttcaagtgattctcctgcctcagcctcctgagtagctgggactacaggtgtgcaccaccacacccagctaattttttttttgtatttttagtagagacagggtttcaccatgttggtcaggctggtctcgaattcctgacctcacgtgatccgcctgcctcagcctcccaaagtgctgggattacaggcttgagccaccacacctggctaatggtcaacttcttatacatagtatctgtatttgaatgctggtgtagaggagagaaaactgtctctctaccctttgagggtttgataattaagtctatgaaataaactgacaggtagacagattaacaggagaaaagccattttaattac

SEQ ID NO: 17620 - DNA, 1704 bp, Homo sapiens
gtggactgttagaaatctggacatttcaatagtatatcacatcatagtacttgtgtgggatatcatgagtttttctgttcaatgtcaatatctttacattgggcagcccaaagagtcatgccactttatctgcagttctcaaggtatttcagaattcatcagaaagatttaatcaatttatcttccacaattgacctccatgactggtctattttaagtacagtggaaaaaacaagttatttaggtatctcattacccagataaaaatcctttatttgcctcttaatggttctatgaatttaactatctatgttacctacctctatttgtattctcctctgtaaataggtagaaataataacaattgttattgtaataaaataggtaaaaatcatcctcatcatactcatcattatcattacctacctaatagaattattgcaaagattaaaggagatgagatactcacttttgattataaagggccatataatgttaaaaactaatgctgttcccagttagtattgtcctgtattttgagaggtgctcaaatgcaatctgagagtatgtattgttcttttgtttagatttcccttaaaaattattttagtgagtgagtgtgattatatcttgactatctcattaggagaaaaggaattcacatgctgacataagtaggtaagggatatggaaattatatcttaataacaaaggaacacctagagatgtattttataataggaatgagcattgggaatgccttttgttcttctaaattaaggaataccttggagcagatctttgtctttcttctatttagtacccaaacttcctttgggaaatgtcttctgctgggactgccaaccatagttctgaaagtctctgatgactttgggatccagccctagtctagcacaggccatgcccagaccttagggactgatcccaggttgagcatgagttttacgttagtaatcagtattttcccaagtgtttttcatttagagcttaagaaaaggcactgtaccttttgattttgtttatgggagtatattaataggggactggaagaaggaatcttccccacaagtagttggaattgagataaagaaagaaatagggtgaaggtgagctccaagttcctacactcagttgtgccagatgcaaagaccaataaattcattttttttctatttttgatttgagcctgtgtcttactgccaatactcctgaatcatcaacmtttttttttttttttttttttttgagatggagtctcactctgtcactcatgctgtagtgtagcggcatgatctcggctcactgcaacctctgcctcctgggttcaagtgattctcctgcctcagcctcctgagtagctgggactacaggtgtgcaccaccacacccagctaattttttttttgtatttttagtagagacagggtttcaccatgttggtcaggctggtctcgaattcctgacctcacgtgatccgcctgcctcagcctcccaaagtgctgggattacaggcttgagccaccacacctggctaatggtcaacttcttatacatagtatctgtatttgaatgctggtgtagaggagagaaaactgtctctctaccctttgagggtttgataattaagtctatgaaataaactgacaggtagacagattaacaggagaaaagccattttaattac

SEQ ID NO: 17621 - DNA, 788 bp, Homo sapiens
ggttgtcatcttcccaaaaaaaagaagtatctcaatggtggtttagctggagatatcttccagaaagataaatataaaccagcttcctacacattcatgagagggagtgggtttggaagcgaaccaaatttgtaggagaaaaggtaggaaagtttcatttggtaaaaattaataaatatttttattaagcatctactctgtgttccatttcgtgtgcttgcctagactttgcagtatgctgcaatatgacaaaacctttgtcctcaggatggtatattttatcttgagaagcatgaatcagactgaaattaaatatctcctacactgcagtattccaaaaaagtcctttccaaaataaaaaaagtttttatttcagtagataagaattcggatattgaatcataaaattttaagaactggaaacgcacttcaggggttttcttattaaatgagtcaatttgttttattattagatggctctgcttttcagaaagaaaatatcttcagaggggaaggctggttaaggttactacttctaggacaatttggaggaaaacttaagagaaaccaagcatttaggaaacatgcatatcaccatcatatgatctgataaaagacaatcagtgaagggacactctgactgaggcaatggtattggcagtacttrattacatcatggatcatacacattagctctttgaaactaatacggtagctgagagaaaatgtattttcttgggtcgaagtcagggctaggatctcagtgagcagtggttcactaagtctga

SEQ ID NO: 17622 - DNA, 615 bp, Homo sapiens
atgactttttagattattctctctctctctctctctccaagggttttgcttctgttaattccttatagtggaaaatgaaaaaagttattaaatgcagctattttccagagcaataataatatctatgaccaatatcgaaaggtaattcaactattacataaaaatatttataaaaaagatgctcaaagttttgattcacatcttctgctttgggaccatggagttccaggaccccaaaatgctgttgattacagaatggagagagtcaaagatgccttctatttccaacagaaacagaggccaaggaaaatattatctatacttttatattgcaaacctatgtcatttcacatgctcatttttatatgtgatgattggacactctaaatgctttgaaaaatgtactgactttgtggttcaaagaacacacgttgaaactaaagtaagtcttaattaccttattttccaaagtatgttacattattgytctattgcaataaaaccaggattgttgatggttgagaaaagggcaataaaaataaaacctaaaggtcatgctaaggccagaaataatgaattgaaatggaagtatatgatcctggcattcatataaaa

SEQ ID NO: 17623 - DNA, 615 bp, Homo sapiens
atgactttttagattattctctctctctctctctctccaagggttttgcttctgttaattccttatagtggaaaatgaaaaaagttattaaatgcagctattttccagagcaataataatatctatgaccaatatcgaaaggtaattcaactattacataaaaatatttataaaaaagatgctcaaagttttgattcacatcttctgctttgggaccatggagttccaggaccccaaaatgctgttgattacagaatggagagagtcaaagatgccttctatttccaacagaaacagaggccaaggaaaatattatctatacttttatattgcaaacctatgtcatttcacatgctcatttttatatgtgatgattggacactctaaatgctttgaaaaatgtactgactttgtggttcaaagaacacacgttgaaactaaagtaagtcttaattaccttattttccaaagtatgttacattattgctctattgcaataaaaccaggattgttgatggttgagaaaagggcaataaaaataaaacctaaaggtcatgytaaggccagaaataatgaattgaaatggaagtatatgatcctggcattcatataaaa

SEQ ID NO: 17624 - DNA, 531 bp, Homo sapiens
caacaaaaaataaaaattgycaaataacccctggtggcaaaatgccccatggatgttcacaatgtaaaggatttgaccccattccagtctcagatcttgcttgcaaataactgaaactgatcctggttcacttaaggggagaaaaaagggatgcattggaaatggtattggatgactcataagatccacggggatgccgtagaataagattcagaaaaaaagaggagggaacagagggggccagatcaccaaaatcacaccacaggaaaacttcattcatccttccaacaaatatttaatctaacaacgatggatggagtgcctaccatgtgccaggcccttgggatacgtcagcaaacaaaacagacaaagcgcccacccccatgaagcttgcattccagtggggaaaaccataagcaataaacattttagaaagtaagtaacatgatatattagaaaatggcaaatgcagcctttttaaaaagtagaggaagataagggggagacgtggatgctgagaggggataggga

SEQ ID NO: 17625 - DNA, 531 bp, Homo sapiens
caacaaaaaataaaaattgccaaataacccctggtggcaaaatgccccatggatgttcacaatgtaaaggatttgaccccattccagtctcagatcttgcttgcaaataactgaaactgatcctggttcacttaaggggagaaaaaagggatgcattggaaatggtattggatgactcataagatccacggggatgccgtagaataagattcagaaaaaaagaggagggaacagagggggccagatcaccaaaatcacaccacaggaaaacttcattcatccttccaacaaatatttaatctaacaacgatggatggagtgcctaccatgtgccaggyccttgggatacgtcagcaaacaaaacagacaaagcgcccacccccatgaagcttgcattccagtggggaaaaccataagcaataaacattttagaaagtaagtaacatgatatattagaaaatggcaaatgcagcctttttaaaaagtagaggaagataagggggagacgtggatgctgagaggggataggga

SEQ ID NO: 17626 - DNA, 1891 bp, Homo sapiens
tctctacccagactctttcctactgaggaaagaaaagctgctagtacaatgtagcaattccctgagaaggtcagagccaatctctttactgatttctttcctcctgttctcttttctctgccctcttcatcattgactgctgttgtataaatataatatctattttattaacctgcattttgtaggatggaatactaaaaaataaaccatttcttacttcaaagtgttttcctggttgtattgcgaatattattcattgaaattggggaaattaactcattttcatctagtaatttgcctgatacatttgttcttacaaactttatcttgttttactctttcttatttgtgtgtttctgtatttcctatttccytgtcatctgcctttttttttttttttttttttttttggcagggagagattctgttacctttgcttttattattttcagagttttttggtttttgctttccagactgagtgtaactgctcattgcagccttgacctcccaagctcaagtgatcctcccacctcagccttccaagtagctgggaccacaggcgtgcaccaccctgcccagccccgtttttgccagtgttttagatgatatgtgtattccatttctaattctactaacttttagatttaaatcttaaacagtatttccagaattatgagaggcattatctgatattttagaatcctttctatttaaaataaaaatgtaatctacctttactccgtacaaatttccacactcatgcactcatctgctccttggtcttctttaatatatacagtgtggtttaattctgggttactaaatattggctttttataaaataccatttttatagctgcttttgtaaattcttggtatcagtgatcaaaacaaggtatatgcaacattttgtcttatttttcattttgtattagtctctcaacccccttatgaagtggaatggacattttacagagaaataactaacctatatttaaaatatgtcaagtgcaatatatctcactataaagtatctaaagctaagtgtcctagttcttgtcactctgaggtctctatttttttttaagtgttgaggttcttttaaaccagaaataccatcaccaggacccttttcttcatgatgatcattacaggcatgcttaatgactaggtgtggattgctaattcccatggcctccagcgtcttctggacttcctcatcaaatgtcatagccctagaacttgtagtttacatttaagagacatcacgactaattttcctttttctctcagtaataagtgttttgcttcaaataactttttttttaaggaaaacaacattcgaactatatttttattaagtcctagcatattagaaacatttcccatgaaatatttaactttattcttgtgctttacataaatgacatttttaaaacattttcaaaaattttcactgaggtaacattgacataaaataatatgcacccatcttaagtggataagttttgacaaaatccaaaacatcactaccatcacaatcaggatattaccacaaagatttgcaatcaatcccagccccagtcaaccactactctgtggtctgtcactatagattagttttccctcttctggaatgtcatataaatgaaataacatggtagtatgcaccctcttattcatggcttctttaattcagcatgtttttgagagtcactacttcttttatatatcagaagcttgtttctatttttttgctgtgtagaattcttttgcatgaacgataccaaaacttttttttttttttttaacaacttacctgttcatgagcgcttgggttacatcctttatggggtgattatgaataaagctgctaaatatttatgca

SEQ ID NO: 17627 - DNA, 603 bp, Homo sapiens
atgttaccaacttataacagctgttaaattgtttcttccatttgaattctttacattagaaaagatgaactagggatgggtggcatgtcataattggccaacagtttcaatgtgacgaaagacccaagggatttagttaattaatagtgaaacataaaccaaaaacataatcaacatgcaagtggcatgggatactggtgcttagaacaggggacaaaatagcctcatgaagttgtccagtggtcagaccagacctgaacttcagttctggacagcatccctcagaagtgagatgaatgaactacagttctcagtgaaaaggactgggatatttttcctggaatatagataccaaaaagaggtggggctggcatgacaataacattaatgaggataacacaaataggcacttcttttggggtgggtatactaataattaccccatcacgaaaaccagccaagttacttttatttgggacattattatttaaaaytgaagaaacacagaaagcacagcttattgaatagatcttatcactctctaaatgtttgcagtttgcatgggtccccctatccaatatatcacaacacacaccaaaaaat

SEQ ID NO: 17628 - DNA, 1567 bp, Homo sapiens
tggaatgtgttcaaacttggcagaaactgtgggatccttgaaacatcaaggtttttcactttttcttcttctttttttaaactgcctgtaaactttcatcaccagtattctgctacaggtatagacatggctaaaatgcattgattcatcctagaaggagggatgtttacagaaattaagccagattcactcaaagcaaagcacaggcttcaacatgaaacccctacccccacctaaaaaaccttctcagcagtaactatctaacttatctacgtgtctcctctactcttcccttaattcttctgtgtcatgtttctggttatactatcatgtgcttccaactttttttcctttgataagagtaattttaagaggctaatttttttttcttaccccacagcagtctcttaactgattggtctgaaattcctttgctccacctcctaacatctgtcacaaaagtcagattataagtcaacccaaaggggagcaaggggtgtgcacgtaagagggaacaccagaaaaatgaaacactagtggttagggcatcactagaaaccataatatagtttctattctttatttgatacaattgtacaaaaggacaccatgttagatataacattaggctgaatgttaatttcctaaataaaaattctctttaaagatgtaaaataataatccctttattattcaatatgtagagatttattaaacacttataaagtaataatttaatatttacagtgaagaaaactaactttcatcttcatttttaaagtaatctctaatactatcagaaatattaacagtgaaatacattaattacaagccaaattatacattgtatgtagctacttaggtattttactaagaaaataactttatctttgatatttcctattttaaaaacttatctgtgaattgatttaatgattgtgtatataaatctgccaaaattatttcaatggatgaaacaatgaatcagtacctatttatatgctgccaaggcacacctataattttttaaatgatgataagagtagcctaaagcagtgagcagacatctcagaaatttcagtgtaagtggttttaacttgcaacatgatgccaaaaaacttagaacagggagctgccatcttgcatccccgtgtgtgtgcacctaatctcagctggttcccccgagaccccctgagcaccaaccctagtcccccgcgcagccccttatccgctgcgacaagatgaaagaaacaatcatgaaccaggaaaaactcgccaaactgcaggcaaaagtgcccattggtggaactgctcacagaaagaaggtggttcacagaacagccacagcaaatgataaaaaacgtcagttctccttaaagaagttagaaatctctggcattgaagaggtgaatatgtttacaaaccaagcaacagtgatccactttaacaaccctaaagcycagacatctctggcagtgaacactttcaccattacaggctatactgagacaaagcagctgacagaaatgctacccagaatcttaaaccagcttggtgcaggcagtct

SEQ ID NO: 17629 - DNA, 540 bp, Homo sapiens
cctttacaaaatcactggtggcctgcaacgcaacaatcccataaaatatgaactgaaaagtattcataatcaggacctcaatctcatcgctactcgtgaactctgttaccactgaagatgctcgctcactccactgtctcacctcttagtgtccacaacagaaacactgaggcatcatctcccgtaattaagatttcggctagagaagtggcacagtaagttataccatttccagacctaacagatttacactacaattaaatatattaaaatttctgcacataaaaaactcatatatacctaatcaaaaggcatctttacccagccagtaggttcatctgtagttctgattattttaaatgagcagatattccaaaaatcaaartaagtacaaatatgccatcttctaaaattctctaattctcaagttttatttctctcatttagagttatcaaactttacttgcaaaactgtattcttaattaaccacaggaaatttccagtaaactgaaatcatcaccataaattcagtaggtata

SEQ ID NO: 17630 - DNA, 583 bp, Homo sapiens
tgggaggccaaggcgggtggatcaccttaggtcaggagttcaagaccagcctgaccaacatggagaaaccccgtctctactgaaaatacaaaaattagctgagcatggtracaggcatctgtaatcccagctactggagaggctgaggcaggagaatcgattgaacctgggaggcggaggttgcagtgagctaaaattgcaccattgcactccagcctgggtgccagagcaagactctgtctcaaaaaaaaaagaaaaaaaaaaagtcgtgagggcttatctcactccaggcctgcatcctcacagttccatccaaatccttcaataagagaatgtctctgtcttggatcctctagcaaacacatcaggactaacggattggaaagacttgtgtgtacttgtagggccagatgctagtgggttgggcagcagtgggcagcagacatgccaggcagatagctccatatccttgaatctgtgtcctgctaccaccacttaagaccccaaagccttacactaacccctgtgtcccagattatttcatttactctatgattttaggcaaagactttcaaatgcatgc

SEQ ID NO: 17631 - DNA, 583 bp, Homo sapiens
tgggaggccaaggcgggtggatcaccttaggtcaggagttcaagaccagcctgaccaacatggagaaaccccgtctctactgaaaatacaaaaattagctgagcatggtgacaggcatctgtaatcccagctactggagaggctgaggcaggagaatcgattgaacctgggaggcggaggttgcagtgagctaaaattgcaccattgcactccagcctgggtgccagagcaagactctgtctcaaaaaaaaaagaaaaaaaaaaagtcgtgagggcttatctcactccaggcctgcatcctcacagttccatccaaatccttcaataagagaatgtctctgtcttggatcctctagcaaacacatcaggactaacggattggaaagacttgtgtgtacttgtagggccagatgctagtgggttgggcagcagtgggcagcagacatgccaggcagatagctccatatccttgaatctgtgtcctgctaccaccacttaagaccccaaagccttacactaacccctgtgtcccagattatttcatttwctctatgattttaggcaaagactttcaaatgcatgc

SEQ ID NO: 17632 - DNA, 654 bp, Homo sapiens
cacaagaaagcctgattgcattttaataattttttataaaagtacactttaaaacaaaaaaaaattgacacaatgtatgtatttggttaaaaaatgtaaggagattataaaatgttcttttatgcatagtcagtccccttcattcaggagccccccagtttctcttttcagaaataacaactgtttaaaagaatgagaacttagtcatcatcttctgatgtccacaattataattttaaatcaggcacttattgtttgaataacagacctttgcatcttgacttactgactttggaccatatctatctacaaaattaacacaatgtcattccttcctccactaccctgatttttgttacaagaaaaayaaagtttgcatcagcatttaagatttccagctatgttatttatagtttgttcaaaatatatatgtgttctgtgctttgccacagcctgtttctaaatcctaccaaaaggctgggtgcagtggctcatgcctataattccagcatttaggaggctgaggcaggaggattgcttgaggtcaggagttcgagatcagcctgggaaacatagcaagacaccatatgtataaaaaatacaaaagtaagctaggcgtgatagcacacacttgtgatagtagctactcaggag

SEQ ID NO: 17633 - DNA, 826 bp, Homo sapiens
agccagtagcaaaagaccacacatactgtatggatccatcatatgaaacattcagaattgcaaatatacagaaagggtatttgtggttgcctagggagggtggggtagggactggggggaaacaagaagtaactgataataggtacaaggtttctttgggggaaatgaagtgttctaaaacagtggtaatggctgtaccgtaaaaccctgcgaatgtactaaaaaccrctgaaatgtacactttaatgcgggaattatatctcagtaaagcttttacttaaaaacagacatcaggagggccagtaatccactgcatatagtccattatctactgaaaatgattcacacatatagagcatcaggtcacagaccccagtatgagaaataacctgttaaaggtaacagacctcagctttattcctactaggcaagtaattgaaatatcccaaatattcacagtagaagatgaacaaaccctgaaatattcataccatgaaaagcagtaccctaaattaacatattaataccttaagaaaaagcaatacaggctgggcacggtggctcatgcctgtaatcccaacattttgggaggctgaggcaggtggatcacttgagaccagcagttcgagaacagcctgcacaacatggtgaaacccgtctctagtaaaaatacaaaaaaattacccaggccttgttgtgtgcctgtaatcccagttattcgggtgactgaggcacgagaattgcttgaacccaggagcagagatcacgccactgcactccagcctctctgacagagtgagactccgctgtctcaaaaaaaaaaaga

SEQ ID NO: 17634 - DNA, 554 bp, Homo sapiens
ataaggaaagggactaacaaaacttgcttttcaaaggataaatgcttgaggggatggagacccccattttccacagtgtgattatgacacattgcacrcttgtatcgctatccatactcccaccctgtgggaagggcaatgagtgagaatgagggaggtatgtagtacacctcctgaggttgggatttgcagcactaagtggcagggacatcagggcagtgatggatcctagggttgagcccagggatcattgggtttgaagagttgacagccaaggtctcaatgctgacagcacaggatcctgctactatttatagacatttctttgatggtgtaaatctctgttggaaaaaaatccactttaaccgttgatcaaagcttggtggccacctaagaatgatctgacatgaaccatcctgctggggctggccggttgagaataattaatcagtgacacactctatatggtaggcaaacaccggaatttgttctgtgcatttaaataacaacacttgtgggtatgtttttaaattcagaaccgttaaatttctttc

SEQ ID NO: 17635 - DNA, 554 bp, Homo sapiens
ataaggaaagggactaacaaaacttgcttttcaaaggataaatgcttgaggggatggagacccccattttccacagtgtgattatgacacattgcacgcttgtatcgmtatccatactcccaccctgtgggaagggcaatgagtgagaatgagggaggtatgtagtacacctcctgaggttgggatttgcagcactaagtggcagggacatcagggcagtgatggatcctagggttgagcccagggatcattgggtttgaagagttgacagccaaggtctcaatgctgacagcacaggatcctgctactatttatagacatttctttgatggtgtaaatctctgttggaaaaaaatccactttaaccgttgatcaaagcttggtggccacctaagaatgatctgacatgaaccatcctgctggggctggccggttgagaataattaatcagtgacacactctatatggtaggcaaacaccggaatttgttctgtgcatttaaataacaacacttgtgggtatgtttttaaattcagaaccgttaaatttctttc

SEQ ID NO: 17636 - DNA, 554 bp, Homo sapiens
ataaggaaagggactaacaaaacttgcttttcaaaggataaatgcttgaggggatggagacccccattttccacagtgtgattatgacacattgcacgcttgtatcgctatccatactcccaccctgtgggaagggcaatgagtgagaatgagggaggtatgtagtacacctcctgaggttgggatttgcagcactaagtggcagggacatcagggcagtgatggatcctagggttgagcccagggatcattgggtttgaagagttgacagccaaggtctcaatgctgacagcacaggatcctgctactatttatagacatttctttgatggtgtaaatytctgttggaaaaaaatccactttaaccgttgatcaaagcttggtggccacctaagaatgatctgacatgaaccatcctgctggggctggccggttgagaataattaatcagtgacacactctatatggtaggcaaacaccggaatttgttctgtgcatttaaataacaacacttgtgggtatgtttttaaattcagaaccgttaaatttctttc

SEQ ID NO: 17637 - DNA, 554 bp, Homo sapiens
ataaggaaagggactaacaaaacttgcttttcaaaggataaatgcttgaggggatggagacccccattttccacagtgtgattatgacacattgcacgcttgtatcgctatccatactcccaccctgtgggaagggcaatgagtgagaatgagggaggtatgtagtacacctcctgaggttgggatttgcagcactaagtggcagggacatcagggcagtgatggatcctagggttgagcccagggatcattgggtttgaagagttgacagccaaggtctcaatgctgacagcacaggatcctgctactatttatagacatttctttgatggtgtaaatctctgttggaaaaaaatccactttaaccgttgatcaaagcttggtggccacctaagaatgatctgacatgaaccatcctgctggggctggccggttgagaataattaatcagtgacacactctatatggtaggcaaacacyggaatttgttctgtgcatttaaataacaacacttgtgggtatgtttttaaattcagaaccgttaaatttctttc

SEQ ID NO: 17638 - DNA, 530 bp, Homo sapiens
agccagactcacagaggaacagggtagaatgtggtttccaggagctggaggagggggaaatggggagatgttggtcaaggggtacaaagtttcagttacgcaggaggaataagttctgggcacccaatgcacarcgatgtgactgagttaacaatgctgtactgtctacttgaaatttgctgagaggatagatcttaagtgttctcatcataaaatgttttttagaaaaagaaagcaaaaaagaaaatggcaactatatgaggtgatagatacattaattagcttgatcctggtgattatttcacaatgtatacctgcataggaacattacatcatacaccttaaatacatacaatttttgtccgtgatatctccataaagatggaaaagaaaactctcaatgatatgtgtaagagcaactgatattaatgtcctaatgacatacttgtctatcaagcttctgccttaccttcaaactacaaagagagaggattttaaagattgtttgtttgtttaagtaaaacaagccc

SEQ ID NO: 17639 - DNA, 1119 bp, Homo sapiens
tttttctgtgtcaatgagttgaacaatcaagtcattcatccatccatctacaaatgcatatggccatctacccactcatcagyggtccacccatttatcctttcaccatccaattgtctactaatccagtcttcatcccttcacccaattatacactgacccatctgaccattgacccatctagctatcaactcatcttcccatatactcagcccccatccaccttcccaaaaatcacttaatgaagtcctaccacacaccaagaagcattcctgatatggcaggatcaagatgagtaagatatcctccatgctcaaaagaactctgtctaaaagagatcatcgtgtaaaaagaaaactgcagaagctctccatccacagattttcaccttaggaactttcacaagcatcagtaatggagaaaatgcacatcagctcagctcccaagcagcagatgatgtcatgggttccttacacactgttactgtcagagcctaacctgtcagtgaatagaggaacttctgtataacaatgtgatcagacagcgatatgaaccactgcagagaggtatgaacaacgtacaatgggagccgaggagagcagtatatcagggtcagggaacagcatactttcttgaacttgaccggattcaaacctaagtcaatgtccttccagaacacacactctccccgtgtcaccatgctactttcaactggaattcaggagctcagacccacagcaactcaaaagatagatgctgaccacagatgtcaccaactgctcctccatcttgactccgggagctgtatgcgagtgacaacaggatggtggttagacggtggtgcatcccggaaggcatgggaccgggcctgctttccacctggtacctatttcaaacggggatgaacggtcaaatcatccatcagagcaggtccctgaactctggtctccagaggaagcagagcaagtgggatagcactaacacgagaacacagcctgggaatcctggagagtgccggaaaaccgaacccaacgttcaaaagggaaatgagtcgggaaggggaaaggtcccgcggactcacggcaaatgtttacatttgatgatctttggaacatatgc

SEQ ID NO: 17640 - DNA, 1119 bp, Homo sapiens
tttttctgtgtcaatgagttgaacaatcaagtcattcatccatccatctacaaatgcatatggccatctacccactcatcagtggtccacccatttatcctttcaccatccaattgtctactaatccagtcttcatcccttcacccaattatacactgacccatctgaccattgacccatctagctatcaactcatcttcccatataytcagcccccatccaccttcccaaaaatcacttaatgaagtcctaccacacaccaagaagcattcctgatatggcaggatcaagatgagtaagatatcctccatgctcaaaagaactctgtctaaaagagatcatcgtgtaaaaagaaaactgcagaagctctccatccacagattttcaccttaggaactttcacaagcatcagtaatggagaaaatgcacatcagctcagctcccaagcagcagatgatgtcatgggttccttacacactgttactgtcagagcctaacctgtcagtgaatagaggaacttctgtataacaatgtgatcagacagcgatatgaaccactgcagagaggtatgaacaacgtacaatgggagccgaggagagcagtatatcagggtcagggaacagcatactttcttgaacttgaccggattcaaacctaagtcaatgtccttccagaacacacactctccccgtgtcaccatgctactttcaactggaattcaggagctcagacccacagcaactcaaaagatagatgctgaccacagatgtcaccaactgctcctccatcttgactccgggagctgtatgcgagtgacaacaggatggtggttagacggtggtgcatcccggaaggcatgggaccgggcctgctttccacctggtacctatttcaaacggggatgaacggtcaaatcatccatcagagcaggtccctgaactctggtctccagaggaagcagagcaagtgggatagcactaacacgagaacacagcctgggaatcctggagagtgccggaaaaccgaacccaacgttcaaaagggaaatgagtcgggaaggggaaaggtcccgcggactcacggcaaatgtttacatttgatgatctttggaacatatgc

SEQ ID NO: 17641 - DNA, 1119 bp, Homo sapiens
tttttctgtgtcaatgagttgaacaatcaagtcattcatccatccatctacaaatgcatatggccatctacccactcatcagtggtccacccatttatcctttcaccatccaattgtctactaatccagtcttcatcccttcacccaattatacactgacccatctgaccattgacccatctagctatcaactcatcttcccatatacycagcccccatccaccttcccaaaaatcacttaatgaagtcctaccacacaccaagaagcattcctgatatggcaggatcaagatgagtaagatatcctccatgctcaaaagaactctgtctaaaagagatcatcgtgtaaaaagaaaactgcagaagctctccatccacagattttcaccttaggaactttcacaagcatcagtaatggagaaaatgcacatcagctcagctcccaagcagcagatgatgtcatgggttccttacacactgttactgtcagagcctaacctgtcagtgaatagaggaacttctgtataacaatgtgatcagacagcgatatgaaccactgcagagaggtatgaacaacgtacaatgggagccgaggagagcagtatatcagggtcagggaacagcatactttcttgaacttgaccggattcaaacctaagtcaatgtccttccagaacacacactctccccgtgtcaccatgctactttcaactggaattcaggagctcagacccacagcaactcaaaagatagatgctgaccacagatgtcaccaactgctcctccatcttgactccgggagctgtatgcgagtgacaacaggatggtggttagacggtggtgcatcccggaaggcatgggaccgggcctgctttccacctggtacctatttcaaacggggatgaacggtcaaatcatccatcagagcaggtccctgaactctggtctccagaggaagcagagcaagtgggatagcactaacacgagaacacagcctgggaatcctggagagtgccggaaaaccgaacccaacgttcaaaagggaaatgagtcgggaaggggaaaggtcccgcggactcacggcaaatgtttacatttgatgatctttggaacatatgc

SEQ ID NO: 17642 - DNA, 1119 bp, Homo sapiens
tttttctgtgtcaatgagttgaacaatcaagtcattcatccatccatctacaaatgcatatggccatctacccactcatcagtggtccacccatttatcctttcaccatccaattgtctactaatccagtcttcatcccttcacccaattatacactgacccatctgaccattgacccatctagctatcaactcatcttcccatatactcagcccccatccaccttcccaaaaatcacttaatgaagtcctaccacacaccaagaagcattcctgatatggsaggatcaagatgagtaagatatcctccatgctcaaaagaactctgtctaaaagagatcatcgtgtaaaaagaaaactgcagaagctctccatccacagattttcaccttaggaactttcacaagcatcagtaatggagaaaatgcacatcagctcagctcccaagcagcagatgatgtcatgggttccttacacactgttactgtcagagcctaacctgtcagtgaatagaggaacttctgtataacaatgtgatcagacagcgatatgaaccactgcagagaggtatgaacaacgtacaatgggagccgaggagagcagtatatcagggtcagggaacagcatactttcttgaacttgaccggattcaaacctaagtcaatgtccttccagaacacacactctccccgtgtcaccatgctactttcaactggaattcaggagctcagacccacagcaactcaaaagatagatgctgaccacagatgtcaccaactgctcctccatcttgactccgggagctgtatgcgagtgacaacaggatggtggttagacggtggtgcatcccggaaggcatgggaccgggcctgctttccacctggtacctatttcaaacggggatgaacggtcaaatcatccatcagagcaggtccctgaactctggtctccagaggaagcagagcaagtgggatagcactaacacgagaacacagcctgggaatcctggagagtgccggaaaaccgaacccaacgttcaaaagggaaatgagtcgggaaggggaaaggtcccgcggactcacggcaaatgtttacatttgatgatctttggaacatatgc

SEQ ID NO: 17643 - DNA, 627 bp, Homo sapiens
agggagggaaggaaggagcaaggaaggaaggaaggaagggagggagggagggagggagggacatagactgtggagttggatagacttggctttaatcctttctgtagcaattctagctgtgtaaaaatacgcgagtgagtcatttattttcttcgagtctctttcttcatcatagtaccaattaacagggctggggtagagagtgatacatgtaaggttgctagcactattggcaatcaaaacatgagagctacttatttacattgtgagtattgctactactgatattatyagttctggacattactaatgatgtgagcactggcctttcatcagagattactggataaggaacatttaccgtcttgtctctgcacattgtgctaaagttccttctttatccaacaacactttctcctgttttcccaatttagtgaaaggattaatcttttcactctcattcttcctgttttgtttcccataatatgggtcccatccttcctcatgagatgggtatctcagcaattgagcccaccccacccacatatttgaccctgatccaagaccctcatttctgggaatgaaccccagatcagccatgatagaggatagcctggttttatcttt

SEQ ID NO: 17644 - DNA, 627 bp, Homo sapiens
agggagggaaggaaggagcaaggaaggaaggaaggaagggagggagggagggagggagggacatagactgtggagttggatagacttggctttaatcctttctgtagcaattctagctgtgtaaaaatacgcgagtgagtcatttattttcttcgagtctctttcttcatcatagtaccaattaacagggctggggtagagagtgatacatgtaaggttgctagcactattggcaatcaaaacatgagagctacttatttacattgtgagtattgctactactgatattattakttctggacattactaatgatgtgagcactggcctttcatcagagattactggataaggaacatttaccgtcttgtctctgcacattgtgctaaagttccttctttatccaacaacactttctcctgttttcccaatttagtgaaaggattaatcttttcactctcattcttcctgttttgtttcccataatatgggtcccatccttcctcatgagatgggtatctcagcaattgagcccaccccacccacatatttgaccctgatccaagaccctcatttctgggaatgaaccccagatcagccatgatagaggatagcctggttttatcttt

SEQ ID NO: 17645 - DNA, 627 bp, Homo sapiens
agggagggaaggaaggagcaaggaaggaaggaaggaagggagggagggagggagggagggacatagactgtggagttggatagacttggctttaatcctttctgtagcaattctagctgtgtaaaaatacgcgagtgagtcatttattttcttcgagtctctttcttcatcatagtaccaattaacagggctggggtagagagtgatacatgtaaggttgctagcactattggcaatcaaaacatgagagctacttatttacattgtgagtattgctactactgatattattagttctggacattactaatgatgtgagcactggcctttcatcagagattactggataaggaacatttaccgtcttgtctctgcwcattgtgctaaagttccttctttatccaacaacactttctcctgttttcccaatttagtgaaaggattaatcttttcactctcattcttcctgttttgtttcccataatatgggtcccatccttcctcatgagatgggtatctcagcaattgagcccaccccacccacatatttgaccctgatccaagaccctcatttctgggaatgaaccccagatcagccatgatagaggatagcctggttttatcttt

SEQ ID NO: 17646 - DNA, 609 bp, Homo sapiens
tgcctgtgcccgcgcgtgtgtgcgcgcgtgtaaattgccgagaaggggaaaacatcacaggacttctgcgaataccggactgaaaattgtaattcatctgccgccgccgctgccttttttttttctcgagctcttgagatctccggttgggattcctgcggattgacatttctgtgaagcagaagtctgggaatcgatctggaaatcctcctaatttttactccctctccccscgactcctgattcattgggaagtttcaaatcagctataactggagagtgctgaagattgatgggatcgttgccttatgcatttgttttggttttacaaaaaggaaacttgacagaggatcatgctgtacttaaaaaatacaagtaagttctctgcacaggaaattggtttaatgtaactttcaatggaaacctttgagattttttacttaaagtgcattcgagtaaatttaatttccaggcagcttaatacattctttttagccgtgttacttgtagtgtgtatgccctgctttcactcagtgtgtacagggaaacgcacctgattttttacttattagtttgttttttctttaacctttcagcatcacagaggaa

SEQ ID NO: 17647 - DNA, 578 bp, Homo sapiens
tggcactgttcacaatagcaaagacttggaaccaaccaaatgcccatcaatgatagactggataaagaaaatgtggtacatatacaccatggaatactatgcatccataaaaaaggatgagttcatgtcctttgtggggacatggatgaagctggaaaccatcactctcagcagactaacacaagaacagaaaaccaaacactgcatgttctcactcagaagtgggagatgaacaatgagaacacatggacacagggagaggaacatcacacaccagggtctgtcagggggtggggggctaggcgagggatagcattaggagaaatacctaatgtagatgatgggttgatggatgcagcartccaccatagcacatgtgtatctatgtaacaaccctatacattctgcacatgtaccccagaacttaaagtataataataaaaaaattgttttatattcacttttgagtaaaattgatgtcctgaaaagatttggtttgactttaagaattttatgtcatataactgctttgtaaatacaactgctttataaattgtaaatattttacatatctgtat

SEQ ID NO: 17648 - DNA, 578 bp, Homo sapiens
tggcactgttcacaatagcaaagacttggaaccaaccaaatgcccatcaatgatagactggataaagaaaatgtggtacatatacaccatggaatactatgcatccataaaaaaggatgagttcatgtcctttgtggggacatggatgaagctggaaaccatcactctcagcagactaacacaagaacagaaaaccaaacactgcatgttctcactcagaagtgggagatgaacaatgagaacacatggacacagggagaggaacatcacacaccagggtctgtcagggggtggggggctaggcgagggatagcattaggagaaatacctaatgtagatgatgggttgatggatgcagcagtccaccatagcacatgtgtatctatgtaacaaccctatacattctgcacatgtaccccagaacttaaagtataataataaaaaaattgttttatattcacttttgagtaaaattgatgtcctgaaaagatttggtttgactttaagaattttatgtcatataactgctttgtaaatacaactgctttataaattgtaaatattttacrtatctgtat

SEQ ID NO: 17649 - DNA, 592 bp, Homo sapiens
tgcccacattctgtcaaccattgatattgtgactcacatacttagacccaacgtacagaaagtgttgactcatacctagcacctggacatatatggaatttctactctaattcctggacttttctgcaggtgtgattgtatgcatctgctaccyaccttagtgatttgactttgctgccttggcccagcccacagatgagattgtgacatatcgcttgactctgcaccttgatggtgcaatctccgctcactgcaacctctgcctcccaggttcaagtgattcttctgcctcagcctcctgaggagctgggagtacaggcatgcaccaccacacccaactagtttttgtatttttagtagagacggggtttcaccatgttggtcaggctggtctcgaactcctgacctcgtgttctgcccgcctcagcctcccaaagtcctgggattacaggtatgagccaccatgcccggcctcgctgggcctttcacccagatgatgtgagttatttttcttgcattggtactgctcacagggtgcattgtgacatatttctaagcccttcactcaggttatgtgactacttttttgcct

SEQ ID NO: 17650 - DNA, 559 bp, Homo sapiens
ttcttctttttccatttgtgcttaatccattttggcaaaatatagggtcttactaaggggtataaaacatagccmagaagatactttgttgacaaaaactgtacattctgttattgttattcttgcaatttatgattcctcttctctattttgcatacttaacgatgctaaccaggcccggttatttagtgggtggtaaacgtgaaagaaaagttttacaaattttttttacttgttttgggaaactcagttttaatgtcgtcttaattaattttttgacagactctggaagagaacttgtcattacagacccagttatcaagaaccgagagctcttcatttctgattacgttgacacttaccatgctgctgcccttaggtaagtactggagacgtgctcttccatgtgaaggaggagtcactgagtgcaggaggtggagagtaatttctcctgatcttttagtagtcactgtattaatcagactcctcttttggcctcagtgaacatgccagtgtccgctctggattgttgagattgcagaggttctccgtgtcttca

SEQ ID NO: 17651 - DNA, 1836 bp, Homo sapiens
tgttttgtactagtgtcacagcataaaatcatattacaagtacgtaaggattcagggtctcttgatagacttatcatagctctatattgaatgaaagccactgtgcttgtgttttgattggaaattcctttagtgtcagttttttggaagccaatgatgtttgccactgatacattcatagaagtgtattatattttcatgaagctttgctttaagtgacactacgcgtgcagttcatttctagttcttgatagaactgcacttaattttcagtagtagtcttgactttttaagggctgtgttatattaagttctcccttactgttaaaacctaattaaatatgctttagaattttctaagacagtcctctggatcctctaaatgtgaattttgatgtaataactgctaataaaattatattgaaastgttttatagaaagttttttccaaagttttctatgtttggctcaattagggcagtatcatcagttctataatgtaaaagaaattttctttcttttgaggtattccataaaagtagttgggaaaattattatgtaaaataataagactcttccaaagccttaataaaaacatcaacattgaaaacagttttttttaggttgcccaaaattatttcttcaaagagtcattcattccttcatttagcaagtatttattgagcaactgctatgtggcagatatgtttctagatgctgtagagacaacagtgaacaataaagataaaagtccttgtcctcacagcagtacattctattgttcatcatatttgatcaatgtactcatttttctttatgcaaggagtggatgtcttattgtaaatgaatagaatatttcttccctaagcgtgtgaaaataggggatggatgagtgggaagggcatgggatattcctggcaagatctctgatttcataatacttttttgggctcatgtagtggaattaaatatacctcttacttcaggaacaaagttaacaaatatgtttgatgatccagccgactttgacactgttatctccgtaatagctttaccattaggctaggatgtaaaatgtacatttatcagttgataagtacctattgagcaccagttgtatttccaactttgagctatttgaatcttctttgaataaggaagttagccttttaactagaaagcctaagagttctggcacatttatttcttcttttgttgaaatttattcacctagataaaggcagcagtttgggactcagatctttattttatcccaccttcttgtcttctgtattccactcttcttatgttctttcccttcatctgtttccttggcctggccagagcagcagtgctgatcttcatttgggaaaggatgttcctgggtattaccaattagtatacagataagtaaagactagttttccagatctaatacttttttttgaagtggttttgctctgtcatttaggctagagtgtagtgaagtgatcgtagctcactgcagccttgacttcctgggctgaactgatccttccacctcagcctcctgagtagctgggactacaggtgtgtgccaccatgcccagctaatttttaattgttttgtagaaacaaagtccaggctggtcttgaactcctgggctcaagcatttctcctacctcggccttccaagggctaggattacaggcatgagccactgtgcttggtccagatgtattactttttatgtttggtattattctgccaaaccaatcatgttattgtttttaatcattgaatcattggatctttaaataggagtgagtatataataataaggctcttctgttttc

SEQ ID NO: 17652 - DNA, 581 bp, Homo sapiens
tgaaaggctgaagccatttttagaatacgattatcgtttattctcttgaaaactatttaagaagccaaaaaattcttcacttcccacagragaaagttctccctacaagagtgttataccatgtcctagagctttcttaccctcagcaggaaatttagcctggataaggattctaggaagatgtcagctcctttgtttgaaaactcatacctcccagcaatgaaaaggaacaaagtcttttcaagatcaaagtcgagatgactaaaacaaaacaaaaccaaacagtttcaaatgaaatacagcaacagtaacaaaatgtacacatgaattctgttaatgtacaaagggggctgggaaagataaacatttattattacaattctgttttctctctaccaaagatcactcatatctgatacttctttttctttttaataaagaaaatcatacccatagaaatgacctcgaacaaaatcttggattctggccttgtacatggcatgtagattttgaaactcatgcactgctgaaaatttcttaacattcaagccgtttggagtaactacatctagaaaggcaaa

SEQ ID NO: 17653 - DNA, 581 bp, Homo sapiens
tgaaaggctgaagccatttttagaatacgattatcgtttattctcttgaaaactatttaagaagccaaaaaattcttcacttcccacagaagaaagttctccctacaagagtgttataccatgtcctagagctttcttaccctcagcaggaaatttagcctggataaggattctaggaagatgtcagctcctttgtttgaaaactcatacctcccagcaatgaaaaggaacaaagtcttttcaagatcaaagtcgagatgactaaaacaaaacaaaaccaaacagtttcaaatgaaatacagcaacagtaacaaaatgtacacatgaattctgttaatgtacamagggggctgggaaagataaacatttattattacaattctgttttctctctaccaaagatcactcatatctgatacttctttttctttttaataaagaaaatcatacccatagaaatgacctcgaacaaaatcttggattctggccttgtacatggcatgtagattttgaaactcatgcactgctgaaaatttcttaacattcaagccgtttggagtaactacatctagaaaggcaaa

SEQ ID NO: 17654 - DNA, 581 bp, Homo sapiens
tgaaaggctgaagccatttttagaatacgattatcgtttattctcttgaaaactatttaagaagccaaaaaattcttcacttcccacagaagaaagttctccctacaagagtgttataccatgtcctagagctttcttaccctcagcaggaaatttagcctggataaggattctaggaagatgtcagctcctttgtttgaaaactcatacctcccagcaatgaaaaggaacaaagtcttttcaagatcaaagtcgagatgactaaaacaaaacaaaaccaaacagtttcaaatgaaatacagcaacagtaacaaaatgtacacatgaattctgttaatgtacaaagggggctgggaaagataaacatttattattacaattctgttytctctctaccaaagatcactcatatctgatacttctttttctttttaataaagaaaatcatacccatagaaatgacctcgaacaaaatcttggattctggccttgtacatggcatgtagattttgaaactcatgcactgctgaaaatttcttaacattcaagccgtttggagtaactacatctagaaaggcaaa

SEQ ID NO: 17655 - DNA, 1201 bp, Homo sapiens
tcaactatcaaagattttaaaaagtatgatagatggaacttaaacattgaaaagtagagtttaaaatatcagtagataaaaggtatagttatttatgtttcacagagagattatattcaccttcctgagactttttcagaaattttaattaaaatcaaaataaattttaaattttcagtctgtacttgccaataaacaaattgactttcaatcagtatttgtcagttaacaatttgaaaattcaaacaaaatattttcgtgcctttgaccatctagaatagataacaattgctattgatgacactgtgcttttctgtggttaaaaaaatagcatgaatgagagctaatattacaagaccaaaattagttctttaaaatttcagattggaagtttaatgaagatttaagctttggtaaaagctaaaataatatttcaatttttttgcttattcatgttgattgatgacagatagattatttttacttttccgctaaatgtcttgattctcatgatgttgtattttggtttttagccctaaagcaaagaaacaagcacatgacgagcacttttgggatagcagacactgtgctgggtgctttaaatatactactaataatcatgtacaataggcatttctctcctcattttattaatgtcaaaagaaaggaatgagaggttaaatattttctctgagtcctataacaggttagtgccaaagstgacatttaaactgctggcttagcatctctcaaaaggaaatgacttgttaagaagctgtaagaatgaaagcataaactcacttaaaatcatgaacctctatgaaggtttatgtgttctggaaatgactgactagctccagagtgtggggcactttaccgtctagtatgcagcctcggccctctagggcctgacattttattagggaaagctactgaaggcatacaataggaaactcaccctaggaacagccaaggtgctatcaaaaaataaatgtactatgtggaaagagaattccttcttttaacttctccaagtattgcagttatcttttatgtctagtataatagtaatcagtcttttcttcatatctataaataaagtgaatatttaataactatataaatgcatttattaataatgtccctaaagattgtatatgtgatatagttgtgagtccattataaagcttgttgaatgaat

SEQ ID NO: 17656 - DNA, 1201 bp, Homo sapiens
tcaactatcaaagattttaaaaagtatgatagatggaacttaaacattgaaaagtagagtttaaaatatcagtagataaaaggtatagttatttatgtttcacagagagattatattcaccttcctgagactttttcagaaattttaattaaaatcaaaataaattttaaattttcagtctgtacttgccaataaacaaattgactttcaatcagtatttgtcagttaacaatttgaaaattcaaacaaaatattttcgtgcctttgaccatctagaatagataacaattgctattgatgacactgtgcttttctgtggttaaaaaaatagcatgaatgagagctaatattacaagaccaaaattagttctttaaaatttcagattggaagtttaatgaagatttaagctttggtaaaagctaaaataatatttcaatttttttgcttattcatgttgattgatgacagatagattatttttacttttccgctaaatgtcttgattctcatgatgttgtattttggtttttagccctaaagcaaagaaacaagcacatgacgagcacttttgggatagcagacactgtgctgggtgctttaaatatactactaataatcatgtacaataggcatttctctcctcattttattaatgtcaaaagaaaggaatgagaggttaaatattttctctgagtcctataacaggttagtgccaaagctgacatttaaactgctggcttagcatctctcaaaaggaaatgacttgttaagaagctgtaagaatgaaagcataaactcacttaaaatcatgaacctctatgaaggtttatgtgttctggaaatgactgactagctccagagtgtggggcactttaccgtctagtatgcagcctyggccctctagggcctgacattttattagggaaagctactgaaggcatacaataggaaactcaccctaggaacagccaaggtgctatcaaaaaataaatgtactatgtggaaagagaattccttcttttaacttctccaagtattgcagttatcttttatgtctagtataatagtaatcagtcttttcttcatatctataaataaagtgaatatttaataactatataaatgcatttattaataatgtccctaaagattgtatatgtgatatagttgtgagtccattataaagcttgttgaatgaat

SEQ ID NO: 17657 - DNA, 1201 bp, Homo sapiens
tcaactatcaaagattttaaaaagtatgatagatggaacttaaacattgaaaagtagagtttaaaatatcagtagataaaaggtatagttatttatgtttcacagagagattatattcaccttcctgagactttttcagaaattttaattaaaatcaaaataaattttaaattttcagtctgtacttgccaataaacaaattgactttcaatcagtatttgtcagttaacaatttgaaaattcaaacaaaatattttcgtgcctttgaccatctagaatagataacaattgctattgatgacactgtgcttttctgtggttaaaaaaatagcatgaatgagagctaatattacaagaccaaaattagttctttaaaatttcagattggaagtttaatgaagatttaagctttggtaaaagctaaaataatatttcaatttttttgcttattcatgttgattgatgacagatagattatttttacttttccgctaaatgtcttgattctcatgatgttgtattttggtttttagccctaaagcaaagaaacaagcacatgacgagcacttttgggatagcagacactgtgctgggtgctttaaatatactactaataatcatgtacaataggcatttctctcctcattttattaatgtcaaaagaaaggaatgagaggttaaatattttctctgagtcctataacaggttagtgccaaagctgacatttaaactgctggcttagcatctctcaaaaggaaatgacttgttaagaagctgtaagaatgaaagcataaactcacttaaaatcatgaacctctatgaaggtttatgtgttctggaaatgactgactagctccagagtgtggggcactttaccgtctagtatgcagcctcggccctctagggcctgacattttattagggaaagctactgaaggcatacaataggaaactcaccctaggaacagccaaggtgctatcaaaaaataaatgtactatgtggaaagagaattccttcttttaacttctccaagtattgcagttatcttttatgtctagtataatagtaatcagtcttttcttcatatctataaataaagtgaatatttaataactatataaatgcatttattaataatgtccctaaagaytgtatatgtgatatagttgtgagtccattataaagcttgttgaatgaat

SEQ ID NO: 17658 - DNA, 459 bp, Homo sapiens
aaaaaatccctattacagttagaatatagaaatttttgtgttgttgattaaacttcctcactagacttgttagaagttaatgtcattttagttgataatttagtgtcagaagcttccgtaaatcatttgggccgggcatggtggctcacgcctgtaatcccagcacttcgggaggccgaggcaggtggatcacaggagatcgagaccatcctggctaacacggtgaaaccccgtctctattaataawacaaaaaattagccgggcatggtggcgggtgcctgtagtcccagctattcgggaggctgaggcaggagaatggcatgaacccgggaggcggagcttgcagtgagccgagattgcgccactgcactctagcctgggcaacagagcaaggctccatctgaaaaaaaaaaaaaaaaaaaaaagaaaaaagaaaaatcatttggataaaagtagga

SEQ ID NO: 17659 - DNA, 1338 bp, Homo sapiens
tggcttgaccattaccatttcattgaccattgtactactrtttactaccatactaccaccaaattttaccattgacatttatactattattcacttaaagaaaatgattaaaataaatgtgcagtttgaaaggcaaactgcggccgggcacggtggctcaggcctgtaatcctaacactttgggaggccaaggcgggcggatcacaaggtcaggagtttgagaccagcctagccaacatgctgaaactccatctctactaaaaatacaaaaattagccaggtgtgatggcggcgcacacgtgtaatcccagctactcaggaggctgaggcagaagaatcacttgaacccaggaggcggaggttgcagtgagctgagtttgcatcactgcactccagcctgggcaacagagcaagactcggtctcattaaaaaaagaagaaaaaaaaaaaaaaaagaaaaggcaaactgcattactatggtccacagaaaaccagtcacatgagccaccaacagaagagaacacaaactaagaccaagggaagccatgttcctagcaccgtgccatccctgctcccagctgaggcttggaggaggcctaccctgctgatcacacggagaagagccaggactccgaggtcacccgcacacagcgggatggcatctccgacactcccgtggggaagcagcgtcactgtgccctgaagactcatgtttgagataggcaggcagcgctgctccatcagccggctggacagttttacatctcagggaagggcactgtgtcatggatgtaaatggcatggcacagcaatatctgtggtgtctagtggtgatgaagtccaggtgctgttagtggaggaaatgctaaattgcagttagacattaatgaaaatagagatgcaatgctttttcattgtgatgcatgggaccccaaattctccctagacctctggacccagcataaggctcctgtgcctgctggccaggctagggtgtggggaccttaccacggcacgtttccttggtgaggccatgtcaacattcctcgtttctcacacttaggacccctcccacgagtggggggtatgcagccctccaaggagccagtggtctcagacctgccaccccacagccagaggtttctggccccaggccactggtgttttccctgccagtgcaggtgaattctggaaggagggtgcctgggaggtgggtgtgggggtggtgggtgacttcaagcctccaaagaccagagggaagggtctgcctcatggagctccgtgagcaaaggccaggaggcacccaggaccccgagtccgtgccagctggcatcggggg

SEQ ID NO: 17660 - DNA, 536 bp, Homo sapiens
tgaaacattttaaggaacttgagcaagacccaggctctcagatgtttccttgcctgtcccagtgactggatgtgtcaggcatcaggactcaggcagatgctgaatctctcacttctcatttaaggtcctattatctcccataactgaataaagtcaagtttggacctgtccatgtagaggcaggatcctgcacatgtgcaggtgagttatgccaagtacatccatattcctctttccttccagtccagtcagttaaaccttggagtgaccaggaaatccggagtttcctgcaagaatgggaatttcttgaacgtgaggtgtacagggtgaagaagaagtatcacatagtatcaaaagcaattgctcagcgtctcaagcagaggggtatcaacaagagctggaaggaatgtctccagatgctaataagcttgcaggacttatacttcactattcaggaggccaaccagaggccaaggtrccaacccttgccatgtccttatggtgaggccctgcacaggattctggggtacagatgg

SEQ ID NO: 17661 - DNA, 542 bp, Homo sapiens
cgagctagtccatggtctagatcccacccacatgccaacatgcacctgcaaaagtcttcaatttgggggcttttaaatcacaagcagacaccctgatttagcttacatattaaaaattccatcgcaggaaaaaaattctccaaaaactcagagctctaattccttaatgaattatgtacgtggtgagggatatayagacagacatgacttgatttcctgttcagaatactggagagcatattggaatacagaccacgaccatttcagggctagtgtttcagtcacacttgcaagtaaagcaaaatgttatcaagatttgttttaattgaggaaatagggaattccaaactgttaataaaacgtcattgacaacatttgagctcaagataaaaatacagcctactttctccaagtttactctatggtctttggagaaatggtgtatgtgaatagacagtcacagactgaagcccattttgcacagattctgcaagacctttctcttcatttatagaagcatgccccttgcattggccaagttt

SEQ ID NO: 17662 - DNA, 564 bp, Homo sapiens
cagccctggcctcccaaagtgctgggattacaggygggagccaccgcaccccgcctaggttcctctttagaagaaaaagaaggtgtctgtcttcaatcttgaaagagaattaacaggtccttcaaaatctggagcttgaaaggaggggagttaaatgtaatcaagggtagccatttggaaagaaatgtctggcaatcctgcattactgtatggtagcctaccagctatcacattccaaatgccaagtctctcccaccaattgtctgaaatttcctcaggcattagcgtagctctgttactaattcctatcaggtgcttaaagttctcacataacaccaaaagtctacagggtacaaaaattgaatggtctgagaagcaatccccatcccccagggctattattttgggaacagtcatacaccttgtgacagaagaaaaactggcccactcactttcactttttgcacggggaaaagcatcttctgagtacagagtaaaatgtggatccccccaacccccgaagcaactggtattcaccatacgttatcttcttcccaagtctat

SEQ ID NO: 17663 - DNA, 550 bp, Homo sapiens
gtagcacacacctgtaatctcagctacttgaaggctgaggctggagaactgcttgaacccaggaggcagaggttgcagtgagccatgattgtaccactgcactccagcctgggcaacagagtgagactccatctccaaaaaaaaaaaaaaaaaaaattatatacatatggtctgggcacggtggctcacgcctgtaatcccagcactttgggaggccgaggcaggcggatcacctgcgtgaggttaggagttcgagaccagcctgaccaacatggtgaaaccccatctctactaaaaacacaaaattagctgggcatggttccgcgcacctgtgatcccagctactcaggaggctaaggcaggagaaccacttgaacccaggaggcagaggctgcagtgagctgagatcaggccattgcactccagcctgggccacagagtgaggctccatctccaaaaagaaaaatctacgtaacaaatgacttacaaacaagcagargcaagaacatgggctggaaagggaataaaggtcaaccttcactagggtcct

SEQ ID NO: 17664 - DNA, 647 bp, Homo sapiens
aggaaatggagccagcttgaaggagctcccactggccaaatatgggccaatctgggacaatttcaacatcaaaaccaaaaatgatgatcatggatgattacacatggaataaaataagaatctgggtttatacaaatataaacaagtagatcgctacatgggggagaagggagagctctcccttgcagtaggatgccaactaaatagacatagaaggaatgatggaattggaaaaccatttgacactcatcccagtaattgattcaggcaagactcatcygtggtggtgatgctcagggcactcttcacatttcctcccacactcaccgtgctgggctcttcctttcacttagactgaacatatatagaagtgctttggaagctacaaagcaacctaccaatccaaggcctttggagagtgatgagaagtctgaagagctaactcttcgtgcctatacatatagtccacctcggagctgggaatcacagtgactcccctttggacaatcagtgtctggcaaagcaccatgtatacagtaggtgctcattagtaaccaggtatatggacggtaggtgtgtgttcccctcttcctccagcaccaacctctgcatgccacacacatgcccacccattgggaggatacata

SEQ ID NO: 17665 - DNA, 540 bp, Homo sapiens
ttaataacttctacttatgctaatccataacactttaataagtacctatgaaccacaatcaccacataattcttcactgaatgtattagactttatatgaatacatctcttctttttttaaccaccaaacagctctctttctttctgaatctatcagagagaaagatctttgaattattttctgtcttagagaaattggtggttctcttcttttctaaaacgatctgtggtatgaaattgtccctttataatttcttaagtatcctcctctctccagmtttctgctattaattacatccatatttcctttttactagaaataaaaagaaaactgcaattttcgtctatgagcttttctaattgctagtctatttttctattgttttcactaccagaatgagtcatcaatatctgctgtagcttgttcttttctctgattaccttacagactcactcatacctctaccattgatgtaagattccttaacatcaccacttcccttctaattaacatctgaaatctcaattcttaagcctgtt

SEQ ID NO: 17666 - DNA, 524 bp, Homo sapiens
tttagccagaatgaaagrttgtgaactgggggagggacagggggcggcagtgttgaggcagaaaagctggagaagaagagtgggaacttcctcctcaacttgctgcccatagagaagcacgcccctcttcctgatggctgtgggaactaggtcaacctggaccgctaagtttgaaccctatcgtggcagcttttcaaatccctttcctggactcctactccagaaggcaaaatggtttcggtttgtctttatttcccatcttttcacccaggtcctcaactacatgctaatccccgccggaccatcgttcagttttattcacagaaacggtgccttcaagaaatcaaagcataagagccttcggaagcagcatgtaagtgcaacgtaactttcccgagtttggtgacgatgaatcgatgaatcgtagactgcaggctgagccgcctgagctgggagcagcagcagttctcagggagccactgccccctggtgtctccacactggccaggaagcatttttggtca

SEQ ID NO: 17667 - DNA, 559 bp, Homo sapiens
cagcaaggctctcaaacatctacttttttttaaagggttgctgggcattaccaattcattttttaagggagaacatatcactttaaggatttattatttgtattttactaatcactgtatgtcatgtttgttgggaaaagaagctatgatgataattgctacattctccatagctcttctcaacagctgacaggttatctatctacttatttgtttatggtctgcctctccactttagccccatcaaggyagggatttttctctcttcttttcactgtagtatctccaagcctcaaagagtacctggcacatggtagttacacaaggaatatttgttaaatgagcagaatgagacgatttctaagttgtgactgagtgcttatatttacatctgttattcattttcagcttgaatttgagcacagtttgagttcctgtgagatgggggaaaacacctactacaattccaggcacgttatttatgatatttaaaagccaattattaactgtcattttctccattttgtatgtgataagactgagtctcaatgactaagtc

SEQ ID NO: 17668 - DNA, 550 bp, Homo sapiens
tttttaaaaaagattaatcaccaacctaggacagaaatttggagtcagaggtaatcactccatccctcatcttctgttatccactccccatagtgaatgctcagtacacctctatggaatgactgagtgactgactgaatgagtgagtaacgactccagtgaggctcacatcagttgtttgactaacccgtggtcttactacgagtagaggacagtgctggactcaaatccaggagagcccattcccagtwctaaactcttctgatcctgacacgtgatttactcacctctaaacaactgtcaattgttccaaagcctaaagccatccttcaagaatactattggctcccatatagactattcaaaataacgtgtcacacagagtttaaaagcaatgctaaaaaaaataactaacaaaaatacatggagaaatagcaagactgtatgagtggaaggtcttccaaagcaactatcaatactttgaaaaggacaacatttatttctacatatacgtttccatttcttaaaaagcaatctttgacctcctgtt

SEQ ID NO: 17669 - DNA, 595 bp, Homo sapiens
gagtggccagtctagtgaatctcctggacagactggcagacagtaggaattgttgcctccttggaaattttttattcttcctttccagagctatcacctctctgaatacccctccacttttttgcttccctccatatgctctatttatgtaaataacatttgatagatgctttagcttggagattcaacattcttgagtccctagctatgtagaagatgctgtatgagtctacagaagatgaaaaggcaaatatctgatttcttgctcattcctctcaaaagatctcaagtactgttcaagtttttgtgtatcttaaaccagcatatatctcttgactaaaaaactgcttagttccttaacagtgaactttaaagctaaattttaagattagggaaaaatatgctatgtgctcagaaagcacaggggacagttaagggggagaaatcgaatttcttaaatgtagtggttggtttatattttgtggcatgagattgtgtatgtaattttgcacgatggtagggctttttggartggtgtggaggtgaagggcaagtcccttcccttgtcacctcacactatgttctgcaagcacct

SEQ ID NO: 17670 - DNA, 584 bp, Homo sapiens
acttcacgaccacaaaagtcccacccgaacagtgaggagtcatcgaagctggattggcttcccaaaatcatggctcattaccactgcactctgaarcttttaggaacataatgagtttttgaaagtgaaatgaacctggcctctgacttcctactggatcccacactgtcttgggacacgaggaagccaaaatgccaacaaactcgtacaaagaacaaacaattaaaacattatgaacttttgaagacaccgtggaagctacaccatatgtttatgaagaacatttggagctttccgaaaagtatttatttagatagaatccctacggatttgctaaatgtcaggcagcaaaattaaaatgtcagcatatggcagagaggtcaaaatggaattaataacatggaggcttgttactcaattcgatacaatttaacaaatctttatggacacctactgtgtgccaggcactgtagtagcccctgcaaggaatacaaaaataagcaaaaagagcctctgtgcccctagaagtttatcgtttggaaagaagggtaagagaataatgtaaattccagaaatacaagaaa

SEQ ID NO: 17671 - DNA, 584 bp, Homo sapiens
acttcacgaccacaaaagtcccacccgaacagtgaggagtcatcgaagctggattggcttcccaaaatcatggctcattaccactgcactctgaaayttttaggaacataatgagtttttgaaagtgaaatgaacctggcctctgacttcctactggatcccacactgtcttgggacacgaggaagccaaaatgccaacaaactcgtacaaagaacaaacaattaaaacattatgaacttttgaagacaccgtggaagctacaccatatgtttatgaagaacatttggagctttccgaaaagtatttatttagatagaatccctacggatttgctaaatgtcaggcagcaaaattaaaatgtcagcatatggcagagaggtcaaaatggaattaataacatggaggcttgttactcaattcgatacaatttaacaaatctttatggacacctactgtgtgccaggcactgtagtagcccctgcaaggaatacaaaaataagcaaaaagagcctctgtgcccctagaagtttatcgtttggaaagaagggtaagagaataatgtaaattccagaaatacaagaaa

SEQ ID NO: 17672 - DNA, 584 bp, Homo sapiens
acttcacgaccacaaaagtcccacccgaacagtgaggagtcatcgaagctggattggcttcccaaaatcatggctcattaccactgcactctgaaacttttaggaacataatgagtttttgaaagtgaaatgaacctggcctctgacttcctactggatcccacactgtcttgggacacgaggaagccaaaatgccaacaaactcgtacaaagaacaaacaattaaaacattatgaacttttgaagacaccgtggaagctacaccatatgtttatgaagaacatttggagctttccgaaaagtatttatttagatagaatccctacggatttgctaaatgtcaggcagcaaaattaaaatgtcagcatatggcagagaggtcaaaatggaattaataacatggaggcttgttactcaattcgatacaatttaacaaatctttatggacacctactgtgtgccaggcactgtagtagcccctgcmaggaatacaaaaataagcaaaaagagcctctgtgcccctagaagtttatcgtttggaaagaagggtaagagaataatgtaaattccagaaatacaagaaa

SEQ ID NO: 17673 - DNA, 556 bp, Homo sapiens
tttttytttttttttgagatggaatcttactctgtgcccaggctgaagtgcagtcggctcactgcaagctccgcctcccaggttcacgccattctcctgcctcagcctcctgagtaactgggactacaggcacctgccaccacgcctggctaatttttgtatttttagtagagacggggttttgccatgttggccaagctggtcttgaactcctgacctcaggtgatccacccacctcggctttgagaacaagaacaccatatctgctggtctcaaactcttcacctcaggtgatccacagtcctcagcctccccaaatcctaggattacaggcgtgagccactgcacccagccaaaaaaactgatgctattttctatacaccttgcaccttatggatgtgcctaccagagatctggattataaccctaccttgtcaccataaaaaattcattcctattggacactgacatgaaagccttatgttacgttttgtgattaagcagttttctcttacagcttatttacaagggaaagagaaaggaaacaagaaatagt

SEQ ID NO: 17674 - DNA, 556 bp, Homo sapiens
tttttctttttttttgagatggaatcttactctgtgcccaggctgaagtgcagtcggctcactgcaagctccgcctccyaggttcacgccattctcctgcctcagcctcctgagtaactgggactacaggcacctgccaccacgcctggctaatttttgtatttttagtagagacggggttttgccatgttggccaagctggtcttgaactcctgacctcaggtgatccacccacctcggctttgagaacaagaacaccatatctgctggtctcaaactcttcacctcaggtgatccacagtcctcagcctccccaaatcctaggattacaggcgtgagccactgcacccagccaaaaaaactgatgctattttctatacaccttgcaccttatggatgtgcctaccagagatctggattataaccctaccttgtcaccataaaaaattcattcctattggacactgacatgaaagccttatgttacgttttgtgattaagcagttttctcttacagcttatttacaagggaaagagaaaggaaacaagaaatagt

SEQ ID NO: 17675 - DNA, 556 bp, Homo sapiens
tttttctttttttttgagatggaatcttactctgtgcccaggctgaagtgcagtcggctcactgcaagctccgcctcccrggttcacgccattctcctgcctcagcctcctgagtaactgggactacaggcacctgccaccacgcctggctaatttttgtatttttagtagagacggggttttgccatgttggccaagctggtcttgaactcctgacctcaggtgatccacccacctcggctttgagaacaagaacaccatatctgctggtctcaaactcttcacctcaggtgatccacagtcctcagcctccccaaatcctaggattacaggcgtgagccactgcacccagccaaaaaaactgatgctattttctatacaccttgcaccttatggatgtgcctaccagagatctggattataaccctaccttgtcaccataaaaaattcattcctattggacactgacatgaaagccttatgttacgttttgtgattaagcagttttctcttacagcttatttacaagggaaagagaaaggaaacaagaaatagt

SEQ ID NO: 17676 - DNA, 556 bp, Homo sapiens
tttttctttttttttgagatggaatcttactctgtgcccaggctgaagtgcagtcggctcactgcaagctccgcctcccaggttcacgccattctcctgcctcagcctcctgagtaactgggactacaggcacctgccaccacgcctggctaatttttgtatttttagtagagacggggttttgccatgttggccaagctggtcttgaactcctgacctcaggtgatccacccacctcggctttgagaacaagaacaccatatctgctggtctcaaactcttcacctcaggtgatccacagtcctcagcctccccaaatcctaggattacaggcgtgagccactgcacccagccaaaaaaactgatgctattttctatacaccttgcaccttatggatgtgcctaccagagatctggattataaycctaccttgtcaccataaaaaattcattcctattggacactgacatgaaagccttatgttacgttttgtgattaagcagttttctcttacagcttatttacaagggaaagagaaaggaaacaagaaatagt

SEQ ID NO: 17677 - DNA, 556 bp, Homo sapiens
tttttctttttttttgagatggaatcttactctgtgcccaggctgaagtgcagtcggctcactgcaagctccgcctcccaggttcacgccattctcctgcctcagcctcctgagtaactgggactacaggcacctgccaccacgcctggctaatttttgtatttttagtagagacggggttttgccatgttggccaagctggtcttgaactcctgacctcaggtgatccacccacctcggctttgagaacaagaacaccatatctgctggtctcaaactcttcacctcaggtgatccacagtcctcagcctccccaaatcctaggattacaggcgtgagccactgcacccagccaaaaaaactgatgctattttctatacaccttgcaccttatggatgtgcctaccagagatctggattataaccctaccttgtcaccataaaaaattcattcctattggacactgacatgaaagccttatgttacgttttgtgattaarcagttttctcttacagcttatttacaagggaaagagaaaggaaacaagaaatagt

SEQ ID NO: 17678 - DNA, 1736 bp, Homo sapiens
gtctccatgtttacctttacctgggcataagggttattttgggacccccgcccatatccccaaccgcatgccattcttttcagcacttagaattaaccttctcttccattcttgacaatctgacctttttwaaaaaaaattctcattttaggtttacgtgaaatttctcgaagtggaccaggggtggtggctcatgcctgtaatcccagcactttgggaggccaaggtgggaggatcacttgaggccaggagtttgaatccagcctggccaacatgaaaccctttctctactaaaaatacaaaaattagccgggcgtagtagagggtacctgtagtcccagttacacgggaggctgaggcagaagaattgcttgaacctgggagccactgcactccagcctgagtgacagtggctccatctcaaaaaaaaaaaaaaaaaaaaattcttgaaggttctgaacggaaaaggaaaatgttggaggatggctgcctcccaggtgggagtgctccatggcccggaggggtgaggacacctttgctgagtttaggagtcttgaccctggtctgttcccgtccacacctacctggcctggttccaaacctgcagcaaggctgcggctgggagtttagccatcctgtccccttgggccagccctgggtggaactcagatcctctgtggcctctgaattggaaatttatggggaagccactgtggacagagccaccagagctgaggccctgcccatctcctcctcataggaggagccggtgccagcctttccgtgtgaacctgtgatccgtgaagtcgggtaagcccttgccagtcctgacatgagcaagggacacagagcttcctaaatatatagactgggattttgtccgaatcacatgacgacccaggttttctttttccctctttgttgcttttaatacataaaatgagcatgtgtttatttaaaacagctttcaaactcaaacaaataatgacagactgttcaaacagacttcggaaatcgccccaatcaggatgtttgaaaaatcaggaagactttctacgaaagaagctttcaggtcattttagtcccgaagccgcagggtctcctttgcactttggaattgtagaagggcaaagtttagaggccagctccaacctccagggggttaaatgacttgccctctagccctacactctaataatgtgtaaagaaggacagataggtaggcattgtattatcacttcccatctttgaccagaacacgggatgtatacattttaattcataattcctatagaaattacggactatcctcagatcagaaagctaagagaggaaattgcttctgcaaaacggcaggctcagcagaacttcttgggggaagggcaggttgagtaggtgcggagcaggtctgcaagaggacagacaagagcaaggtgtttgttctgccacgagctcactttctgtatccaatttacaaatggctttgagtgacctacgttaatcttcacaataatgaattttatggctatggatgaagtaaatgaggctcggggctgggttatctgctgaaggttataaactaataaaatatcaaagccagggttcacccacactcctcctccaagtcccatgcccttctcagccccctgggatggcaacagcatctctatgctgaggctttgggccaagagctgctagtttagctcatctcactctagaaatgacattgttctacg

SEQ ID NO: 17679 - DNA, 1939 bp, Homo sapiens
atttatctctatctcttcatacaccagtaccgaattgttcataatggcttaatatatgccatgtggctttttttttttttttttttttttgagacagagtctctctgtgtctcccaggctagaatgcaggcatgatctcagctctctgcacctctgcctcctgggttcaagcaattctcatgccccagtctcctgagtagctgggattaccggcatgcaccaccacatcggactaatttttgtatttttagkggagatgggttttcaccatgttggctaggctggtgtcaaactcttagcctcaagtgatctgcccaccttggcctcccaaagtgctgagattacaggtgtgaaccaccacactcaactggctatgtttattagtattttatttttacctatttgtcaatgtctgtcttcctaactgtatgtgattttattcctaatccttcaggtataataataaaggtataagtcattaggagacattcttttttatagtaagaaaatcttgacattcatactacctttggaaatctcaagctcaagcgattgaaatgcccagctgatttttgttatctttcaaactctggaccttaccttaactcttaacgcccagtttatccttgcttatcatcgcatatcttacctcaaaaacttgaaacaaaaatcagtttactgactacaatggggatgagaggagctttgacaggagggtccaggtagtgggtattgtaagactaaagccacatgggatatgccaccatgggggctgcagctgtgaagcgctgggagccaagtgggcatgggattggctcaggaccccacggtttggcttatcaattaagaggagcacaggaacaagactatcaggtaaggctaaggattgtttgattgtatcagaagaaaaacctcagacctgacaaacaggattctgtacccaattcaaactcaacagagcaaggagtaccaggccctcaggcaagtcccagacttaagttaattaaaaaatccaaggcactctcaaggaaaggaaaggctagatatctttcaagaaggctgctataaaaccacagcagtatgtcacgaatcttcccttagtctttccaaaaaagacctactcaggaacattttccactggtctcatgagttagagaggtccctgtagatcagggtactgtgtggagcccacaggaagtgtgggatatgaggataatcgtgggggttttggagtaagtcgatgccccttttcaatcacacctatgtccatatgagacagcttctgacttgctattgtgctcacaagttgctcagggcagaaggtgatctgccaggggtcacagttgagtgtgctaacatcaaatggattccagatttgccacttctgagcttattaccatgggcgggtacttgattcctctaagcatcagtggtttttttttgtccatcggtcttacaatactccataggtttacctcctaggattgttgtgaaaattaaatgaacaaagacatgttataagctttaaacctgaactggcacatagtaagctctgtaaatgttaagagttgttattgttattatcattattaccgccaccatcttgtttgaagaatcagattccatgggttacaagtgaaaaatagctttctttcccctactcagtagggctagcctttttctgtccctgggatgaaatctaaggtagtcctaggactactccagttactttactatctctatcacatgtaactgcaaaacagtcccatttcagtaattgaaatgcctagtcctatgtaaaaatctcaatttgagcttcattttctctttccctgacgtcagcactgattgattacataaatctgcaaagagaaaagggctgggttctggttgtcttcttctctttcaaacctatgttttccctaatcccaaaccccca

SEQ ID NO: 17680 - DNA, 603 bp, Homo sapiens
atctcagcactttgggaggctgaggtgggtggatcacctgaggtcaggagttcgagaccagcctgaccaacatggctaaaacccatctgtactaaaaatacaaaaaacaaaacaaaacaaaattagctgggcgtggtggagtgtgcctgtagtcccagctacttgggaggctgaggcaggagaatagcttgaatctgggagggggaggttgcaatgagctgagatcgcrtcactgcactccagcctgagcaacaagggtgaaactctgtctcaaaaagaaaaaaaaaaaaaaaaaaaaaaaaaggaagacaggaggaagaagacaaacccaaggaagcaagtctttgcagtgttaaaaatagaaacagaaaagtagagaagtattccatagaagttaagaaagaaaaagattgacagaaaaagaggtaatgctatcaaatgcatcaaagagatcaaagtgaagaagcaccaaggaaatattgatatacgaacctgtagagggtgagaatttttatacatgatacatataattccctgtcctttcactgttagttacatgcaaactcttaagttacatatatcaaaatatgttactcaaagtgt

SEQ ID NO: 17681 - DNA, 603 bp, Homo sapiens
atctcagcactttgggaggctgaggtgggtggatcacctgaggtcaggagttcgagaccagcctgaccaacatggctaaaacccatctgtactaaaaatacaaaaaacaaaacaaaacaaaattagctgggcgtggtggagtgtgcctgtagtcccagctacttgggaggctgaggcaggagaatagcttgaatctgggagggggaggttgcaatgagctgagatcgcgtcactgcactccagcctgagcaacaagrgtgaaactctgtctcaaaaagaaaaaaaaaaaaaaaaaaaaaaaaaggaagacaggaggaagaagacaaacccaaggaagcaagtctttgcagtgttaaaaatagaaacagaaaagtagagaagtattccatagaagttaagaaagaaaaagattgacagaaaaagaggtaatgctatcaaatgcatcaaagagatcaaagtgaagaagcaccaaggaaatattgatatacgaacctgtagagggtgagaatttttatacatgatacatataattccctgtcctttcactgttagttacatgcaaactcttaagttacatatatcaaaatatgttactcaaagtgt

SEQ ID NO: 17682 - DNA, 603 bp, Homo sapiens
atctcagcactttgggaggctgaggtgggtggatcacctgaggtcaggagttcgagaccagcctgaccaacatggctaaaacccatctgtactaaaaatacaaaaaacaaaacaaaacaaaattagctgggcgtggtggagtgtgcctgtagtcccagctacttgggaggctgaggcaggagaatagcttgaatctgggagggggaggttgcaatgagctgagatcgcgtcactgcactccagcctgagcaacaagggtgaaactctgtctcaaaaagaaaaaaaaaaaaaaaaaaaaaaaaaggaagacaggaggaagaagacaaacccaaggaagcaagtctttgcagtgttaaaaatagaaacagaaaagtagagaagtattccatagaagttaagaaagaaaaagattgacagaaaaagaggtaatgctatcaaatgcatcaaagagatcaaartgaagaagcaccaaggaaatattgatatacgaacctgtagagggtgagaatttttatacatgatacatataattccctgtcctttcactgttagttacatgcaaactcttaagttacatatatcaaaatatgttactcaaagtgt

SEQ ID NO: 17683 - DNA, 585 bp, Homo sapiens
tgcatttctcaataaaacattttcagaaaaaaagttgctgtgtttccgggagaagcagatggctgctattgagagacacctaggtttgtgttctgggaatctgtctcctactcatgatagcagggggcagattcagatctgcaggaggtagaaataggcatcagatcactctgtcctaaaaaacaaacaaacaaacaaacaaacaaacaaacaaasaattggaagaaatgaattgatcacagaagcatctagagctaggaccaattaaaagtcagttagtttatatgacctatttgaagatttctcaacaatcttgacctattgcttaagagcacaacatttgtagtaaaatgagcctaagttaggatatgacttaagatcactgaccagctgtctaagcttgttagggttacccaatattgtgaaacttcagtttccccatttaaaaatatggaggcaataatagcaattacctaactggttattgcaagcattaaaggaggtcatcaatttctgtttgaggttggaaaatccttcaaaagctttctattcatttgagtaacaagcaaaacattctgatttaat

SEQ ID NO: 17684 - DNA, 585 bp, Homo sapiens
tgcatttctcaataaaacattttcagaaaaaaagttgctgtgtttccgggagaagcagatggctgctattgagagacacctaggtttgtgttctgggaatctgtctcctactcatgatagcagggggcagattcagatctgcaggaggtagaaataggcatcagatcactctgtcctaaaaaacaaacaaacaaacaaacaaacaaacaaacaaacaattggaagaaatgaattgatcacagaagcatctagagctaggaccaattaaaagtcagttagtttatatgacctatttgaagatttctcaacaatcttgacctattgcttaagagcacaacatttgtagtaaaatgagcctaagttaggatatgacttaagatcactgaccagctrtctaagcttgttagggttacccaatattgtgaaacttcagtttccccatttaaaaatatggaggcaataatagcaattacctaactggttattgcaagcattaaaggaggtcatcaatttctgtttgaggttggaaaatccttcaaaagctttctattcatttgagtaacaagcaaaacattctgatttaat

SEQ ID NO: 17685 - DNA, 569 bp, Homo sapiens
caggttgccaggcacttatgtaggcattttgaatatcagcttatttaatccatgaaccaactctgaaactgttcaagggcacacagttgagaaaggcacacaaccaaattcaagccctggtatgtttattccaaatgctcttccctacctctgttttatatcgaataatcatttcagcaaaaggaaaggtgtcttctccaggcataaacactggctgatcctttctgtaaggcacgtccaaatattcaacaatgtggccaggcatggttgctcacatttgtaatcccagcactttagaaggctgaggcaggtggatcacgaggtcaggagtttgaraccagcctggcccaacatggcgaaaccctgtctctactaaaaatagaaaaattagctgggtgtggtggtgcatgtctgtagtctcagctactcgggaggctgaggcaggagaatcgcttgaacctgggaggcaaagcttgcagtgagccgagatagcaccattgcactacaggctgaatgacagaatgagaacaaaaaacaaacaagcaaaaaacaaatattcagcaatgctc

SEQ ID NO: 17686 - DNA, 569 bp, Homo sapiens
caggttgccaggcacttatgtaggcattttgaatatcagcttatttaatccatgaaccaactctgaaactgttcaagggcacacagttgagaaaggcacacaaccaaattcaagccctggtatgtttattccaaatgctcttccctacctctgttttatatcgaataatcatttcagcaaaaggaaaggtgtcttctccaggcataaacactggctgatcctttctgtaaggcacgtccaaatattcaacaatgtggccaggcatggttgctcacatttgtaatcccagcactttagaaggctgaggcaggtggatcacgaggtcaggagtttgaaaccagcctggcccaacatggcgaaacccygtctctactaaaaatagaaaaattagctgggtgtggtggtgcatgtctgtagtctcagctactcgggaggctgaggcaggagaatcgcttgaacctgggaggcaaagcttgcagtgagccgagatagcaccattgcactacaggctgaatgacagaatgagaacaaaaaacaaacaagcaaaaaacaaatattcagcaatgctc

SEQ ID NO: 17687 - DNA, 551 bp, Homo sapiens
tacattgtccttaagactcatttttttcaatacactttgcattagtatctctatcatatgtttgtgtgtatgcttcayataattttttttagttttttcattaatatgtaatttttactattaatattacaaggacctcacatgcaaggattcagttttgaataataattttcacatattctaaacagttttgttgaggtataattgcacacatttaaaatgtacaatagtataggtgttgacatatgtgtatgttcaagaaaccactgccacaataatgataaacacatcgagcattcccaaaagtttctacatgtttttttttgtaatacctccttccctcccctccatggccaattcccttcctccacccgcaggcaaaccacagagaagctttaggcaaagttttcctagattcatttgcattttctattggagtatttttaataaatggaatcgtataagactcctaacttgtttcagcatatttatttttaaatatattcatgttatgtattaatagttccttcctttttgttgttaaatagtat

SEQ ID NO: 17688 - DNA, 551 bp, Homo sapiens
tacattgtccttaagactcatttttttcaatacactttgcattagtatctctatcatatgtttgtgtgtatgcttcatataattttttttagttttttcattaatatgtaatttttactattaatattacaaggacctcacatgcaaggattcagttttgaataataattttcacatattctaaacagttttgttgaggtataattgcacacatttaaaatgtacaatagtataggtgttgacatatgtgtatgttcaagaaaccactgccacaataatgataaacacatcgagcattcccaaaagtttctacatgtttttttttgtaatacctccttccctcccctccatggccaattcccttcctccaccsgcaggcaaaccacagagaagctttaggcaaagttttcctagattcatttgcattttctattggagtatttttaataaatggaatcgtataagactcctaacttgtttcagcatatttatttttaaatatattcatgttatgtattaatagttccttcctttttgttgttaaatagtat

SEQ ID NO: 17689 - DNA, 563 bp, Homo sapiens
ttttttcacttaacaattcaggatatctctggcaacacagtgcaygtcagtctattacaaaaggaaaatgtgtagctgttacagggatgtaacaacagcggggataatgtaatgataaaaggggggtgttgctagcactagataagatgagactgcagggggaagcttgcctccagcctccacttcccgcaaggtcgcgacagtttctgtagagtcacagccctccgtgtaccatctggagaacaacgtgagcccttctctcacagataacgggatgtggccgctctctggagactgatgctcgtcgctctgattggtcttcgggttacgttaacgcttatcataaaaagagcatctgttgatttaaattccacacgtgctgcgtatcacagaatgaggggagaaatgtttctctcaaaagcgatgttagccaacatgggttgcgtatcaattctggaactctctacacctattttaactgtctgcaagtaaccctgtgcccaacttgctaatcaattttttggactgttagccttatagaccaaagataaagtacagtgcct

SEQ ID NO: 17690 - DNA, 543 bp, Homo sapiens
ggaaaatatcttagacaactggcatgtattgcagctaaaagaaatacaatacctttgtttagaaaggcttgactacccatgagtctacgtcacaggtgagcaaccatccttttagtaattactgtaattaaaagatatttcatgccttagcttaatgtatttcccgtgttaatagatcttttcagcctgacctgagtacagatcacaagccactaatatgtatggtctgcttcaaaaactaaggacaagaaaatctattttctatagtttcaggcatgcaaaactgaacagactgtcttaaatggaattggttttctcagggaggtctctcccttttatggatttctttggatccttcctatatgayccatttcactttttccaacacctgtatagttctcagagcagagtagctatgtaataaatatttactgaattgaaatggaatgaagtttttaattttatgataaatttaaataggttttctccttgtctttattgacacatatgttatacaaaaagtgtcaagttttatgtatcaat

SEQ ID NO: 17691 - DNA, 589 bp, Homo sapiens
gtatttgtcctaatgctctcmctccccttggcccccagcccccgacaggccccagtgtgtgatgttcccctccctgtgtccatgtgtcctcattgttcaactcccacttatgagtgagaatgtgtggtgtttggttttctgttcctgtcataaccaacactcttaagctattgcgttacacaagaagaaattcgtggagtacgctgattgaatatttatgtaggaaaactgcaatataggtacacagcaagaaaaatgagataacttttcaaattgtaaccattatcttgaaagttatagatgaaaacatatataatggttttgctgttgcccacacaaaaacaacaaaataatgtattaaattgtaaacattcatagaaaattattctttaaagcttacctgaactttttcctgtttattttttatatttacctattctgagcatagaagttataatcatttcacaatagttactctaattttattctcaggataaaaacaagattgatgtggagaaattattaaatattttcctccattagtttcccagctttgaaaaagtttctaaaaatactgttcattttctaa

SEQ ID NO: 17692 - DNA, 589 bp, Homo sapiens
gtatttgtcctaatgctctccctccccttggcccccagcccccgacaggccccagtgtgtgatgttcccctccctgtgtccatgtgtcctcattgttcaactcccacttatgagtgagaatgtgtggtgtttggttttctgttcctgtcataaccaacactcttaagctattgcgttacacaagaagaaattcgtggagtacgctgattgaatatttatgtaggaaaactgcaatataggtacacagcaagaaaaatgagakaacttttcaaattgtaaccattatcttgaaagttatagatgaaaacatatataatggttttgctgttgcccacacaaaaacaacaaaataatgtattaaattgtaaacattcatagaaaattattctttaaagcttacctgaactttttcctgtttattttttatatttacctattctgagcatagaagttataatcatttcacaatagttactctaattttattctcaggataaaaacaagattgatgtggagaaattattaaatattttcctccattagtttcccagctttgaaaaagtttctaaaaatactgttcattttctaa

SEQ ID NO: 17693 - DNA, 589 bp, Homo sapiens
gtatttgtcctaatgctctccctccccttggcccccagcccccgacaggccccagtgtgtgatgttcccctccctgtgtccatgtgtcctcattgttcaactcccacttatgagtgagaatgtgtggtgtttggttttctgttcctgtcataaccaacactcttaagctattgcgttacacaagaagaaattcgtggagtacgctgattgaatatttatgtaggaaaactgcaatataggtacacagcaagaaaaatgagataacttttcaaattgtaaccattatcttgaaagttatagatgaaaacatatataatggttttgctgttgcccacacaaaaacaacaaaataatgtattaaattgtaaacattcatagaaaattattctttaaagcttacctgaactttttcctgtttattttttatatttacctattctgagcatagaagttataatcatttcacaatagttactctaattttattctcaggataaaaacaagattgatgtggagaaattattaaatattttcctccattagtttcccagctttgaaaaagtttctaaaaatactgttcattwtctaa

SEQ ID NO: 17694 - DNA, 644 bp, Homo sapiens
caaagttggccttcctttctagactcttgcctgctgacaaccatacctggtgtctgcaagcacctgccgcttgccactcagcttataattccctgtgcagcctcctcacaaaagtgatccaacttactccaactgcaaacatggaaagcctcccataagggagtgtgtactttggaaacatttcaatacaaatcctggactgagcttttcctcttaccgctttcccaagaaggtggcgagagttctgaaattcagtcctgctgtgacttgtgtttaaatctgcaaggccatctctttcagggcctttgcatttgcctgagtctggtcctcatgttgaaggcctttgcttcttaactagcattcggtgtgggtctctgggcctgtcagctactgtgtgtggaatatcttctacrctttcttctttgcccaacattttactgtgaacatgtttttatctccattcctggaaccacctgaaaataagatggggcaacatagtgtctcaggaaggaagcatctcagtcctacagggtagaccacatctatgcctctgtgtccccaattctggctccataggtgacacctaattggcagttaggccaagtggtagactgtcttttagttcattattggcactctgtcaa

SEQ ID NO: 17695 - DNA, 647 bp, Homo sapiens
  misc_feature (1)...(647): n = A,T,C or G
tcctgggctcaagagattctcccatctcagcctcctggaaagctgggactacaggaatgtgtcaccatgcccaggtaattctattttttgtagagacagggtttcatcatgtggcccaggctggtctcaaacttctgggctcaagcaactctcctgccttggcctcccaaaaagtgctgggattaaaggtgtgagccactgtgcctcgctaaaaaaattctttttacaaagattttaacattaggtacttgcagatattttcctgtggatgtggtaaaaataaataaataaagatttttttttttttttgagacggagtctcactctgtygcccaggctggagtgcagtggcgccatctgagctcactggaagctccgcctcctgggttcacgccattctcccgcctcagcctcccgaataggtgggattacaggtgcctgtcaccacgcccagctaattttgtttttgtatttttagtagagacagggtttcaccgtggtagccaggatggtctcgatctcctgacctcgtgatttgccccgccatggcctctcaaagtgntgggattacaggtgtgagccattgcacccgggcaataaaaatattttaacatttggctgggcacagtggctcacacctgtagtct

SEQ ID NO: 17696 - DNA, 1897 bp, Homo sapiens
tcaaattatgcttttaaaacatttttataattacccaggggtaatattcaatatatttaaccacgagtctaacatagacaccagctactcataactaatgctagcattccagggcagcattccggaggcttccagaggagccagatataacccttggttgctcttggtacgacttacccttggttgtaagttgattccatggtccctggggcaaaagttgagaactgggacattaaggtatggggcgtgaggtgttggcaagctcagggcaatggctatttattaatctattgggtgtattttaatattttataatccatttggctgctgaatattagcccaaccctttattctcaccatcacatttccaagatacgagacaaaactcgttctctctctgtctttctctgtttctctctgtctctctcacacacacacacgcatacacacagatatttactgctgattccaatgacgatggcaataaagtaatgatgacaagagctaccatttttcaggacctgccatgtaccaaagcgtgtgctacatggccccaatcatgctatttgaattgagtaacaaactatgaagtgaaattctgctgaatggcaaaaatgcaaaacccaaatgaacacagcagcagagagccttatgtctcaacattgattctcgggtctccagtgtggtccacaggacagaggacaacatttggaacaaatgcaacttagtggtatcttaactgggtcagagatttctgcaaaggagtaagtgacatttacaccactcctggacattcatttccgtgtctgcagacagaaggtaatggcatctctccattatatccttacttcacctgggaataacgatttactgaatttcagctcttgctctattagaatacggagctattcttggcatgctctcgagtaagtgtaaatgtgttagccagtctggctggctatggatgacgggtgggaattctgactaccctggtcataagagcacaggggcaaacacaacaaatacctctggagattttgaaatacaaaggataggtttgtgcctttcaaaaaggcagtatgttctgagcaataaggcaaatgcatttcagttttaaaatgttactgttcacagtagcagaaatctctctatgcatgtgtgtgtgtgaatatgtgcacacatacagatgtagagttttctagacaaaggacatgtttcccaacaactgcccttaaaagcttttgaagtcagatcgataagaactcttttggacctcgcctgtttaagtagcccaccctaagcatgtaacaggcctaatgaatggagtatctgagtagctcagaagacagagaggagaacattgctgaggcccttctagccatggatagcactggactcacagtcaaggtagatgagaaatgaatgaggttggcttctgcctccctctcttccagggcaagcgtacagagacagagttccagggtctggtggcacccagataatccttttctgactggtcatatacggacaagaggagagaaacaataatagacagcaccttttgagcatttaccgtgagcccaacacattacgtcattgagtcctctctacaacacacatgtgggcactgttctctccttcatttcacacatgaggggactaagactgagaggcaaagtgacttacctaaagccctaaggctggcctatggagaaggcaggatctgactctaacatcattcctggctgtagacactagaccaccaggacttagggcaggactccagccagagtgcaagatctcactggtgcaggtttcycctgcccacctaaggcagacacgcccctggatttgtgtgaacattctatctgtcatggatttgtgtttagactgtgat

SEQ ID NO: 17697 - DNA, 539 bp, Homo sapiens
ttgttgaaaacacatgggaatccctggcctaaaccttacctgtggcatagagaagaatagtgctttggaggcagatgacctggatggattcaaatcctagctccagcactatgaatacatgtaatttgggatgaactatttaactttatgagcctcctatgaacactgaggatagtggttccttgaagatctctggcgggatttaaaacactgtatatgaagatcccagttccatgtctggaacatggtaggtacctgatcagcagaaagtgtttttattgctcctttcctctgaactactggctttcaattctccgtggtcttggtgagctgcwgccacgccgactcagaacaataagaaaaaccacagaaagcaactcacaaaagctgggtgagcattagagatgggcaataacttgcttaggtttcagagttaacagtggacacagctgagatttgaaccagatctgctctactcacaattaaattggtcacaaaagagggtttccaacataagccgctacccagctggatgtgaa

SEQ ID NO: 17698 - DNA, 636 bp, Homo sapiens
tgatcccccctccccatttctttcacttttttcttctgtgctgcctttttcttccctgttataataatctttcagaacggcagtctctggtacagcagagcaatagttggctgaggaagaagaattgggaagtgggttagggggacaattaagggaacagcattgtgagaactaatctggagaatttaccctagccttgacatcttaatgttattttctattctctgtagttacagctgtaaatctatagataatccttaagtagccatgcagagatggccctggtatttcctttgttgctgaatgcagctcttgtatcagtgaagaaagtcagtagcaaacttgtacttgtccttttgccttrtaaaactttagtagtttatggtgtgtcaccaggagtgaggttttattttgtttttccttcacttagtgtaaaaaatggaggagaaccttcgagggctaggacatgactgcaggagtggtggagggctaggacatgattacaggtgatggagaacttgaagttggcaaaatgccaagaaattgacagcgttgcatttaaaaaagtcaacgtagatacaggactacctgcatcatcttgcttgttttttatcctggacaatttccaggacgatg

SEQ ID NO: 17699 - DNA, 630 bp, Homo sapiens
tctggcctcttgccagcggctgctcagtttaggcagttgggaggttgcagggtgcatatcctttcttgtgaacaggcaaagaactttagatcattctttttctgaaaactttttgttttttgaaggtatgtatctaaatgtgctctttaatgaaaggggagggtatagacttaaaattcttattgaatatagaaatacttgacattaaagtttgatttttagatcatgtttcttgatggactcttgtaacttgaagattttcttccattaaaaaacaataatagaaaattgtgggatttttgcaatttgtgatgtgtttgttttcactgttatttttaaaaacaagtctagcatgaagagataccaagtttaaccactttggagtgtgctagaaataaactgtggggaactaacttggagaatttaccttgatcttgacatcttaatgttactctccattctctggagttacagctgtaaatctatagataatatctaagtaaccacagggagaaatggaactgggacaataaataagtagaatatgctgactttgctttaaatkggcccattactaagctaactccatttttggctgctcaaatatgtcagagacatttccctgaatga

SEQ ID NO: 17700 - DNA, 1175 bp, Homo sapiens
cttacattaaaatatcaatgagcagctgcaataataacaaaaataaaacctatctgcataaaactgcttactttgtccatgactttgtctggacagaccaatttataagaacaagtttagcctcctgtaattaaataaacttgtcagagctcccctaggcctggcatgcatgggtttaatagacatgttttctggtgacatgtattgcctctaacatcttaaagtaaaaattgggaaagtgctgagccttttctggggggcactggtttagacattgtgccccttaggggttaagcctaatagcatcacaagtctttcagtaggtcacataatttctcatgaccataattttcaaactttaagataaagatattggagtagatttttttccattttttttccatctgaaaaattatgagtctatgagaaacagcatcaatgagttagtaataccaaccactcaaaattttgttgctattttatatcttggatattatgcactgcagctggctatacaatttgwtttccaaactttagaatcatgtcaccattagcagtttatattcatttagaatccatgagcccgaagtgatttatggaattttatggaacacagagaagatgtgatccttgccgttgatgtacttacagcagaacttttgttttgctgtatactcaattataataacagactccttttccatatgcagaaatatctcccagaaataattagctgcagacacaaaacaattaggtggttgcaacctcataaaatgtggttgttggttaattggctcatattcacattatgatatttgcatctaccaccttactacctgcaaaattttagctcacaaaaatagaaatgaggtttcaaaaatatgccctggcaagtgtagtctaagtagtcagtatgacctgaattttctatggacattcttaatagcactgaaaaatgttcaagcatatggaaatgaaaaatgttaatttctagactgcaaactctttttcaggaagaaatataataaataccaagggcttagagcaacacccagtcatcgcctcaattttccatctaaacctatttttctctgtgggttcattgtctcaggacttttatacttgaaggcattgggttgtactttctttttagtttcttgacaccttgcctatgg

SEQ ID NO: 17701 - DNA, 546 bp, Homo sapiens
tcagcactgaaaagaacaaaggygttattgaagtagaacacacgagatttttaaaaaatgagtaatggtaccaaaaaaagggtggggctaaaggaaagctcttctttatagaaaaatatcagataataagtgtaaaataaatgattcagaaaaggattatcaatggcaaaaactggtggggaaacaggatattcatacaatctctaagtatcaccttgcagattacttactaattacagaggggaaatatctgcctttaaaatggagaaatgtaagcagttcgtcaaatttagcatcacccacaccaggacacactggcagtatgtgtcctgataggacacaccaaggacatatcatggccaatgccatattcttgccaaaaatatacgatgtgctcctgactctgaagaaacaatcatgggtgaatataaaatcaaaacacctgcaaacaggcaagactctggaaagcacctcatgggtatcaaagcacagctattatctctaacgcacaaagagctctggcagatcagtaagaaaagaaatccc

SEQ ID NO: 17702 - DNA, 552 bp, Homo sapiens
actattccattaccagagagggaggtttgtcaaaggttaattattttaaattgctctggcaaatttattttgatttgtacaatttttttgaataatcataggtctatatattcatacatctttatgaggcttcttttttaaaaataatattctttgatgaggcagttmaagctagataaatgctttagtgatgtctttaaaatatattccctttaactctggatgtagatctacaaaaaatattatattattattgttattggtatgatgtctattttagaactttctatttttcctaggaaaattgcaattaaaaatggccaggaatatgaaattttaatttcttaaggggttgcccatggttcatagtacctttgagctctgaatcactatttggaatcccctctaaacggtgagtgggaaagctgttgacacctgctgtgggctgtacctcacctctgtttcacatgaggctactccttggccagggataccttctcaggacatgagatttggtccttgagggagaataaatgctggactacaaggcaa

SEQ ID NO: 17703 - DNA, 1147 bp, Homo sapiens
aaacacatgataagaaattagacttttatcaatacacaaataattttacttaaaatcaacccagttacatatttttaaaaaattgcagaacctctccacaccaatgtccacagcctagaacaggttcatgtgaaacctgcagtcctaccccggagcatcagttaagtgatggtccaggtactcactgacacgtttctcttgacactgagatggtcgcaaacaaaacaccgttcttgcctggatgaagcaagagttcacataaaagagctttataaaatgtctatgaaggagaattgataatatcagaagagctccagcacttcaattgaatataatcctctattattcttttcttgatttaatttctgtagctcccgaaaacttacttcaatcttgttgagctcagaataaacagatatctaaagaaaagagtttcagagtaacttttaccataatgtctacatagaaacaaatcttccatgagtaagttatttaaggacaaattttaagaataattgtaattcaggtgatacttgggtacaaataaaatcagtatatatcaaataatcacaaacctgagattttacaagcttgtaaagatttatcagtagcctctttgcttctggcatcattacaacaacagtaaaatttgcatccagaagtagacatatccaatccataatctgaagatgaataggaaaaggaagttaagattttaaatttaacttcaggttaattcactttacaaagtccataaataaacagttatgagaaaaataagtctttataaataaaatctgaacatttttgtttagagatggagcaatttctacgaaatataaaaaggctyatttctggcttttaaaaaatttattctaattaaaaaaaattttagagatgggatcttgctatgtcacccaggctggagtaggaatgcaatggcacaattcatagctcactggagcctccaaacacctgggctgaagtgatcctcctgcctcaacctcccagagtagctgcaatcatccagagttgctgggattacagatgcaccatcatacccagctactttttagcaatttttgtagagatggggtttcgccttattgccaagctggtcttgaattcctggcctcaagcaatcctc

SEQ ID NO: 17704 - DNA, 575 bp, Homo sapiens
acttcttcaattcctataaagttactgttaatacactgaaattttacccatattatgcaaaatagaggcctgattctcccagcacattttagaaaagatatgactgatatctaaagtaaatggatcattcacaaatttctgagaagkatgtaaaatagcacagctattttggaaaaaaaagtatgagtttccttccaaactatctctgtttaccaaatgacccagcaattgcactattgggtatttatcctacagaaataaaaacttaggttcacacaaaatctataaatattcatagcatctttatttcatagtagtcaaaatcaatataaaaaagtccttcaataggtgaatgcttaaacaaactggtaaattcacaacagtgaatattattcatcagtaaataaagaacaaactattgatacatatacaacttggatagacctcaagggaaatgtacttagtgaaaaaagccaatctcaaaggtaatatactgtgtgatttcatttgtagaacatttttaaactgacaaaattatagaggtaaagaaaaaattactagctgccagagattag

SEQ ID NO: 17705 - DNA, 1216 bp, Homo sapiens
ataagtcacttagactatttttcttgtctttccagtaaaacaggggaaatcataattcttgcatcaaactattataaaaataaaataatttgcaaaaacttgaaaaatgttctgtcagttgtaagatatttagtttatgagatgtcactgtttgctgccattgttagaaatttggagaaagataatcaagatagaatgaaatccaatttgcattctaagatattttacagcagtattttggcatactggtgccaaatgtttcatgtttccataagaaatattaaaatatctgatatttattttttatctaaaatttcatcagtagttagaaaagggagtctagttagtgttctttattcagattccatgacaggatataaaactactgttacttaatgaagcagagcctcagttgtttttaatatatattaacgactaatgttggggctgggtatgctggcttgtgcctgtaatcccagcacattgggaggccatggcaggaggatggcttgaggccaggagtttaagactattcttggaaatatagcaagaccccttatgtacaaaataaaaaaaaccagccaggtgtgattgtgcatacctgtggttctagctacttgggagactaaggtgagagggttgcttgagccaagaagatgcaggctgcagtgagctgtgattgtgccactgcactccagcctaggtgacagagtgaggccttgtctcaaaaataaaattaaaaagaaaaactaattttgggactccaatatcagggattgggattttcctgatgtacactctacctataagtaaattatcctttattaactgagatgctttatttggatcttatttgtaactcagcattttttttttttactgtgaagttaaaactttatgtagcaaattatacctattgatatttcctaatttgccatgtttggtataatgacagttcatttacaataaatcccaattcacttaacatattagtgctcaggtttttttgttgttgttgtattttggtggaggcagtggtgatatttctttagctattttcayacttaggtcacttcaaccttctgaatgtatgatattgatgtagaatttcccttgctttcccaccgtccatactcataagtgttaacagtagtatcccgacagtatttctgcccattatctgatgggtatgtttttggggaaaagggatgtgtct

SEQ ID NO: 17706 - DNA, 1411 bp, Homo sapiens
gggctaaagtgatcctcctgcctcggcctctcaaagtactgggattataggcatgagccaccatgcctgtctcatccatgctttctactctccctcccaaattaaaaatatggttctatgttccagttacaattgttgtgtaacaaaccacccagaactgaggggcataaaacaaccatttattctgctcacagagtctctgagttaggaatttgagcagggcacaacagaaatggcttatctctgctccacaatacctagggtctcagcaaaaaaatgtccaaagtccaagagtgacttgaaggccagatattgaaatcacatgaaggattattcattttcgtgtctgttatctgggctaggataattcaaaggttgagattgtggactaaaagccttactctcaatgtggttttggtttcctcacaaccatggagacctcagggtaatctaacttgttatgggggcagctccagtacaactatttcagtgaacaaggtagaaacagcctagctttttgtgacctaatgtcagcaatcacatggcaacatttctgccataccacagtagtcacaactgtgcctccattcatggagaggaaacagggatctcacagctctctataggaagtctgtcaatagtgtaaccatttttttaaaacaccacacttgtgcaaatatgagcatcattatggagagtgcaggacacatttcttcctactgactttttccctatagggatgagacacaactagacttgccattcgttcaaggcctttatgcattatggactgtgctaaggcttcacatccattttcttcagtacctgttacagccttgtaatatgggtgttgttatttctatattacaaatgggaaagtgttgctcaaagagatcgagaaatttactgtgttctcaaggctaacaagtagtagagaaaagatttgaacctacaactgattatttcccagtcccatgttccccctactagaatatgatgctttgccttctacccstcaggattactattttgttagtaaaataataggtagaaaaacacaggaaacaacatccgcacaacaattgcaattaagtgccaattatgtgaaataaatgatcaggttaatagaagtaacctctgttttaaaggattttagaatatgtgtgtagatagcacaaagattcctagaaaactgatgaaaccagaactttgaaaatgagagttggaaaactcaacataaaggaaataatatacagggcacaatcaaaatatttttagctcatggttcctaaatactggtcaaccactgttttcaaaaagcctacatttgtgagggggacttgttcttatcaatctatattgagttatgttattgcctacatgttctgggtctctgtgagcacacatgaac

SEQ ID NO: 17707 - DNA, 594 bp, Homo sapiens
agacaggaggtccccaaagccatcagccagcctggccggagacttgacaccacgcttggctcaccctctgggccatgtcacttgctctgtgcctttggtcgttctccccgctgggctcccctgagttggcaggtggctagcccgtttctggctttgagctgctttgtctcttgagctggtagagaaaagagaccagggtgatctgtgatcaaagcagcatgtttaatatacagtagtatcctttaatccaaggttttgctttctggggtccgaaaacattaaatggaaaattccaggctgggcgtggtagctcacgcctgtaatcccaacactttgagaggctgaagcaggcagatcacttgagcccaggagtttgaaatcagtctgggcaacatgrtgaaatcccgtctctgctaaaagaaaaaaaaaaaatagaaaaaattagccagtggcgggctcctgtagtcccagctacttgggaggctgaagcaggagaatggtgtaaacccaggaggtggagcttgcagtgagctgagatcgcgccattgcactccagtctgggtgacagagtgagactccgtctcaaaaaaaaaa

SEQ ID NO: 17708 - DNA, 578 bp, Homo sapiens
cgagaccagcctgaccaacatggagaaaccgcatctcttctaaaaatacaacattagccggctgtggtggcgaatgcttgtaaccccagctactcagaaggctgaggcaggagaattgcttgaacccaggaggtgcaggttgcggtgagccgagattgagccattgtactccagcctgggcaacatgagcgaaactccatctcaaaaatataaagattttaccagcccaataatttcaggaagaatttttttttaatcaacagaatctcttgccaaaatgctaaaactggattttatcattccattcactgagtctgactactcaaaggataaccagaacccaaacctgacctaatgaacagccgagggtgtaggtcatttgcctccacccctggctgttggtggggagaggcacaacagtgggggcacagactccacccygtggtcgaggcctggggtgggaactgcttaccctggggcttggtgaccgtctctgctgcacagattgggtaggggacacagcgggcacaggagttggtggctgatgtggcacagatcatgccaggtcgacattcgca

SEQ ID NO: 17709 - DNA, 1452 bp, Homo sapiens
acagaaagaagggctttgacaagtaccatgggctgtgcttgattgaaaggacagacacattcagttgttgttatttgtgattattgtcagctccatcattgatggcactgtgcattttttgaagtaggtctctcccatcaaactgccaggattccagtgatcagagagcacgtgttcagtagcacaagctggattgggtggtgcccactcccggctcgaccacttagctctgtggtgccttggtatcctcatctgtaatgtggggataataatggtgtctgtctcataagaatgttttgagaaacaaatgagaaaacccaagtcaagctcttctagaagtgcatggcagatagtaaacagtcaatcaacattatcagtcctatcaccggtgtgggtactgttgagatacctgtgagagtaaatcatgatttatgcaaatggttaatggaaaatatttattttagttattttcttatctgggtagtgccagatgggataataaaaatgaaaacaggcagggtttcgtgtgtgtgtgtgtgtgtgtgtgtgtgtgtgtgtgtgtgtgtgtgtgttgctttgtttgcaagcatgatttagttgaaattagatgtctcttctgatctataatctctttgtcttcagactggaacctgaaatcccatctgaatatgactgaagaaaatctgcacacagtgtcttgatgggaggatatgactaactcttagattggaattgtgttggtgcgtaggcaggttctattattagtggtaatgttaccacattattaaaatatttttaggcataaggcaggattctttccttcacagataaatggtgaaacacacatattcctaatttttaaattttgatcaaaattttattaaggccaaaatgggcagagactgggtaacagaagcgacattttccaatttgccctcctttactcccccagattctctttacatgttggctggagtggatcacgaagggtaggaagctgagaaaggtggaataattggaatgtcctgcaactctgaagccaaacaaacttaggttttggatgacgtgcacagtggatatcatatcacctgttatggtgaaaccatcaccaatacttactttacaattcccatcacacaccccagtgactttctgtgaaagagagatcagatatctactgtatttagatcaactattacattatcaacagtggaggaataaggaaatctaggatgctgtttagtagcaaggaatgcatcaacaatagataaaasgtggccaggcatggtggctcacacctttaatcccagtattttgggaggctgaggcgggtggatcatttgaggccagaagttcgagaccagcctggccaacatggtgaaaccccgtctctactaaaaatacaaatattagccaggtgtggtggcgcatgcctgtaaccccggctcctca

SEQ ID NO: 17710 - DNA, 1452 bp, Homo sapiens
acagaaagaagggctttgacaagtaccatgggctgtgcttgattgaaaggacagacacattcagttgttgttatttgtgattattgtcagctccatcattgatggcactgtgcattttttgaagtaggtctctcccatcaaactgccaggattccagtgatcagagagcacgtgttcagtagcacaagctggattgggtggtgcccactcccggctcgaccacttagctctgtggtgccttggtatcctcatctgtaatgtggggataataatggtgtctgtctcataagaatgttttgagaaacaaatgagaaaacccaagtcaagctcttctagaagtgcatggcagatagtaaacagtcaatcaacattatcagtcctatcaccggtgtgggtactgttgagatacctgtgagagtaaatcatgatttatgcaaatggttaatggaaaatatttattttagttattttcttatctgggtagtgccagatgggataataaaaatgaaaacaggcagggtttcgtgtgtgtgtgtgtgtgtgtgtgtgtgtgtgtgtgtgtgtgtgtgtgttgctttgtttgcaagcatgatttagttgaaattagatgtctcttctgatctataatctctttgtcttcagactggaacctgaaatcccatctgaatatgactgaagaaaatctgcacacagtgtcttgatgggaggatatgactaactcttagattggaattgtgttggtgcgtaggcaggttctattattagtggtaatgttaccacattattaaaatatttttaggcataaggcaggattctttccttcacagataaatggtgaaacacacatattcctaatttttaaattttgatcaaaattttattaaggccaaaatgggcagagactgggtaacagaagcgacattttccaatttgccctcctttactcccccagattctctttacatgttggctggagtggatcacgaagggtaggaagctgagaaaggtggaataattggaatgtcctgcaactctgaagccaaacaaacttaggttttggatgacgtgcacagtggatatcatatcacctgttatggtgaaaccatcaccaatacttactttacaattcccatcacacaccccagtgactttctgtgaaagagagatcagatatctactgtatttagatcaactattacattatcaacagtggaggaataaggaaatctaggatgctgtttagtagcaaggaatgcatcaacaatagataaaacgtggccaggcatggtggctcacacctttaatccsagtattttgggaggctgaggcgggtggatcatttgaggccagaagttcgagaccagcctggccaacatggtgaaaccccgtctctactaaaaatacaaatattagccaggtgtggtggcgcatgcctgtaaccccggctcctca

SEQ ID NO: 17711 - DNA, 1452 bp, Homo sapiens
acagaaagaagggctttgacaagtaccatgggctgtgcttgattgaaaggacagacacattcagttgttgttatttgtgattattgtcagctccatcattgatggcactgtgcattttttgaagtaggtctctcccatcaaactgccaggattccagtgatcagagagcacgtgttcagtagcacaagctggattgggtggtgcccactcccggctcgaccacttagctctgtggtgccttggtatcctcatctgtaatgtggggataataatggtgtctgtctcataagaatgttttgagaaacaaatgagaaaacccaagtcaagctcttctagaagtgcatggcagatagtaaacagtcaatcaacattatcagtcctatcaccggtgtgggtactgttgagatacctgtgagagtaaatcatgatttatgcaaatggttaatggaaaatatttattttagttattttcttatctgggtagtgccagatgggataataaaaatgaaaacaggcagggtttcgtgtgtgtgtgtgtgtgtgtgtgtgtgtgtgtgtgtgtgtgtgtgtgttgctttgtttgcaagcatgatttagttgaaattagatgtctcttctgatctataatctctttgtcttcagactggaacctgaaatcccatctgaatatgactgaagaaaatctgcacacagtgtcttgatgggaggatatgactaactcttagattggaattgtgttggtgcgtaggcaggttctattattagtggtaatgttaccacattattaaaatatttttaggcataaggcaggattctttccttcacagataaatggtgaaacacacatattcctaatttttaaattttgatcaaaattttattaaggccaaaatgggcagagactgggtaacagaagcgacattttccaatttgccctcctttactcccccagattctctttacatgttggctggagtggatcacgaagggtaggaagctgagaaaggtggaataattggaatgtcctgcaactctgaagccaaacaaacttaggttttggatgacgtgcacagtggatatcatatcacctgttatggtgaaaccatcaccaatacttactttacaattcccatcacacaccccagtgactttctgtgaaagagagatcagatatctactgtatttagatcaactattacattatcaacagtggaggaataaggaaatctaggatgctgtttagtagcaaggaatgcatcaacaatagataaaacgtggccaggcatggtggctcacacctttaatcccagtattttgggaggctgaggcggrtggatcatttgaggccagaagttcgagaccagcctggccaacatggtgaaaccccgtctctactaaaaatacaaatattagccaggtgtggtggcgcatgcctgtaaccccggctcctca

SEQ ID NO: 17712 - DNA, 637 bp, Homo sapiens
taaagatcctcttactgaataccagatatttgcaaagcattgcttcaggtgttgtgttagtgtgagcacaccctttgaaatgtttagaaaggattccagtgccaaaaccagatgatgtataaattagcccccaaagggttttatcattaagaaaattatagctaattatagttaatctgtctgtctgctggagagtgctacattgtccaacatttgcaagtaaagagcacttgtgggaacaaatgctattgaggtagagggtagggagaccaggaaaccatttgaccacgatagtcaatttccatctttccaattcaaaaggaatctcctaatcaaccaccgatgatggtgcttggaaaagtcatccatgcttcccaaagaattggctgttattttggaaagaatgggatgcacaaaactctgaatacagggcctatctaaaacttttggtaaggtaacagcattaagaaatattgtgggcygggcgtggtggctcactcctgtaatcccagcactttgggaggctgaggcaggccgatcacctgaggtcaggagtttgagaccagcctggccaacatggtgataccccatctctactaaaaatacaaaaattagctgggtgtggtggcatgcgcct

SEQ ID NO: 17713 - DNA, 573 bp, Homo sapiens
tcttgttattcatagatcactctggctgcaggatggaaaatggatytaggtgatggggaaaggaaggaggtattttgagtagaaacagagaggccagctgggagcctactgcagtagtccagaaccacaacagcaaatgccaagagctaaaccaccaactggccttcttgctgggagcctcacagactatggagtgtcagatctggaatccctttggagatcatgtagtgcatccctttggagatccttttttgaagaatgatgaaactgaggaacagaggcaagaaggtgatttctccaaagtgtcagagttggcacaagagttcccatcttctactatgatgtttttcctgaattccagaccatcatagaaaccgagactttattatcaccagcctctttacctccatctaaatccttctttcatttttagagactgcctctgttttcctaaaatgccatgaagtcaactaagagacaggaattttagttctctgtaaacaaatccatttttacaaagaatgagcaaatcctcctccagaagtttgagcatgtcctccagagaatacagaa

SEQ ID NO: 17714 - DNA, 497 bp, Homo sapiens
gccttgctcttagaracttacagttcagctgaagatggaatgagacagtattcagatacacacaacaggatgagagaaaataaagcaaataaagcagaggaaaaggacgagagagtaccctgaggtggggtgggtgccggttcagacaatgtggacaaggacaacctttctgaagaggaagacagaaacaaagaactgaaggaagtgggggtagcctgaggactgctgcagggagaggacttgataagcacataccttgcctcatactgctccctctgcctgtaatgccaccccatacccctcctcgggcccagctctcacctgagaatcagcacagcagttgcctcccctgggacactcaaggagaaccaaccagtccttcttgatgtccctgagtgtcccacatggcttcaatccagcccagtaacacccatcccttcaatcattcattcattcatttcttgaacaaaaactgcttgactagtccctgggtgcca

SEQ ID NO: 17715 - DNA, 497 bp, Homo sapiens
gccttgctcttagagacttacagttyagctgaagatggaatgagacagtattcagatacacacaacaggatgagagaaaataaagcaaataaagcagaggaaaaggacgagagagtaccctgaggtggggtgggtgccggttcagacaatgtggacaaggacaacctttctgaagaggaagacagaaacaaagaactgaaggaagtgggggtagcctgaggactgctgcagggagaggacttgataagcacataccttgcctcatactgctccctctgcctgtaatgccaccccatacccctcctcgggcccagctctcacctgagaatcagcacagcagttgcctcccctgggacactcaaggagaaccaaccagtccttcttgatgtccctgagtgtcccacatggcttcaatccagcccagtaacacccatcccttcaatcattcattcattcatttcttgaacaaaaactgcttgactagtccctgggtgcca

SEQ ID NO: 17716 - DNA, 572 bp, Homo sapiens
ctggacaacagaatgaatccagtacagccgtaacttcagttgattctctcccatccatctctataaaggccatcaaagggatcttccacatgaccctgtctttccttgcttaggctgcccactaccctcaaaattaagtcccacaccatggcctccataaggcccagaacaaccagcctcctctctaccgctaggttcatttcttgccccccaccaatattcacctctgctcaggtaccccaaatgctatgttgttccaggcctctgtgctgtttgtcttggcgytgaacactacctcatctgtctgccaagcacccagttagactttcggacatagctcaggtgtctcctttgtgaggcttgattgtcatcactcccaggtagggggggtctctacattgtgactacttttagcaaattatgtttgcaatcatctgcctgtcggttttcaacattagactataaagctcttcaagagcaaagttttactccctttagcatcttggagcgtagggaagcgcctggcacatggcaggctcttagtaaattcttcatgacatgagaggggagga

SEQ ID NO: 17717 - DNA, 519 bp, Homo sapiens
tggctcctttttgctaccctatatgttaccagaccatgctaagaaataatggtttcatattaatttaattttattgttaagctraacaaaaattaatttaccttttatcagtacttaacaaatggcaagacagcggtggaaaaccagattttaaatactcattttaaaaaaaattaagaagagctaacctgtaaccatataatttaaagcagatccagtatttttcactgcatgtacaaacaagtaaatatactgaaagtaaaatttatgtgatatgaagaagaaaatgcaaataaaatatttatttctatttttagaatcttaaaatatctgcacatacttaaataccaagattatattttagaatggcaattcagaatatatgtctgttgataagactattacacaggtaaaaatcttatccatgaggtgacttgatataggaactgaataaactaggcagaaagcagggtcctaaagccttgaaaggtctagtgttatggaccaatggaggtgaaa

SEQ ID NO: 17718 - DNA, 519 bp, Homo sapiens
tggctcctttttgctaccctatatgttaccagaccatgctaagaaataatggtttcatattaatttaattttattgttaagctgaacaaaaattaatttaccttttatcagtacttaacaaatggcaagacagcrgtggaaaaccagattttaaatactcattttaaaaaaaattaagaagagctaacctgtaaccatataatttaaagcagatccagtatttttcactgcatgtacaaacaagtaaatatactgaaagtaaaatttatgtgatatgaagaagaaaatgcaaataaaatatttatttctatttttagaatcttaaaatatctgcacatacttaaataccaagattatattttagaatggcaattcagaatatatgtctgttgataagactattacacaggtaaaaatcttatccatgaggtgacttgatataggaactgaataaactaggcagaaagcagggtcctaaagccttgaaaggtctagtgttatggaccaatggaggtgaaa

SEQ ID NO: 17719 - DNA, 1152 bp, Homo sapiens
cggcacaaccaggcttcggcacagcctccasgtgactcagcttcacccatgccaggcttcctggagtttgaaaagacagcaattggcatgggtgtaatgtgtgtgttccggtgcagcctgaaccagctgtttccagctttcatatcctcaaatccaacttctcctgtatcatcagtctcttactgcccatgaccatagagcaagcttctttttgcttccttttactttcttttgctgtgtggttcagagaactatatgctgttctacagttatttatttttaaaatgaaggtaaaaaaaataagcatataacaggagggaactcctcagaaagaaataaaagctagaaaaggttttaaaattccttttttttattttaaatagcacgttcttttaaatttgttcatctctggaatgaatcaggcattagttatcaggaggcaagaagtacattggatgaggtctctaaatctcttcaggtgtagggacctgtgaattgctggagtcatgaccactgtcacaatcatcactgactgttagcatacacatgtggtaaaaacagattacactctaattccaggctgtcactctctcttactcattacctagttggattgttgtccttatcaccacttgccacgtatccagaattcaaaataatgtgaaacaggcagaggcctggaccaggtgagatttagtgggtcacttcttctcactctcaacatgagggacttggtctttctcctagatccatgctagccctgaaatgtatgtttcggtaaatccaaacaagttaggaagataaacacctgccaaaaataatcaaaatatagtctaaaataaactaaacctcagagaacttgagaacggaaaggaaacttttaggttctgtaattcaacctcccacctaaagaggaattatctctatagttggagatacatatgtttcttcctttctttctatctacctatctatatctatggtcagaaataaacacacacacatatatatatatgtatatatatatacatgtaggaccaggaagacgggaggttcggtttggggcatactgagtttgaggttgctgtgggacttctaagctgacatggcctctggcatgtcaacttagatagctatatctatatctatatc

SEQ ID NO: 17720 - DNA, 1152 bp, Homo sapiens
cggcacaaccaggcttcggcacagcctccacgtgactcagcttcacccatgccaggcttcctggagtttgaaaagacagcaattggcatgggtgtaatgtgtgtgttccggtgcagcctgaaccagctgtttccagctttcatatcctcaaatccaacttctcctgtatcatcagtctcttactgcccatgaccatagagcaagcttctttttgcttccttttactttcttttgctgtgtggttcagagaactatatgctgttctacagttatttatttttaaaatgaaggtaaaaaaaataagcatataacaggagggaactcctcagaaagaaataaaagctagaaaaggttttaaaattccttttttttattttaaatagcacgttcttttaaatttgttcatctctggaatgaatcaggcattagttatcaggaggcaagaagtacattggatgaggtctctaaatctcttcaggtgtagggacctgtgaattgctggagtcatgaccactgtcacaatcatcactgactgttagcatacacatgtggtaaaaacagattacactctaattccaggctgtcactctctcttactcattacctagttggattgttgtccttatcaccacttgccacgtatccagaattcaaaataatgtgaaacaggcagaggcctggaccaggtgagatttagtgggtcacttcttctcactctcaacatgagggacttggtctttctcctagatccatgctagccctgaaatgtatgtttcggtaaatccaaacaagttaggaagataaacacctgccaaaaataatcaaaatatagtctaaaataaactaaacctcagagaacttgagaacggaaaggaaacttttaggttctgtaattcaacctcccacctaaagaggaattatctctatagttggagatacatatgtttcttcctttctttctatctacctatctatatctatggtcagaaataaacacacacacatatatatatatgtatatatatatacatgtaggaccargaagacgggaggttcggtttggggcatactgagtttgaggttgctgtgggacttctaagctgacatggcctctggcatgtcaacttagatagctatatctatatctatatc

SEQ ID NO: 17721 - DNA, 575 bp, Homo sapiens
ctaagcagggcagcacacgaagacctgatgtaacgctgacaatgttaacacccctgtgtgatgtccaactaaaaataataaaaaaagaaggtgaaaaatttccccatgctgtcaatcaataatgatgtcatcatgaccctgatagaaaactcagtccaggaggytgatggtactaaattagaaatatccatctttccctttggcaaatcctcttttttttttttttttttgtcgtaagtattacatgctaaccttgtaatgagagggcagagaggtaatggggaccaacagcaaggaccctctggaagcctagagccttgggtcccatcctaaaagataagcactgagcacatcacacttaacctctcagcatttcaactttcctatcatctatgagatgagaataatacttgctatctaccccataaaggggttgaaagggatgctgagaaagtccatggaaagcactttgaacttctcagaagtaagattttacagaagtacaaagcctcacatcaaaagacacactcatacctttctgtgacatcaatgagtgtttcatagataggattatg

SEQ ID NO: 17722 - DNA, 575 bp, Homo sapiens
ctaagcagggcagcacacgaagacctgatgtaacgctgacaatgttaacacccctgtgtgatgtccaactaaaaataataaaaaaagaaggtgaaaaatttccccatgctgtcaatcaataatgatgtcatcatgaccctgatagaaaactcagtccaggaggttgatggtactaaattagaaatatccatctttccctttggcaaatcctcttttttttttttttttttgtcgtaagtattacatgctaaccttgtaatgagagggcagagaggtaatggggaccaacagcaaggaccctctggaagcctagagccttgggtcccatcctaaaagataagcactgagcacatcacacttaacctctcrgcatttcaactttcctatcatctatgagatgagaataatacttgctatctaccccataaaggggttgaaagggatgctgagaaagtccatggaaagcactttgaacttctcagaagtaagattttacagaagtacaaagcctcacatcaaaagacacactcatacctttctgtgacatcaatgagtgtttcatagataggattatg

SEQ ID NO: 17723 - DNA, 554 bp, Homo sapiens
tgctattcctctctgctttctgcctatttatatgttattacagagcttgaaatgcattttatatataattttatatacatattgtatacattttttctgattattccttaccataagatgatgaaatggaaaagtcagaggttaaccttatttatttatttattttttagagatgagaaagctgaggttttattttcaatgcaggtaatacagtaagaggtgtgtttaagaatataattctaagcataggtagagctaagtctaaatcttgaaaaggcttttccagcccactcaaaatgcttataaatctgccctcccttttctctagctgcttccaaactcaacagtctatgctattgaaatgtctattaggcttcatctatttattctgcatttttttcatttcctgttctgacctatctggtcctgtcctgcctgtcttgcctcawcttttttttttttttttctcacaactttcattggctttccatgttgctaaggaaaagcatccaaacttataactttggatgtcaaagttctgctcaagctggtcc

SEQ ID NO: 17724 - DNA, 549 bp, Homo sapiens
aatgatttttttgagatctaatttatatatcataaacttcactgtcttaggtgtaaagtccagtggcttttagaacattcaagcattgtgcaaacatcaccactaatttcaaaacatttttatcatcccctaaagaaatctcatactcatcaataaccactctctattctctgctgttcccrgtcccacacaacaactaatctcttttgtctatggacttgcctattcaggacatttcatgtaaagggaatcatgcagtatatggctttttgtaagtaggttttttttacttactttacttattttcagggtcatccatgttgtagcctgcattaatacttcatatatatatatagttggataatatttcattgtatagacatccacatttgtttaatctgtagattcatatacaattttttgaagatatgtttcaattttcttaaacatatgtgtgtatatatatcttatacacataatctggaaggaatttcatacaatatttttaatattttgtgcaagaaaaagttttgactgcaaattgtcaca

SEQ ID NO: 17725 - DNA, 601 bp, Homo sapiens
tatgtctgtaacttcctctatctgagagccttgttgtgatttaattaattaattgattcaattaattctaaactatggaaatgatttaatgaagctcaaactctaaaaggactgcccactgcagatgcaaatgaacaagattgcgtttttcattgatccaaatcattcattcactcagatctataaattggtcatcgatttccacaggtggaaatgattcttactgacacgtacagctctgcagtagaaattgagtttcttctctgtagattcctctgttttgatatccctggataaagtctccttaaaatttacatcattctctgtatgacctctgaaatcttccggaaaataaaaaaaaaaaaaaaaraaaagaaaagaaaacgaacacccccccccgccccaaaaatctaaagcgtcttttacgtatagattcctccgtgggtttgtagctgtggttgtggaactggcttcatctgtcaactatttactgcaggagcttttctaattgataatgagctccttgggggaacatgatttcagagtgtaaattaataatcattttcaaaggatggtgcctcatttttaacaacgttatcca

SEQ ID NO: 17726 - DNA, 583 bp, Homo sapiens
atgatcctgtgcttcctaatctcaatcataggcttttcttttcatattagacaatgctagtgacacatcagttaaagaggtgtgagctcatggtgatggcaagtgtgtgttgaattggattacattctctatctcatccagtgcctcttgtacgcatctttgaagaaagtagctgtggatatgggtggaagcataaaggatcctagtaactgaataacatcagtaacacattcatgattttatcttcattagcaataggactcaagcaattgaaaaaccattgactttgtaaaaacacatgtgcgtgggccaggcacagtggctcacgcctgtaatcccagcactttgggaggctgaggcgggcagattacttgakgtcaagagtttgagaccagcctgctcaacatggtgaaacccagtctctactaaaaatacaaaaattagctgagtgtgatggcacatgcctgtaatcccagctactggggaggctgaggcaggagaatctcttaaaccgggaggcagaggttgcagtgagacaacatcactgcattgctctccagcctgggcaacgaagtgatctccg

SEQ ID NO: 17727 - DNA, 2061 bp, Homo sapiens
aactaatctagcacgagtgacacttaatggggacagggggacttacctaataacactcatctatgactgtcatatagttaaacaagggctaaatgagaccaaacagttcaactaaagccatagaagggtcaacactgaacacagagagaaaaactgttccacatgttaaaaactataaatgacactctactaggttttatctgtctatctagaaatacattttaatccaggtatttagtttcaaattaatactcagaaggtgcgtgtgtgtgtgtgtgtgtgcgtgtgtgtgtgtgtgtgtgtgtgtgtgtgtgtgtgtgtagaggaggcattcaaattgaatgccctaaatgaaagttagagttatcctccttagtttcaactttcaaagataggagatctaccttaaagagccatatttttcttggcataactactgctggtgcaattgtttgaaaatgtatcaaaaagacttgacttaatgtacttataaggtcctcctttttcatctctcagagtaatatttcatgtctgtttactcatagataaaatgataaatttttcttatctgaaaataactgccttcaagcttcagtgggtttcaagcaagctaatatttaccaaaagagctttaattttgtgccagggaaaaattaaatctggggaaagctaaaccaaatgggacatttcaagttggggagagtagctggagagatagaaattatcatttaaaaacaaatgttagatgtttagatgccattagtcccctgggtgttcttctgacctaacaaggagttgatccacagaatatggaatctgaaggagacccagagattacttgttaacaagacttttctgcctctccctattttttttcttcacaactggggatattgtgatggctaaatcatcagctaaacaaacatcttcccattctcaggcaaaacaaacaaacaaacaacaaaaccctttgatttgtgagacaatattttctttgagaaaaaatgagaagtaatccagaatatatgaataaagttgttgaaagaaataatactaagccagaaaaaaactaaatycaatggccttggcaacttgtatgtgattttaactgtttagcctattggaaatactccacaaaagttcagagccactactgtggggaggtgtggataatatatgtcataaatatctgatctgtgaagtacacatatttaaacaaattttataattttaagaataggactagaaataacatatatttatattcggtgaaaattccccacaggagcttattctcatacaatttgaattcaaaatacctttaaaaatttggtttaacagaacagttccaggaatactacaagcatgttcatgctggtaacatttctgtcagaaatgatcaaggagggagaagctgggttgacgaaagctcttgagagaaaacaaaacaaaaaaaatgcatgtgttattacaactctttgaagccgagatagagcagttcttatataaaacttctaagcaatcagaatatcttcgtaggtgaaaaggcattacccgcaaacgttcctactaataaatgcagtcatcatttgcaagaactagaaactggacaataaggaaattcccaagatacagctgtttatgtgaacaaagtgtttaacaaaccaggacattaaatgcctctgtcaaagtaaatggaaaggaagcatctaaaacatacaggccatcactgggccaagtgatagtgataattacccattcatttttcttgctggaactacatctgtggcatttaaattcaaggaaaccaaatcctcagtagagcctgtcagtccatttcacatctgggtagtccattttgggagaaagactgcaccttatgtatgattaattaattccttgttgacaatgtgtcccatggtgctagtgaccctcttatagagagtttttttttttcttttctgtgtctaaaggcttagatcttgggcaaaataatggcctgctttgggttattgagcgtcacttctagaaattttgagtggacgttgagagtctaggggt

SEQ ID NO: 17728 - DNA, 2061 bp, Homo sapiens
aactaatctagcacgagtgacacttaatggggacagggggacttacctaataacactcatctatgactgtcatatagttaaacaagggctaaatgagaccaaacagttcaactaaagccatagaagggtcaacactgaacacagagagaaaaactgttccacatgttaaaaactataaatgacactctactaggttttatctgtctatctagaaatacattttaatccaggtatttagtttcaaattaatactcagaaggtgcgtgtgtgtgtgtgtgtgtgcgtgtgtgtgtgtgtgtgtgtgtgtgtgtgtgtgtgtgtagaggaggcattcaaattgaatgccctaaatgaaagttagagttatcctccttagtttcaactttcaaagataggagatctaccttaaagagccatatttttcttggcataactactgctggtgcaattgtttgaaaatgtatcaaaaagacttgacttaatgtacttataaggtcctcctttttcatctctcagagtaatatttcatgtctgtttactcatagataaaatgataaatttttcttatctgaaaataactgccttcaagcttcagtgggtttcaagcaagctaatatttaccaaaagagctttaattttgtgccagggaaaaattaaatctggggaaagctaaaccaaatgggacatttcaagttggggagagtagctggagagatagaaattatcatttaaaaacaaatgttagatgtttagatgccattagtcccctgggtgttcttctgacctaacaaggagttgatccacagaatatggaatctgaaggagacccagagattacttgttaacaagacttttctgcctctccctattttttttcttcacaactggggatattgtgatggctaaatcatcagctaaacaaacatcttcccattctcaggcaaaacaaacaaacaaacaacaaaaccctttgatttgtgagacaatattttctttgagaaaaaatgagaagtaatccagaatatatgaataaagttgttgaaagaaataatactaagccagaaaaaaactaaatccaatggccttggcaacttgtatgtgattttaactgtttagcctattggaaatactccacaaaagttcagagccactactgtggggaggtgtggataatrtatgtcataaatatctgatctgtgaagtacacatatttaaacaaattttataattttaagaataggactagaaataacatatatttatattcggtgaaaattccccacaggagcttattctcatacaatttgaattcaaaatacctttaaaaatttggtttaacagaacagttccaggaatactacaagcatgttcatgctggtaacatttctgtcagaaatgatcaaggagggagaagctgggttgacgaaagctcttgagagaaaacaaaacaaaaaaaatgcatgtgttattacaactctttgaagccgagatagagcagttcttatataaaacttctaagcaatcagaatatcttcgtaggtgaaaaggcattacccgcaaacgttcctactaataaatgcagtcatcatttgcaagaactagaaactggacaataaggaaattcccaagatacagctgtttatgtgaacaaagtgtttaacaaaccaggacattaaatgcctctgtcaaagtaaatggaaaggaagcatctaaaacatacaggccatcactgggccaagtgatagtgataattacccattcatttttcttgctggaactacatctgtggcatttaaattcaaggaaaccaaatcctcagtagagcctgtcagtccatttcacatctgggtagtccattttgggagaaagactgcaccttatgtatgattaattaattccttgttgacaatgtgtcccatggtgctagtgaccctcttatagagagtttttttttttcttttctgtgtctaaaggcttagatcttgggcaaaataatggcctgctttgggttattgagcgtcacttctagaaattttgagtggacgttgagagtctaggggt

SEQ ID NO: 17729 - DNA, 2061 bp, Homo sapiens
aactaatctagcacgagtgacacttaatggggacagggggacttacctaataacactcatctatgactgtcatatagttaaacaagggctaaatgagaccaaacagttcaactaaagccatagaagggtcaacactgaacacagagagaaaaactgttccacatgttaaaaactataaatgacactctactaggttttatctgtctatctagaaatacattttaatccaggtatttagtttcaaattaatactcagaaggtgcgtgtgtgtgtgtgtgtgtgcgtgtgtgtgtgtgtgtgtgtgtgtgtgtgtgtgtgtgtagaggaggcattcaaattgaatgccctaaatgaaagttagagttatcctccttagtttcaactttcaaagataggagatctaccttaaagagccatatttttcttggcataactactgctggtgcaattgtttgaaaatgtatcaaaaagacttgacttaatgtacttataaggtcctcctttttcatctctcagagtaatatttcatgtctgtttactcatagataaaatgataaatttttcttatctgaaaataactgccttcaagcttcagtgggtttcaagcaagctaatatttaccaaaagagctttaattttgtgccagggaaaaattaaatctggggaaagctaaaccaaatgggacatttcaagttggggagagtagctggagagatagaaattatcatttaaaaacaaatgttagatgtttagatgccattagtcccctgggtgttcttctgacctaacaaggagttgatccacagaatatggaatctgaaggagacccagagattacttgttaacaagacttttctgcctctccctattttttttcttcacaactggggatattgtgatggctaaatcatcagctaaacaaacatcttcccattctcaggcaaaacaaacaaacaaacaacaaaaccctttgatttgtgagacaatattttctttgagaaaaaatgagaagtaatccagaatatatgaataaagttgttgaaagaaataatactaagccagaaaaaaactaaatccaatggccttggcaacttgtatgtgattttaactgtttagcctattggaaatactccacaaaagttcagagccactactgtggggaggtgtggataatatatgtcataaatatctgatctgtgaagtacacatatttaaacaaattttataattttaagaataggactagaaataacatatatttatattcggtgaaaattccccacaggagcttattctcatacaatttgaattcaaaatacctttaaaaatttggtttaacagaacagttccaggaatactacaagcatgttcatgctggtaacatttctgtcagaaatgatcaaggagggagaagctgggttgacgaaagctcttgagagaaaacaaaacaaaaaaaatgcatgtgttattacaactctttgaagccgagatagagcagttcttatataaaacttctaagcaatcagaatatcttcgtaggtgaaaaggcattacccgcaaacgttcctactaataaatgcagtcatcatttgcaagaactagaaactggacaataaggaaattcccaagatacagctgtttatgtgaacaaagtgtttaacaaaccaggacattaaatgcctctgtcaaagtaaatggaaaggaagcatctaaaacatacaggccatcactgggccragtgatagtgataattacccattcatttttcttgctggaactacatctgtggcatttaaattcaaggaaaccaaatcctcagtagagcctgtcagtccatttcacatctgggtagtccattttgggagaaagactgcaccttatgtatgattaattaattccttgttgacaatgtgtcccatggtgctagtgaccctcttatagagagtttttttttttcttttctgtgtctaaaggcttagatcttgggcaaaataatggcctgctttgggttattgagcgtcacttctagaaattttgagtggacgttgagagtctaggggt

SEQ ID NO: 17730 - DNA, 2061 bp, Homo sapiens
aactaatctagcacgagtgacacttaatggggacagggggacttacctaataacactcatctatgactgtcatatagttaaacaagggctaaatgagaccaaacagttcaactaaagccatagaagggtcaacactgaacacagagagaaaaactgttccacatgttaaaaactataaatgacactctactaggttttatctgtctatctagaaatacattttaatccaggtatttagtttcaaattaatactcagaaggtgcgtgtgtgtgtgtgtgtgtgcgtgtgtgtgtgtgtgtgtgtgtgtgtgtgtgtgtgtgtagaggaggcattcaaattgaatgccctaaatgaaagttagagttatcctccttagtttcaactttcaaagataggagatctaccttaaagagccatatttttcttggcataactactgctggtgcaattgtttgaaaatgtatcaaaaagacttgacttaatgtacttataaggtcctcctttttcatctctcagagtaatatttcatgtctgtttactcatagataaaatgataaatttttcttatctgaaaataactgccttcaagcttcagtgggtttcaagcaagctaatatttaccaaaagagctttaattttgtgccagggaaaaattaaatctggggaaagctaaaccaaatgggacatttcaagttggggagagtagctggagagatagaaattatcatttaaaaacaaatgttagatgtttagatgccattagtcccctgggtgttcttctgacctaacaaggagttgatccacagaatatggaatctgaaggagacccagagattacttgttaacaagacttttctgcctctccctattttttttcttcacaactggggatattgtgatggctaaatcatcagctaaacaaacatcttcccattctcaggcaaaacaaacaaacaaacaacaaaaccctttgatttgtgagacaatattttctttgagaaaaaatgagaagtaatccagaatatatgaataaagttgttgaaagaaataatactaagccagaaaaaaactaaatccaatggccttggcaacttgtatgtgattttaactgtttagcctattggaaatactccacaaaagttcagagccactactgtggggaggtgtggataatatatgtcataaatatctgatctgtgaagtacacatatttaaacaaattttataattttaagaataggactagaaataacatatatttatattcggtgaaaattccccacaggagcttattctcatacaatttgaattcaaaatacctttaaaaatttggtttaacagaacagttccaggaatactacaagcatgttcatgctggtaacatttctgtcagaaatgatcaaggagggagaagctgggttgacgaaagctcttgagagaaaacaaaacaaaaaaaatgcatgtgttattacaactctttgaagccgagatagagcagttcttatataaaacttctaagcaatcagaatatcttcgtaggtgaaaaggcattacccgcaaacgttcctactaataaatgcagtcatcatttgcaagaactagaaactggacaataaggaaattcccaagatacagctgtttatgtgaacaaagtgtttaacaaaccaggacattaaatgcctctgtcaaagtaaatggaaaggaagcatctaaaacatacaggccatcactgggccaagtgatagtgataattacccattcatttttcttgctggaactacatctgtggcatttaaattcaaggaaaccaaatcctcagtagagcctgtcagtccatttcacatctgggtagtccattttgggagaaagactgcaccttatgtatgattaattaattccttgttgacaaygtgtcccatggtgctagtgaccctcttatagagagtttttttttttcttttctgtgtctaaaggcttagatcttgggcaaaataatggcctgctttgggttattgagcgtcacttctagaaattttgagtggacgttgagagtctaggggt

SEQ ID NO: 17731 - DNA, 1323 bp, Homo sapiens
atatttgtataaatgcatgattgctcacagagagctggttgttaagcacttaccagcacatatcatttctaataatgaacaagtccaaataaagcctactatataaaattcagatttaaataggtttattttatcttcctttccttgttcttttcccctcttttcctcctgttcttcctatttctcacttttagttcttttatgcttagtaatatatactatattaaactgaataagccagaaaacactgaaatttctttacctattattagtccattttcattctgctatgaagaaatacctgagaccgcataatttataaagaaaaaggggtttattggacttacagttccacatggctggggaggcctcacaatcatggcagaaggtgaaggaggagcagaggcacatcttacagggcagcaggcaagggcatgtgcaggggaatcgccctttataaaaccatcagatctcatgagacttattgactatcatgagaacagcatgggaaaaacctgcccccatgattcagttacctcccacctggtacctcccatgacacatggggattatgggagctacagttcaagatgagatttgggtggagacacagccaaaccatattcctatgttgtttctaacccttgcagtgacccaccagcaaacgttatcattccccactctgcagatgagaaaactgaggttaagcctcttttctgttgtcacacatctcataagtgccagacatgattgcctcttccagatctatctctaaagcctctgctcttttccaaataccatactgttctgaagctagttcttayaagcatattaggaaaaatagatcttatagcaaaagctttttacttttagagctatttatcccaagaactgtttattacacagaaaattacactttcacaaaatattttttgttatgctttgagcttatgtaaatgttttatacttacttaattttatttctgttctcatagccttggtggaggaccagatgatgcaaaagaaattatgagacacagtttcttctctggagtaaactggcaagatgtatatgataaaaaggtaagatttctttatggcatagtgtgtatatattttggctgcactgctaaaatgaatttatagcaaaaatattttaagtgaataaaagttaatgatgtaatgatactttccattttaccgacatttaagtgattattgaacttctgtgcacaaaattttactcatgattttgactccccaaatgcctcttgagattttgctcaacatgatcacagaatttttctatttttttcccataat

SEQ ID NO: 17732 - DNA, 1799 bp, Homo sapiens
tgtacacaataaatcattccttcacayttcactgtattctaaaaaaatgtttgtgattacttttcacaaatacagctagtagaactcaattgggagtattgagtttcaggaaaaataagagtggaaagtcaaattgttaagtgcatcgtcagtccaaatgaggtcagtggcagcacttggggaacaatctgaggtactccttgaggtttggtccttggactcttgaagcaggcaaggctgtggacaactggtttgaatgggacaactgccagagaaagtcccatcaagctatgatgaccacagaaaagttgaccaaagaccatggagggtgacctgcaagtggaccaagcctgtcaataggattttgggaacagatcccacagatctggtaccatgctgcctcattttctcccaagtgggtcagtgtttggagtctagaaacaacatgttttaacaactcaaaattcttcattgggttggggcgttatcaaagccagttacagcccatatcctttttatctgcccctcctgtaaaaggcaaccaagctcatggattccttgtagttgtctgaacgtttccttggtcagtgttccttctttactccaaaagaccctttacaactagaaatataggccattctcttgggacctcctaatggctattatctaaaattctcctgatgatacagatacacactcaaatattagaatagcataaacatttttcagactagagtttccagtctgtgcttctggacaatgagcagccagattagacccctaattcctaagcctaccactgggcaggacggcaagtggtcactatcagagaggcatggcagcaccataccagatacagaataatagttgaagagcagaacgcgaatgagcaattaagttgcctcagtttgccagtaaatctgagaacagaccaactttgctgggatatagattacagcaggtagaaactgattttgtcaccctctggcaatttaagcccctgatctttccctcaattcctgccccatatcagggagctagtcatgccattgggcttttcatgccagtatttctcaaactaagcccactggacattttctctgagttcatgagattctgatattgtttttttaatttgttttcatattgatgaaaatataaaaataatcaatattcatatcttgtgggtcaactgaatgaccaactcaaaccacagaatttctatgtccacatgtagatttgtgtttatgacagcataagggtcaaatagaactgctttaattctctcagactagtgaaaaatgagtgtgatggacttcaacacaaacaatgtgatcattgacaagtgaggaacaaatgacctcacagcatcctgtagaaacaaaagtgtcatgatatttaggatagaggaagatggaagacacactgagtcatcatgcggcatgcagcacattcagcagagtcgtggccaactcacacaaacctgtgccatagccccaggaccatatccacatggcaagaaatgattttgttttagcaaaccaacatcattgatcctattaaagattaatcttaattctattgattttgtggatttgtttgtattttataaattcataaaagcttgtctaagcttttatgttaaatgttaatgtttacacagtattgcttatacttaaatttatacatgggttatgtttttaagattatacttagtttagcatctgtgtatatttaaattaattatgataataaaattatttgtcagcattgttttcttctaaaaagagactatgcat

SEQ ID NO: 17733 - DNA, 1799 bp, Homo sapiens
tgtacacaataaatcattccttcacatttcactgtattctaaaaaaatgtttgtgattacttttcacaaatacagctagtagaactcaattgggagtattgagtttcaggaaaaataagagtggaaagtcaaattgttaagtgcatcgtcagtccaaatgaggtcagtggcagcacttggggaacaatctgaggtactccttgaggtttggtccttggactcttgaagcaggcaaggctgtggacaactggttygaatgggacaactgccagagaaagtcccatcaagctatgatgaccacagaaaagttgaccaaagaccatggagggtgacctgcaagtggaccaagcctgtcaataggattttgggaacagatcccacagatctggtaccatgctgcctcattttctcccaagtgggtcagtgtttggagtctagaaacaacatgttttaacaactcaaaattcttcattgggttggggcgttatcaaagccagttacagcccatatcctttttatctgcccctcctgtaaaaggcaaccaagctcatggattccttgtagttgtctgaacgtttccttggtcagtgttccttctttactccaaaagaccctttacaactagaaatataggccattctcttgggacctcctaatggctattatctaaaattctcctgatgatacagatacacactcaaatattagaatagcataaacatttttcagactagagtttccagtctgtgcttctggacaatgagcagccagattagacccctaattcctaagcctaccactgggcaggacggcaagtggtcactatcagagaggcatggcagcaccataccagatacagaataatagttgaagagcagaacgcgaatgagcaattaagttgcctcagtttgccagtaaatctgagaacagaccaactttgctgggatatagattacagcaggtagaaactgattttgtcaccctctggcaatttaagcccctgatctttccctcaattcctgccccatatcagggagctagtcatgccattgggcttttcatgccagtatttctcaaactaagcccactggacattttctctgagttcatgagattctgatattgtttttttaatttgttttcatattgatgaaaatataaaaataatcaatattcatatcttgtgggtcaactgaatgaccaactcaaaccacagaatttctatgtccacatgtagatttgtgtttatgacagcataagggtcaaatagaactgctttaattctctcagactagtgaaaaatgagtgtgatggacttcaacacaaacaatgtgatcattgacaagtgaggaacaaatgacctcacagcatcctgtagaaacaaaagtgtcatgatatttaggatagaggaagatggaagacacactgagtcatcatgcggcatgcagcacattcagcagagtcgtggccaactcacacaaacctgtgccatagccccaggaccatatccacatggcaagaaatgattttgttttagcaaaccaacatcattgatcctattaaagattaatcttaattctattgattttgtggatttgtttgtattttataaattcataaaagcttgtctaagcttttatgttaaatgttaatgtttacacagtattgcttatacttaaatttatacatgggttatgtttttaagattatacttagtttagcatctgtgtatatttaaattaattatgataataaaattatttgtcagcattgttttcttctaaaaagagactatgcat

SEQ ID NO: 17734 - DNA, 1799 bp, Homo sapiens
tgtacacaataaatcattccttcacatttcactgtattctaaaaaaatgtttgtgattacttttcacaaatacagctagtagaactcaattgggagtattgagtttcaggaaaaataagagtggaaagtcaaattgttaagtgcatcgtcagtccaaatgaggtcagtggcagcacttggggaacaatctgaggtactccttgaggtttggtccttggactcttgaagcaggcaaggctgtggacaactggtttsaatgggacaactgccagagaaagtcccatcaagctatgatgaccacagaaaagttgaccaaagaccatggagggtgacctgcaagtggaccaagcctgtcaataggattttgggaacagatcccacagatctggtaccatgctgcctcattttctcccaagtgggtcagtgtttggagtctagaaacaacatgttttaacaactcaaaattcttcattgggttggggcgttatcaaagccagttacagcccatatcctttttatctgcccctcctgtaaaaggcaaccaagctcatggattccttgtagttgtctgaacgtttccttggtcagtgttccttctttactccaaaagaccctttacaactagaaatataggccattctcttgggacctcctaatggctattatctaaaattctcctgatgatacagatacacactcaaatattagaatagcataaacatttttcagactagagtttccagtctgtgcttctggacaatgagcagccagattagacccctaattcctaagcctaccactgggcaggacggcaagtggtcactatcagagaggcatggcagcaccataccagatacagaataatagttgaagagcagaacgcgaatgagcaattaagttgcctcagtttgccagtaaatctgagaacagaccaactttgctgggatatagattacagcaggtagaaactgattttgtcaccctctggcaatttaagcccctgatctttccctcaattcctgccccatatcagggagctagtcatgccattgggcttttcatgccagtatttctcaaactaagcccactggacattttctctgagttcatgagattctgatattgtttttttaatttgttttcatattgatgaaaatataaaaataatcaatattcatatcttgtgggtcaactgaatgaccaactcaaaccacagaatttctatgtccacatgtagatttgtgtttatgacagcataagggtcaaatagaactgctttaattctctcagactagtgaaaaatgagtgtgatggacttcaacacaaacaatgtgatcattgacaagtgaggaacaaatgacctcacagcatcctgtagaaacaaaagtgtcatgatatttaggatagaggaagatggaagacacactgagtcatcatgcggcatgcagcacattcagcagagtcgtggccaactcacacaaacctgtgccatagccccaggaccatatccacatggcaagaaatgattttgttttagcaaaccaacatcattgatcctattaaagattaatcttaattctattgattttgtggatttgtttgtattttataaattcataaaagcttgtctaagcttttatgttaaatgttaatgtttacacagtattgcttatacttaaatttatacatgggttatgtttttaagattatacttagtttagcatctgtgtatatttaaattaattatgataataaaattatttgtcagcattgttttcttctaaaaagagactatgcat

SEQ ID NO: 17735 - DNA, 1799 bp, Homo sapiens
tgtacacaataaatcattccttcacatttcactgtattctaaaaaaatgtttgtgattacttttcacaaatacagctagtagaactcaattgggagtattgagtttcaggaaaaataagagtggaaagtcaaattgttaagtgcatcgtcagtccaaatgaggtcagtggcagcacttggggaacaatctgaggtactccttgaggtttggtccttggactcttgaagcaggcaaggctgtggacaactggtttgaatgggacaactgccagagaaagtcccatcaagctatgatgaccacagaaaagttgaccaaagaccatggagggtgacctgcaagtggaccaagcctgtcaataggattttgggaacagatcccacagatctggtaccatgctgcctcattttctcccaagtgggtcagtgtttggagtctagaaacaacatgttttaacaactcaaaattcttcattgggttggggcgttatcaaagccagttacagcccatatcctttttatctgcccctcctgtaaaaggcaaccaagctcatggattccttgtagttgtctgaacgtttccttggtcagtgttccttctttactccaaaagaccctttacaactagaaatataggccattctcttgggacctcctaatggctattatctaaaattctcctgatgatacagatacacactcaaatattagaatagcataaacatttttcagactagagtttccagtctgtgcttctggacaatgagcagccagattagacccctaattcctaagcctaccactgggcaggacggcaagtggtcactatcagagaggcatggcagcaccataccagatacagaataatagttgaagagcagaacgcgaatgagcaattaagttgcctcagtttgccagtaaatctgagaacagaccaactttgctgggatatagattacagcaggtagaaactgattttgtcaccctctggcaatttaagcccctgatctttccctcaattcctgccccatatcagggagctagtcatgccattgggcttttcatgccagtatttctcaaactaagcccactggacattttctctgagttcatgagattctgatattgtttttttaatttgttttcatattgatgaaaatataaaaataatcaatattcatatcttgtgggtcaactgaatgaccaactcaaaccacagaatttctatgtccacatgtagatttgtgtttatgacagcataagggtcaaatagaactgctttaattctctcagactagtgaaaaatgagtgtgatggacttcaacacaaacaatgtgatcattgacaagtgaggaacaaatgacctcacagcatcctgtagaaacaaaagtgtcatgatatttaggatagaggaagatggaagacacactgagtcatcatgcggcatgcagcacattcagcagagtcgtggccaactcacacaaacctgtgccatagccccaggaccatatccacatggcaagaaatgattttgttttagcaaaccaacatcattgatcctattaaagattaatcttaattctattgattttgtggatttgtttgtattttataaattcataaaagcttgtctaagcttttatgttaaatgttaatgtttacacagtattgcttatacttaaatttatacatgggttatgtttttaagattatacttagtttagcatctgtgtatatttaaattaattatgataataaaattatttgtcascattgttttcttctaaaaagagactatgcat

SEQ ID NO: 17736 - DNA, 1889 bp, Homo sapiens
tgctactcactaatctgtgactctggcaaactaacctacctatgcctcagtttttgcattttacaaagatgataacaataacatctagattattagatttaacgagggtttaataagataaatgcataaaaagcacatggcrggttgctaataaataactgactcctgttcctctccattgtccttgtcctctttagttctgagattattttatcaattaggcccatcattcatctatgaaagtttatgctcaggcatagagatatctaaggaggaggagtacacatgtatgtgtgtgtgtgtatgtacataaacatatatacaggaagcagagggattaccttttcctttgtttcaaaacatatttgaacacaatagaataatggtggttaggtggtcagttttatttattgtactgtgtgttgtttatagttttcaaaatgatttcatggctagtatttcattgattttacaataactctccaaattaggtaatgtagttgtttctgttttatagaaggagaacagagggtctcaatggctttcccaagttcattcttcaaggaagggatagaaagaactcaatgtatttctaaccagtgacacttactcacacttggatgcgagttgtgatattttttatttagtttagattaaacctagttcagttctccttccaccaaggttggcaggcagtacagcaacagtcatctttcaaggttgctttccctttctttggataaaacaaagactcctgagatagggtcatgacattttgccatagtggtcactaatgccattgccagttgcccaggcttcgtgatcttgagggcaggaagctcccttggtacaccattccctcctgcattagttcagacatgggaactgtttgcctgatctctcgaggcctttcctcagtggccactatcacagacttccacataggttatctattgctgtcaaacaaactaccccaaaacttgcttctgctgagatgactcaaatggctggagttggaacaatggggggcctggctgggcctctctctctgtccgtctcttttttcctgtctctatctgacttcttccttacatagctgtattgggctttcacacagcagaagcagcttccaggtaatcagggctctgggttccaaatatgttccaagaacaggtggtagaacatgtttctaaagtatgaacctaaaatttgagacatcactttctgttggtcaaagcagccccacaacttgcccagattcaagagaagaagtcatagatcataccactaggtgggaggagtgtccaaaaatttgcatcagtctttaatttgctataccatgtttctgagattctctgacctataggaaattacattccactttgcttagatgtctactcaccataaatgaggtatctttgaagcacatttatctttgaagaataatgccttcattttaacacctcatcctttgtctcatggtgaatgagatttaacctcttattaggaagtagctgataatcacatagctaggtgtcatttcctaaaactgcaaaaggttctctcacttctctgtgttggggctgtcagcaggagatgtttttatgtgttgtgataagtaaaatgattcttctaaattaggctcccatgcctcagcccagcaagacttaatcatctgagtttttatattgtgataatttttgttttaaatcctcttgttagatgtaagtattatgagtactgactgaatgaatgggtaaatgaatgaatgagagtaagcagtgctgaagggatgcacatctgtcttttctaacaagaatagcattaatttacagtgttaggtactaagtctcttgtctatgtcaacatggacctcaccctgtcctcaa

SEQ ID NO: 17737 - DNA, 585 bp, Homo sapiens
tggagtgcagtggcgtgatcttggcttactgcaagctccatctcccaggttcacgccattctcttgcctcagcctcctgagtagctgggactacaggcgcccgccgccacrcccggctaattttttgtatttttagtagagacggggtttcaccgtgttaaccaggatggtctcgatcttctgacctcgtgatccacccgcctcagcctcccaaagtgctgggattacaggcgtgagccaccgcgctccaccaacagtggttttaaccaggttctctttgacttttttcctcatctccctgtcaagtttttggatggtttatctttgttaatatcactcccagctgttagcctctactaattactagctgattgctccagtggttttgacattgtcctgtggcataaattactccacagactgatccaacagtcattgtttatttataattttcacaagttatgattattttactggggaaaatgtctagtgagttcatcatgtcttcattctggaagtgctctgacattaatttttaaagtcaatatgatatagttaaaatagatacaaggcagaaagaattat

SEQ ID NO: 17738 - DNA, 534 bp, Homo sapiens
ctctaatagtcattcaaaagttatttgttgagtacctactgtgtgcaagaactgcaaatatttggcaataaaaacaaataattcctttctttcattgaagcttagatttttattccagtcactgaagtaaatgtgtagtaacttaattttagtgaatgcttggtggcttctaattatcacagcttcccttaatgtgtactcagaaatcaaycttttgtaatttgttctagaaccttttccagaatttatactgtaacaatcttaaaaacatttcaagaggtgagactccatctcaaaaaaaaaattttttttcaagaggttgctttgagtatatgagaagtaagaaatttggcaattgtattgcatcatgaaaagatgaaaataccaaagctagctctaggtcagcactgagagagctttcagaaatgttctacatctgtgctgtccagtatggcaaccactaactcatgtggctgttgtattcttgaaatgtggctagtgtgactgagaaaataaattttttatttaatttta

SEQ ID NO: 17739 - DNA, 1091 bp, Homo sapiens
ccaaatgaccctttgctgaacttacataactagctaccttgaaatagctaaacttcactgtgaggacatggacacacacacacaggtacacatcattttcatatcaggtgcatggatcagcattccatttatatatgtgcttaatctactttgcacagaagacctgcttatgcaaatgctatagctttggcagtgcccaggaactgatttttataatctaagcaattctgagctccttgaaacagaagaaaactgatgagcgcactctcagccattcatcctttggcatgccctaaaatgttctgcatcaaatcacacattctccccagatgtggtgattttaaaggtcagctctcgaatgctagtatgaaaaatgaggtttttactgactcccacatgagctgtgggtagtcaccactgccttttagagggtcattttatttttattcctgcattactaaaagcaacaccctcctagacattaggtctaaggagcttgcactttctcgcctatttctttccaggcaagacagagaatcctggaagatgatttcrtgtctgaaaactgacgagaaaggtatgtttggcagggagagtcattcttgccactccattgcactgagcagtcttctattttaagtttttattaatgaagtcatgtttcttttctagtcactaaccatcaccactagcatcatcatctctcatactcagagatgacaccaagcatctatatgtgtaaatggggctgaaaagatatacctttgagctggggtccccgtcacattgagggtcttttagtaattgaacttctagaaggcatttaagctcagttgagctcacctatctctcataataatcactgccagttactgaagcctgcactccaccagacacactgttaagcactttacatcatgttcacaacaaccctgagaggcagacattacgaaagtgatgtaatgtggtagtttgagcattgactttggagtgagagaccaaggttcaagggcatgctctgccatttacttgaccttggagacgttatctaaccattctgagttttaggttccctgtgtgtaaaatggaga

SEQ ID NO: 17740 - DNA, 560 bp, Homo sapiens
ggttctcttattatcacaaaacaaacaaacaaaatctaaatgataatatayttccacctgtgtatgcattgaatcctgctaaagttacgtaaaaatcgattaaacaaaagttctgtatctcgactccttacaaaggaacacagttaagaaagttataggaggagttaatggatcccaagaacaggactagaattaggctgtaatgtgctggaaaaacttagtgatttatttggggctgggaggcataagcaggcaggaacaacattaaaaaaaatcggtgaaatttagttttccttttaggaaaggaatgagaatataatgtatatattttaaatatgcatattaaagactaaattttaaatttccaaccattcattgtgaaacagcaacatagagataccatggacatcccaaaatctaaacaaatccccaaactaagactgcaaatgaaacagagctctacctactttaaagagcactttaacagtgctcttcacagtacattatatagtccaagagaagagaaagtatattcttccccacacaacatgttattggtt

SEQ ID NO: 17741 - DNA, 560 bp, Homo sapiens
ggttctcttattatcacaaaacaaacaaacaaaatctaaatgataatatacttccacctgtgtatgcattgratcctgctaaagttacgtaaaaatcgattaaacaaaagttctgtatctcgactccttacaaaggaacacagttaagaaagttataggaggagttaatggatcccaagaacaggactagaattaggctgtaatgtgctggaaaaacttagtgatttatttggggctgggaggcataagcaggcaggaacaacattaaaaaaaatcggtgaaatttagttttccttttaggaaaggaatgagaatataatgtatatattttaaatatgcatattaaagactaaattttaaatttccaaccattcattgtgaaacagcaacatagagataccatggacatcccaaaatctaaacaaatccccaaactaagactgcaaatgaaacagagctctacctactttaaagagcactttaacagtgctcttcacagtacattatatagtccaagagaagagaaagtatattcttccccacacaacatgttattggtt

SEQ ID NO: 17742 - DNA, 560 bp, Homo sapiens
ggttctcttattatcacaaaacaaacaaacaaaatctaaatgataatatacttccacctgtgtatgcattgaatcctgctaaagttacgtaaaaatcgattaaacaaaagttctgtatctcractccttacaaaggaacacagttaagaaagttataggaggagttaatggatcccaagaacaggactagaattaggctgtaatgtgctggaaaaacttagtgatttatttggggctgggaggcataagcaggcaggaacaacattaaaaaaaatcggtgaaatttagttttccttttaggaaaggaatgagaatataatgtatatattttaaatatgcatattaaagactaaattttaaatttccaaccattcattgtgaaacagcaacatagagataccatggacatcccaaaatctaaacaaatccccaaactaagactgcaaatgaaacagagctctacctactttaaagagcactttaacagtgctcttcacagtacattatatagtccaagagaagagaaagtatattcttccccacacaacatgttattggtt

SEQ ID NO: 17743 - DNA, 560 bp, Homo sapiens
ggttctcttattatcacaaaacaaacaaacaaaatctaaatgataatatacttccacctgtgtatgcattgaatcctgctaaagttacgtaaaaatcgattaaacaaaagttctgtatctcgactccttacaaaggaacacagttaagaaagttataggaggagttaatggatcccaagaacaggactagaattaggctgtaatgtgctggaaaaacttagtgatttatttggggctgggaggcataagcaggcaggaacaacattaaaaaaaatcggtgaaatttagttttccttttaggaaaggaatgagaatataatgtatatattttaaatatgcatattaaagactaaattttaaatttccaacyattcattgtgaaacagcaacatagagataccatggacatcccaaaatctaaacaaatccccaaactaagactgcaaatgaaacagagctctacctactttaaagagcactttaacagtgctcttcacagtacattatatagtccaagagaagagaaagtatattcttccccacacaacatgttattggtt

SEQ ID NO: 17744 - DNA, 565 bp, Homo sapiens
aaggcctcaagagctacagtaaaaaaaaaaaaaagaaagaaaaggaaaaaaaaaaaagaagatactgccctaaagcattctaaggcctgttaatatccacatacccttttgtaaacaaagctaattatcacaacaaacaagttttaatttattttatttatttatgtgcctcttttaattgcatttcctttccacgactcacacctttctagcactgtatggtaagataaactataagcctgtctgccaagagtaaatgcttgctggacmattgctgaggagtttcttctaccaacataaatacgatgccattttctgttggtaaaatagattcttgacttgagccaccaatcatttgatctctctgaaggaagaagtaatgaaagagacaaggaaagtctgaatataattatgtttaagaagtaaacctgggaggagaaggaaggacctgtgagagaaagcaattgttttcatcttagaatatgttacagccagcgatgggaagaccagagctctaagaaaatagatttttaaagattagttgggtaggattccttagacagaa

SEQ ID NO: 17745 - DNA, 497 bp, Homo sapiens
tgctttattggaacaagaaatatgtgctgaataaaatcaacagtagaaagtgtattgattattagatccaccatacccatgaacagagttctgacttggagaggtctgcaatggggtgacacaaagttccgtccttaatggtgcccttaacatcagcatcattgacttgtctgaaaaatgggtgtctattttcaaaaytatggatactataaaatggaaagaggtcatcaatatgtcatcttatagaatcaaaatccaaaatgatttcaattggatgcaaccataagttgtttataagttgaataatacatgtaaaattctacatacagttgaggggaggtacaaatgcaaaatgagggtaggttgagggagaagaaaagttagtagcagtgacccgtatgtgcaaaaaattcagatctgggggaaaatctcattataaatcaacagtacaatgtagctacaaaaaaaagtcctaatatgctcttagacattaatcg

SEQ ID NO: 17746 - DNA, 586 bp, Homo sapiens
cccacttcggcctcccaaagttctgggattacaggcgtgagccactgcgcctggcctgcctggacgatttttatatttttagtagagatggggttttgtcatgttgaccaggctggtctagaactcctgacttcaggtgatcctcctgcctctgcctcccaaagtgcaagtgctgggattayaggcatgagccaccgcacccagcctagcaatttattttctaaagaaaatttcctagatggtggactgtctggatagtggaaataaaggacagggatgagttaagactatctaaagttagagccccgaagcgtggttggaacattaagatagtagttttggtttagttggaatgaaggtattttgcataagctgaatctgagatttcattagacctaggttcattcagttgatacctattaagcatgttctaggggttataaagatgcaacagaacagacatcgagttcatgttctaatagactctgagatgagaagatagaattgtttggaaatctttcgccatgagcatgaattaaagtcatgggaatggatggagatttgggcctagttctaggtagcagat

SEQ ID NO: 17747 - DNA, 547 bp, Homo sapiens
aaagaggggaaagtggaacatgaggtgggagggtgatagaaaagaatgccaagcccattgtccccagtggttccagaaatcaaaagctagcccgcttgaaggaagtataatggatttctcccctttaggacaaagtgggattggaatactttgtttttcatctttcttctgaccccaaccaaggaaatctataatattcagttctttgaagatctgatcctacttatattttctccttttgatatttctgtcccttgtctgtttgtagcccctcttccaaaagctgactgcaggaaaagagaaagattactatwttctaagtttcctaaaaaataaaagagttcttggggggcttgcgtcgcgttagacctaaaggatggatagaatttgggtggattggagtagaggcttactccaggcatgggttacataggaaatatgatggggagccaatacgtagaacctgtttgctgcactgaaaactttaatggaagtttatttggtagaaaagaacaaggaaattagatttgctcaatgattcccaaca

SEQ ID NO: 17748 - DNA, 1045 bp, Homo sapiens
tgtgagttcttgacatttcttttagaaataacttatgttctaaagatagctgataatgttactttcatctgatttctaatattctttacaaatattagaattagactgatgaagacagatactatagttratcttagccagaaagccaggtcaatttcaaatgttctcactgcaaaaaagtatttgaggtaatgggcatgttaatttgtttgatttgattatttcacactgaattttcaaatcataatattactttgtatcctcaaatatatacaatgataagttgttgatttataattaaaaaatgtggtttatttttttgctactataaataggataaattagagccctgtgaccatgctagctaatagtggtactgtatttataaaatgaatgtgttatctttagctattagacacatgaaaaatggaaattagaaaatagatttcaaagtacatattaccttcttctttattttcaaccctataataaaacagatgttttagaacactttctggttctctatagagtccagacaaaggcactgtatttacatgtgttgttttccaggtttgcccggcctcttgtttctttaaatactcttggtatttcaacagcgagtttataactaataattaagtatgggaacacctattttttcccttaaatagcttactctttttcttccacaaagatctgtttattgcctacagttctatatttttgtgggggaatcatctgcttccttgttactgattataactgggaagcattttcaatttaaattaatttttggttggttaatattcttccttaaatatatttattactaaatattcatccatctgaagtcttcctagttttccatatgtgccttccaaaatgatttttgaaccacaaacatgtttattaattaaatcactaggcgaaatccgcctttagtccaagttgttctgaacaatctgtgatacctaagagccgaaggttcttcttaaaaggaaaagaaatccttgtggtatttttttgtctttaaaatatattaaaa

SEQ ID NO: 17749 - DNA, 1045 bp, Homo sapiens
tgtgagttcttgacatttcttttagaaataacttatgttctaaagatagctgataatgttactttcatctgatttctaatattctttacaaatattagaattagactgatgaagacagatactatagttgatcttagccagaaagccaggtcaatttcaaatgttctcactgcaaaaaagtatttgaggtaatgggcatgttaatttgtttgatttgattatttcacactgaattttcaaatcataatattactttgtatcctcaaatatatacaatgataagttgttgatttataattaaaaaatgtggtttatttttttgctactataaataggataaattagagccctgtgaccatgctagctaatagtggtactgtatttataaaatgaatgtgttatctttagctattagacacatgaaaaatggaaattagaaaatagatttcaaagtacatattaccttcttctttattttcaaccctataataaaacagatgttttagaacactttctggttctctatagagtccagacaaaggcactgtatttacatgtgttgttttccaggtttgcccggcctcttgtttctttaaatactcttggtatttcaacagcgagtttataactaataattaagtatgggarcacctattttttcccttaaatagcttactctttttcttccacaaagatctgtttattgcctacagttctatatttttgtgggggaatcatctgcttccttgttactgattataactgggaagcattttcaatttaaattaatttttggttggttaatattcttccttaaatatatttattactaaatattcatccatctgaagtcttcctagttttccatatgtgccttccaaaatgatttttgaaccacaaacatgtttattaattaaatcactaggcgaaatccgcctttagtccaagttgttctgaacaatctgtgatacctaagagccgaaggttcttcttaaaaggaaaagaaatccttgtggtatttttttgtctttaaaatatattaaaa

SEQ ID NO: 17750 - DNA, 1045 bp, Homo sapiens
tgtgagttcttgacatttcttttagaaataacttatgttctaaagatagctgataatgttactttcatctgatttctaatattctttacaaatattagaattagactgatgaagacagatactatagttgatcttagccagaaagccaggtcaatttcaaatgttctcactgcaaaaaagtatttgaggtaatgggcatgttaatttgtttgatttgattatttcacactgaattttcaaatcataatattactttgtatcctcaaatatatacaatgataagttgttgatttataattaaaaaatgtggtttatttttttgctactataaataggataaattagagccctgtgaccatgctagctaatagtggtactgtatttataaaatgaatgtgttatctttagctattagacacatgaaaaatggaaattagaaaatagatttcaaagtacatattaccttcttctttattttcaaccctataataaaacagatgttttagaacactttctggttctctatagagtccagacaaaggcactgtatttacatgtgttgttttccaggtttgcccggcctcttgtttctttaaatactcttggtatttcaacagcgagtttataactaataattaagtatgggaacacctattttttcccttaaatagcttactctttttcttccacaaagatctgtttattgcctacagttctrtatttttgtgggggaatcatctgcttccttgttactgattataactgggaagcattttcaatttaaattaatttttggttggttaatattcttccttaaatatatttattactaaatattcatccatctgaagtcttcctagttttccatatgtgccttccaaaatgatttttgaaccacaaacatgtttattaattaaatcactaggcgaaatccgcctttagtccaagttgttctgaacaatctgtgatacctaagagccgaaggttcttcttaaaaggaaaagaaatccttgtggtatttttttgtctttaaaatatattaaaa

SEQ ID NO: 17751 - DNA, 560 bp, Homo sapiens
tcaatctcaaagtgacctagagtcattgactttggtaattggtgaatatccagacattttgagacctgttgcaccccaaatttaattatgatcactgtagaagtatgactatcatgagaacagataataaataaattcctagaccagatcttattattcccaactgagaaatctatgattagaattacattcttggtagttgacagaacatgtccccrgctctgcacgcacaaacacacacacacagagacacacacacatacacaacatgcactgtttccttggagagtgagttaagtctataatagtgggaaaagtcaactggaaggctctgaactgattcccccatcatgaatgttatacgataaaattgtaaaataaaaatattacatccaagagagatgacagacattattacctactttaatgacctaaaatatcaacagttagtagtaccctaatttctccatgtaattcatcactgtaacttttccaaaattgatacattgtctagatgatgaaagtagagtaccacagactcaagcaaagggaagctttaa

SEQ ID NO: 17752 - DNA, 560 bp, Homo sapiens
tcaatctcaaagtgacctagagtcattgactttggtaattggtgaatatccagacattttgagacctgttgcaccccaaatttaattatgatcactgtagaagtatgactatcatgagaacagataataaataaattcctagaccagatcttattattcccaactgagaaatctatgattagaattacattcttggtagttgacagaacatgtccccagctctgcacrcacaaacacacacacacagagacacacacacatacacaacatgcactgtttccttggagagtgagttaagtctataatagtgggaaaagtcaactggaaggctctgaactgattcccccatcatgaatgttatacgataaaattgtaaaataaaaatattacatccaagagagatgacagacattattacctactttaatgacctaaaatatcaacagttagtagtaccctaatttctccatgtaattcatcactgtaacttttccaaaattgatacattgtctagatgatgaaagtagagtaccacagactcaagcaaagggaagctttaa

SEQ ID NO: 17753 - DNA, 412 bp, Homo sapiens
tgttcctttcatagcattaaacataattataaattaaatatttatatttctgtttattttgtttaaatgttggattttcccatcagagaaggatatagttatatatattatatacatgtatataatatatataactatatattatatataactatatataatatacatgtatattatatatagttattaataattgtatactatattgtatataatatatataaatatattaatttatatatawaaatttatatatatttatatatttttatatttatatatatttatatatattatataaatatatatataaatttatatattttatataatatatataaattatatatattatatattatataaattatatattatactatgtatatattatatataagtatatataata

SEQ ID NO: 17754 - DNA, 609 bp, Homo sapiens
ttattactaggtaatctcattttattttattttctacccatttctctggtatgctaacatccatgagggtattgcatgggctttcattcatttattgtttttggcattcagtagtagcattcagtgtttcacttctgcaaaattagtgtctcaatttttttgatgatttttttctttgataagttctttctgtcaatttttttttttgaaatttcttggtatctcactgggtcttctaaattaattttctttttctttcatgttttgctcagttttaatctcttctttcttctwtccagatatttcttaggttttatctttcttttaattcattcttcttttatttttatttctttttgtttttatcatacttttaatttccaacagttttttgtctttcttcatggcctccactgtttattttatataaatgaaaactcttcaagtttctttacagaaactaactagaattttgtctgttcttaagttttctttctttttttttaatcattctttctcctaagttaagtgattagaggcttttcttctttttgtttttagctgtatctttctttcatgttaccgtatttcctcaaatagttggtagta

SEQ ID NO: 17755 - DNA, 520 bp, Homo sapiens
ttatctaagatataatcatctctgctatctcagggactattaagagatggtggaccttgacacaatgaagaatggaaggcccagatttaaggacattgcaaattacatgggactaattccaattccttcagaggacaaatttctttggggtctgagtcatatagtttggctgcacagctcttttcccaatcacctgaatgaccagcgtttggatctgggttcatttagctgcaaggggacctcattaaatgctgtgtacacaaaaggtcaacaattcctcacactgaaaaaagggaaaagaggagcccttccagcaaaacaactgaataracactgtaaatgttactaaacaggaaagtacagagaagtgcctgctggaaggagatccatggcagaacaaaaatagcacaaagagagattctctgtcatccatcaagatccaaaagcagttctccacgctaaccaatgatttgattaattagagatttatcacgtgttcagatttccaattctttttttt

SEQ ID NO: 17756 - DNA, 524 bp, Homo sapiens
tgcagtgctgaatttctgggcatgtgaatgatacattgttgtactgaaacattcattttccaagattcctttccaaattcaactccatggtctttcttttgtctgttttgctaaagggcaaaatactaacctgtttccaagctattcagcaatattttggcacaggtaatccagtaagagaattgtttgtatagaacagagctgatgttaataacagggygccctaacctgcccctctttctaagctcttcacctatagatgacagcccagctattcacatttaactcttacctgatggctgtttcattgcagctcaaagacttacctgcatatgattaagtcaacacgcaacactgggtgcaacatctaagcccacatttaagcaaagtaaagagcttgagatcatctaaatgggagcgggagcaagggagaactcactatccactgtgtttttgttacctttggcaaattctcaagggtagggggtcaggactgccagtgcctggcactgtgcctgacacat

SEQ ID NO: 17757 - DNA, 524 bp, Homo sapiens
tgcagtgctgaatttctgggcatgtgaatgatacattgttgtactgaaacattcattttccaagattcctttccaaattcaactccatggtctttcttttgtctgttttgctaaagggcaaaatactaacctgtttccaagctattcagcaatattttggcacaggtaatccagtaagagaattgtttgtatagaacagagctgatgttaataacagggtgccctaacctgcccctctttctaagctcttcacctatagatgacagcccagctattcacatttaactcttacctgatggctgtttcattgcagctcaaagacttacctgcatatgattaagtcaacacgcaacactgggtgcaacatctaagccmacatttaagcaaagtaaagagcttgagatcatctaaatgggagcgggagcaagggagaactcactatccactgtgtttttgttacctttggcaaattctcaagggtagggggtcaggactgccagtgcctggcactgtgcctgacacat

SEQ ID NO: 17758 - DNA, 524 bp, Homo sapiens
tgcagtgctgaatttctgggcatgtgaatgatacattgttgtactgaaacattcattttccaagattcctttccaaattcaactccatggtctttcttttgtctgttttgctaaagggcaaaatactaacctgtttccaagctattcagcaatattttggcacaggtaatccagtaagagaattgtttgtatagaacagagctgatgttaataacagggtgccctaacctgcccctctttctaagctcttcacctatagatgacagcccagctattcacatttaactcttacctgatggctgtttcattgcagctcaaagacttacctgcatatgattaagtcaacacgcaacactgggtgcaacatctaagcccacatttaagcaaagyaaagagcttgagatcatctaaatgggagcgggagcaagggagaactcactatccactgtgtttttgttacctttggcaaattctcaagggtagggggtcaggactgccagtgcctggcactgtgcctgacacat

SEQ ID NO: 17759 - DNA, 1805 bp, Homo sapiens
tgcatcaagcaactctacatgtaggcattttctaatctactttctgaccaacatgctatyccctcctctagaaggttggatggaggaacataactgaatgtgttaacaggaagtacgagctgagcaaacaataactggatgcaaagccggactttgccagccggccagcatgtggggcctggctcatgggactaaggaccaggagggctgacccgaggtcaaatgggtgctgcacactaatactagtgcctttggataccttctcttgcagaagtcctgcagagccaaatatttctcaggtctacttcatcagttatcagccgttcagcaggcggccacgagcgcaggttttgggactatcagagcttcatgggggaaatgccaaggaaattacagtgctctcaaatctctcccacaaccaacatcagcacacactggagaacgtgtgcctttcatatctattacaatatcaagtaagagataaaaagtaagaccaaacccactagtcaaatatccttgctgaaccttcaaagaccattcataggacatcaaaaatggctattcttccaaaatattcaggtttcctgaaaggcatggcagcaggagaacacatttaacagtgaattctttaacaatataaagagcagtaacagaagaaaacattgactgtggcctagcacttttcacatacgctgtcctttactcttcaaaatggcattttgaattgagcagagttggtattattatcaagatgccttcttttgataaaagggctttctcctgatcaaaacaaatctgaaaatagaaggtacaaacttcataaaattgaaaaatgtcaattattaagaaaatgttaaatgctaatgtatttgtttcatttatttttaaaactgaaatgagagcttgaacaaaggaatataagcgtgcaactaaatgcagggtgttcttgcacatgaccatcgtaaaaacactttgaaatttgaacatctctttgcagagattcaggtatttaccatatgtttgaccaataaccatgaacacaagtctaattttaaaaagaaaaagagacctgaccttttagagaggtggtaaacttctggattgccatataaaccagtaaatgcgttgaacagagacaatttactttgataacagctgtttctccaggagaatttattttaaaactgcctggctttcaaaaatctgcctttctgttttaagactgaaaaaggtgcctttaccagaactttcaagtgtttcagtgtgggttcaggttcaggtgaagaaccagtttgagggagctaggttttcattttatctgtaccagttcatacaacctactgaacaaagaattataggcaggtgatatctgagtcttctacaagatgtgtgtggggatccagaattcacctcaaagggactctccaggttggcttgccttatggaaatatctatagcttcaggctctactggagtccttttattagaattatttactgctgcaaaatcaggaagtcttatatcaccagcagacaatttgattgtcagaggtgttcaaaccagagcgactccatcttgaacaggtgctgggtacaatgaggctgagacctgctgggctgcattcccaggaggttaggcattctaagtcacaggataggataggaggtcagcacaagatacaggtcacaaagaccttgctgaaaacacaggttgcagtaaagaagccagccaaaacccatcaaaacaaagatggcaacaaaagtgacctctggtcatcctcactgctcattatacaataattataa

SEQ ID NO: 17760 - DNA, 1805 bp, Homo sapiens
tgcatcaagcaactctacatgtaggcattttctaatctactttctgaccaacatgctattccctcctctagaaggttggatggaggaacataactgaatgtgttaacaggaagtacgagctgagcaaacaataactggatgcaaagccggactttgccagccggccagcatgtggggcctggctcatgggactaaggaccaggagggctgacccgaggtcaamtgggtgctgcacactaatactagtgcctttggataccttctcttgcagaagtcctgcagagccaaatatttctcaggtctacttcatcagttatcagccgttcagcaggcggccacgagcgcaggttttgggactatcagagcttcatgggggaaatgccaaggaaattacagtgctctcaaatctctcccacaaccaacatcagcacacactggagaacgtgtgcctttcatatctattacaatatcaagtaagagataaaaagtaagaccaaacccactagtcaaatatccttgctgaaccttcaaagaccattcataggacatcaaaaatggctattcttccaaaatattcaggtttcctgaaaggcatggcagcaggagaacacatttaacagtgaattctttaacaatataaagagcagtaacagaagaaaacattgactgtggcctagcacttttcacatacgctgtcctttactcttcaaaatggcattttgaattgagcagagttggtattattatcaagatgccttcttttgataaaagggctttctcctgatcaaaacaaatctgaaaatagaaggtacaaacttcataaaattgaaaaatgtcaattattaagaaaatgttaaatgctaatgtatttgtttcatttatttttaaaactgaaatgagagcttgaacaaaggaatataagcgtgcaactaaatgcagggtgttcttgcacatgaccatcgtaaaaacactttgaaatttgaacatctctttgcagagattcaggtatttaccatatgtttgaccaataaccatgaacacaagtctaattttaaaaagaaaaagagacctgaccttttagagaggtggtaaacttctggattgccatataaaccagtaaatgcgttgaacagagacaatttactttgataacagctgtttctccaggagaatttattttaaaactgcctggctttcaaaaatctgcctttctgttttaagactgaaaaaggtgcctttaccagaactttcaagtgtttcagtgtgggttcaggttcaggtgaagaaccagtttgagggagctaggttttcattttatctgtaccagttcatacaacctactgaacaaagaattataggcaggtgatatctgagtcttctacaagatgtgtgtggggatccagaattcacctcaaagggactctccaggttggcttgccttatggaaatatctatagcttcaggctctactggagtccttttattagaattatttactgctgcaaaatcaggaagtcttatatcaccagcagacaatttgattgtcagaggtgttcaaaccagagcgactccatcttgaacaggtgctgggtacaatgaggctgagacctgctgggctgcattcccaggaggttaggcattctaagtcacaggataggataggaggtcagcacaagatacaggtcacaaagaccttgctgaaaacacaggttgcagtaaagaagccagccaaaacccatcaaaacaaagatggcaacaaaagtgacctctggtcatcctcactgctcattatacaataattataa

SEQ ID NO: 17761 - DNA, 1805 bp, Homo sapiens
tgcatcaagcaactctacatgtaggcattttctaatctactttctgaccaacatgctattccctcctctagaaggttggatggaggaacataactgaatgtgttaacaggaagtacgagctgagcaaacaataactggatgcaaagccggactttgccagccggccagcatgtggggcctggctcatgggactaaggaccaggagggctgacccgaggtcaaatgggtgctgcacactaatactagtgcctttggataccttctcttgcagaagtcctgcagagccaaatatttctcaggtctayttcatcagttatcagccgttcagcaggcggccacgagcgcaggttttgggactatcagagcttcatgggggaaatgccaaggaaattacagtgctctcaaatctctcccacaaccaacatcagcacacactggagaacgtgtgcctttcatatctattacaatatcaagtaagagataaaaagtaagaccaaacccactagtcaaatatccttgctgaaccttcaaagaccattcataggacatcaaaaatggctattcttccaaaatattcaggtttcctgaaaggcatggcagcaggagaacacatttaacagtgaattctttaacaatataaagagcagtaacagaagaaaacattgactgtggcctagcacttttcacatacgctgtcctttactcttcaaaatggcattttgaattgagcagagttggtattattatcaagatgccttcttttgataaaagggctttctcctgatcaaaacaaatctgaaaatagaaggtacaaacttcataaaattgaaaaatgtcaattattaagaaaatgttaaatgctaatgtatttgtttcatttatttttaaaactgaaatgagagcttgaacaaaggaatataagcgtgcaactaaatgcagggtgttcttgcacatgaccatcgtaaaaacactttgaaatttgaacatctctttgcagagattcaggtatttaccatatgtttgaccaataaccatgaacacaagtctaattttaaaaagaaaaagagacctgaccttttagagaggtggtaaacttctggattgccatataaaccagtaaatgcgttgaacagagacaatttactttgataacagctgtttctccaggagaatttattttaaaactgcctggctttcaaaaatctgcctttctgttttaagactgaaaaaggtgcctttaccagaactttcaagtgtttcagtgtgggttcaggttcaggtgaagaaccagtttgagggagctaggttttcattttatctgtaccagttcatacaacctactgaacaaagaattataggcaggtgatatctgagtcttctacaagatgtgtgtggggatccagaattcacctcaaagggactctccaggttggcttgccttatggaaatatctatagcttcaggctctactggagtccttttattagaattatttactgctgcaaaatcaggaagtcttatatcaccagcagacaatttgattgtcagaggtgttcaaaccagagcgactccatcttgaacaggtgctgggtacaatgaggctgagacctgctgggctgcattcccaggaggttaggcattctaagtcacaggataggataggaggtcagcacaagatacaggtcacaaagaccttgctgaaaacacaggttgcagtaaagaagccagccaaaacccatcaaaacaaagatggcaacaaaagtgacctctggtcatcctcactgctcattatacaataattataa

SEQ ID NO: 17762 - DNA, 1805 bp, Homo sapiens
tgcatcaagcaactctacatgtaggcattttctaatctactttctgaccaacatgctattccctcctctagaaggttggatggaggaacataactgaatgtgttaacaggaagtacgagctgagcaaacaataactggatgcaaagccggactttgccagccggccagcatgtggggcctggctcatgggactaaggaccaggagggctgacccgaggtcaaatgggtgctgcacactaatactagtgcctttggataccttctcttgcagaagtcctgcagagccaaatatttctcaggtctacttcatcagttatcagccgttcagcaggcggccacgagcgcaggttttgggactatcagagcttcatgggggaaatgccaaggaaattacagtgctctcaaatctctcccacaaccaacatcagcacacactggagaacgtgtgcctttcatatctattacaatatcaagtaagagataaaaagtaagaccaaacccactagtcaaatatccttgctgaaccttcaaagaccattcataggacatcaaaaatggctattcttccaaaatattcaggtttcctgaaaggcatggcagcaggagaacacatttaacagtgaattctttaacaatataaagagcagtaacagaagaaaacattgactgtggcctagcacttttcacatacgctgtcctttactcttcaaaatggcattttgaattgagcagagttggtattattatcaagatgccttcttttgataaaagggctttctcctgatcaaaacaaatctgaaaatagaaggtacaaacttcataaaattgaaaaatgtcaattattaagaaaatgttaaatgctaatgtatttgtttcatttatttttaaaactgaaatgagagcttgaacaaaggaatataagcgtgcaactaaatgcagggtgttcttgcacatgaccatcgtaaaaacactttgaaatttgaacatctctttgcagagattcaggtatttaccatatgtttgaccaataaccatgaacacaagtctaattttaaaaagaaaaagagacctgaccttttagagaggtggtaaacttctggattgccatataaaccagtaaatgcgttgaacagagacaatttactttgataacagctgtttctccaggagaatttattttaaaactgcctggctttcaaaaatctgcctttctgttttaagactgaaaaaggtgcctttaccaraactttcaagtgtttcagtgtgggttcaggttcaggtgaagaaccagtttgagggagctaggttttcattttatctgtaccagttcatacaacctactgaacaaagaattataggcaggtgatatctgagtcttctacaagatgtgtgtggggatccagaattcacctcaaagggactctccaggttggcttgccttatggaaatatctatagcttcaggctctactggagtccttttattagaattatttactgctgcaaaatcaggaagtcttatatcaccagcagacaatttgattgtcagaggtgttcaaaccagagcgactccatcttgaacaggtgctgggtacaatgaggctgagacctgctgggctgcattcccaggaggttaggcattctaagtcacaggataggataggaggtcagcacaagatacaggtcacaaagaccttgctgaaaacacaggttgcagtaaagaagccagccaaaacccatcaaaacaaagatggcaacaaaagtgacctctggtcatcctcactgctcattatacaataattataa

SEQ ID NO: 17763 - DNA, 570 bp, Homo sapiens
attgctaagattcacaatataagacaagcaaaaaagaaataaagtaaatcacagtgataaaactatgcacaaacatcttggacatgtcttgggttcactatatatgagatacaaacttctactgctatttcatttgctggcaggcataagaatccatytacagaatgatgaccctgaagcactatcacattatgaaatagcccatcatcttcacttcaatgaacttaatgaagcaagaagatggaataatttattttagagagatttatagccacaagagctggaccaaaattggttttcttcttaaaacccactagagttctcttctagatcagtggtcaataaccttttatttttatattttcatccatcttctctgatgaaagctatgggttctctcactgaaaaatacacacatacaaatgcaacccctttaccattgccggagatccagagctcctcttgttgccatccttacactgctcacactaccaagaacctcgtataccaaaggagagtcaggtgggctctccagatttagacagagagcttcatgttaagcacctgtga

SEQ ID NO: 17764 - DNA, 506 bp, Homo sapiens
atacacayacacacacacacacacacacacacacacacattttttttttagtagatacagggtttcaccatgttgaccaggctggtctcaaactcctgacctcaggttatccactcatctcagcctcccaaggtgctgggattataggtgtgagccaccatgcctggcctcctggctggatttttaatcaattaaaaaaatgtttcaagggttttttttttaaagagtttaaacttttcattttattttgttttactttacgtgccaggatccatgtgcagaacgtgcaggtttgttacataggtatacatgtgccatggtggtttgctgcacctattgacccatcctctaagttccctcccttcacccctcacccaacaacaggccctggtgtgtgatggtcccctccctgtgtccacatgttctcattgttcaactcccacttatgggtgagaacatgtgatgtttagttttctgttcctgggttagtttgctgaggatgatgg

SEQ ID NO: 17765 - DNA, 2023 bp, Homo sapiens
tggtctttgaagattggaagaaatttagatttggataccagctaacattgagttcttactacattgcaggctctgttctagtgcttcacaagtattaactcgtttgttcctcccaacaactatgaagtaggtactattactgttcccactttacaggtgatttgaccaaggtggaggcaggatttgaacacaggtggtctaagattttagccactcttctctgctgcatccctggacgtagtaatgatggagcaaaggaatgtccaggacacagaaaactcaggaggccacgtagaatccagcatgtctaaagtggtgtatgctcactgcagaaagtgtgtgtaggtgggataggacaggcaggaggtgttaaaggaatgataaatggaaagaataaaggatatgttgtgggtgagtttgctcaataaaaatctctacaggtcctaggtttgggttattactactccttcgggaaaaagaggtggccctcgtctaaaaggagacaatcagacagtatgttcttgtgaatgttcaacccacttttctccattgctcacattccaatcacattctggctacaaaagataaaacagggatgggattcacttttatctttctgagaagctctaagtacagaggaaaaaaatttgacctctggcaagtcatgccaaaattgagagggaaaaaaatcaagatgatagggccacagcgtctaggtgagaaaagcctctgatagaacattagctcatctagtttcccactgagattccaactcatctgaaaaacggtatgttcactctaatggtagctactgtatatttttttaaatgcatgaaagtgggaattagccaggcgtggtggcgcatgcctgtaatcccagctacttgggaggctgagacaggagaatcgcttgaacccaggaggggcaggttgcagtgagccaagatcatgccactgcactccagcgtgggcaagagagcacgactccatctcaaagaaaaattaaaaataaatgcatgaaagtgggcaaagtctggaaggggttatataaaatgaaaataaatttcataacatggaaatagtcatgttatcaatgttttctttagcatcgttacattgtcctttcaataagaggggaaataatttcagttagctctctggacacagaactcaacctgctcagtgtaaaaatcgcatttgccatgttacccaaagcagctaatcaatgagcagccactgcattgccggctcttcctgcaaaagctcaagctactcccttcaatctcttctgggcatttccattaaggccctgatgagcattaggagcacttagcctcaagcctgtttttctagaaggaggagagggtgattcagctttgctccctgcagggaggactctgctctgtcctgccccactctgggatgggtcgccacagtgagtcagtccacagagccaggagtcttggtcatattacaaatttacaaattaaaatttcccttcaatgatgtgatttaaagcaccatagaaagtagcaaattacatagaaaatgtggtcactggcatacaaagtttacggtctcgtggaataagacttcatttcaaagcaacaatacttgacaatayatatgagttaaaagaatatcagtgagtggtaaatgctggtgttagctctgcaggtagagggttgtgtgaaagaaggattcacgcgagaaagaacagagagaaaaatccactatgggcagggcagtgttgggaggacaaggcgtctggcctggggagttcatctggcctagggaggtacttcagctgaggaattcgaggctgcagtgaactatgatggcaccactgcagtgaactatgatggcaccactgcactccagcctaagtgacagagcaagaccctgtctcaaaaaatacaaaaaacaaatttaataaagttataatgtttaacgtaattcatagcttttaaaatatttttaagaacttttctatttgagtaaacaagcattgttttagtaatta

SEQ ID NO: 17766 - DNA, 2023 bp, Homo sapiens
tggtctttgaagattggaagaaatttagatttggataccagctaacattgagttcttactacattgcaggctctgttctagtgcttcacaagtattaactcgtttgttcctcccaacaactatgaagtaggtactattactgttcccactttacaggtgatttgaccaaggtggaggcaggatttgaacacaggtggtctaagattttagccactcttctctgctgcatccctggacgtagtaatgatggagcaaaggaatgtccaggacacagaaaactcaggaggccacgtagaatccagcatgtctaaagtggtgtatgctcactgcagaaagtgtgtgtaggtgggataggacaggcaggaggtgttaaaggaatgataaatggaaagaataaaggatatgttgtgggtgagtttgctcaataaaaatctctacaggtcctaggtttgggttattactactccttcgggaaaaagaggtggccctcgtctaaaaggagacaatcagacagtatgttcttgtgaatgttcaacccacttttctccattgctcacattccaatcacattctggctacaaaagataaaacagggatgggattcacttttatctttctgagaagctctaagtacagaggaaaaaaatttgacctctggcaagtcatgccaaaattgagagggaaaaaaatcaagatgatagggccacagcgtctaggtgagaaaagcctctgatagaacattagctcatctagtttcccactgagattccaactcatctgaaaaacggtatgttcactctaatggtagctactgtatatttttttaaatgcatgaaagtgggaattagccaggcgtggtggcgcatgcctgtaatcccagctacttgggaggctgagacaggagaatcgcttgaacccaggaggggcaggttgcagtgagccaagatcatgccactgcactccagcgtgggcaagagagcacgactccatctcaaagaaaaattaaaaataaatgcatgaaagtgggcaaagtctggaaggggttatataaaatgaaaataaatttcataacatggaaatagtcatgttatcaatgttttctttagcatcgttacattgtcctttcaataagaggggaaataatttcagttagctctctggacacagaactcaacctgctcagtgtaaaaatcgcatttgccatgttacccaaagcagctaatcaatgagcagccactgcattgccggctcttcctgcaaaagctcaagctactcccttcaatctcttctgggcatttccattaaggccctgatgagcattaggagcacttagcctcaagcctgtttttctagaaggaggagagggtgattcagctttgctccctgcagggaggactctgctctgtcctgccccactctgggatgggtcgccacagtgagtcagtccacagagccaggagtcttggtcatattacaaatttacaaattaaaatttcccttcaatgatgtgatttaaagcaccatagaaagtagcaaattacatagaaaatgtggtcactggcatacaaagtttacggtctcgtggaataagacttcatttcaaagcaacaatacttgacaatacatatgagttaaaagaatatcagtgagtggtaaatgctggtgttagctctgcaggtagagggttgtgtgaaagaaggattcacgcgagaaagaacagagagaaaaatccactatgggcagggcagtgttgggaggacaaggcgtctggcctggggagttcatctggcctagggagktacttcagctgaggaattcgaggctgcagtgaactatgatggcaccactgcagtgaactatgatggcaccactgcactccagcctaagtgacagagcaagaccctgtctcaaaaaatacaaaaaacaaatttaataaagttataatgtttaacgtaattcatagcttttaaaatatttttaagaacttttctatttgagtaaacaagcattgttttagtaatta

SEQ ID NO: 17767 - DNA, 2023 bp, Homo sapiens
tggtctttgaagattggaagaaatttagatttggataccagctaacattgagttcttactacattgcaggctctgttctagtgcttcacaagtattaactcgtttgttcctcccaacaactatgaagtaggtactattactgttcccactttacaggtgatttgaccaaggtggaggcaggatttgaacacaggtggtctaagattttagccactcttctctgctgcatccctggacgtagtaatgatggagcaaaggaatgtccaggacacagaaaactcaggaggccacgtagaatccagcatgtctaaagtggtgtatgctcactgcagaaagtgtgtgtaggtgggataggacaggcaggaggtgttaaaggaatgataaatggaaagaataaaggatatgttgtgggtgagtttgctcaataaaaatctctacaggtcctaggtttgggttattactactccttcgggaaaaagaggtggccctcgtctaaaaggagacaatcagacagtatgttcttgtgaatgttcaacccacttttctccattgctcacattccaatcacattctggctacaaaagataaaacagggatgggattcacttttatctttctgagaagctctaagtacagaggaaaaaaatttgacctctggcaagtcatgccaaaattgagagggaaaaaaatcaagatgatagggccacagcgtctaggtgagaaaagcctctgatagaacattagctcatctagtttcccactgagattccaactcatctgaaaaacggtatgttcactctaatggtagctactgtatatttttttaaatgcatgaaagtgggaattagccaggcgtggtggcgcatgcctgtaatcccagctacttgggaggctgagacaggagaatcgcttgaacccaggaggggcaggttgcagtgagccaagatcatgccactgcactccagcgtgggcaagagagcacgactccatctcaaagaaaaattaaaaataaatgcatgaaagtgggcaaagtctggaaggggttatataaaatgaaaataaatttcataacatggaaatagtcatgttatcaatgttttctttagcatcgttacattgtcctttcaataagaggggaaataatttcagttagctctctggacacagaactcaacctgctcagtgtaaaaatcgcatttgccatgttacccaaagcagctaatcaatgagcagccactgcattgccggctcttcctgcaaaagctcaagctactcccttcaatctcttctgggcatttccattaaggccctgatgagcattaggagcacttagcctcaagcctgtttttctagaaggaggagagggtgattcagctttgctccctgcagggaggactctgctctgtcctgccccactctgggatgggtcgccacagtgagtcagtccacagagccaggagtcttggtcatattacaaatttacaaattaaaatttcccttcaatgatgtgatttaaagcaccatagaaagtagcaaattacatagaaaatgtggtcactggcatacaaagtttacggtctcgtggaataagacttcatttcaaagcaacaatacttgacaatacatatgagttaaaagaatatcagtgagtggtaaatgctggtgttagctctgcaggtagagggttgtgtgaaagaaggattcacgcgagaaagaacagagagaaaaatccactatgggcagggcagtgttgggaggacaaggcgtctggcctggggagttcatctggcctagggaggtacttcagctgaggaattcgaggctgcagtgaactatgatggcaccrctgcagtgaactatgatggcaccactgcactccagcctaagtgacagagcaagaccctgtctcaaaaaatacaaaaaacaaatttaataaagttataatgtttaacgtaattcatagcttttaaaatatttttaagaacttttctatttgagtaaacaagcattgttttagtaatta

SEQ ID NO: 17768 - DNA, 633 bp, Homo sapiens
tgagggtaaaacaaggaacaagatgagaatgccccactcccatatggcacatgtaaaagcataaaagtctatctgaatcatttttgaaacagaaggcccatgacattgcctgctgagtccacattggctcttgtttgtggataccagcacatattaaaattatctgaaatattcagttgtgagccccctcccctgatatggttaggcttmgcgtccccacccagatctcatcttgaattgtaatccccataatccccataatccctatttgtcaaaggagagaccaggtggaggtaattgaatcatggggatggtttcccccatgctgttctcatgatagtgagtgagttctcccaagatcggatggttttataaggggcttcttcccctttgcttagcacttctcctttctgccaccttgtgtagaaggtgccttgcttccccttcaccttccaccatgattgtaagtttcctgaggcctccccagccatgctgaactgtgagtcaattaaacctctttcttttataaattacccagtctcaggcagttctttattacagtatgaaaatggactaatacagtgagaaaaaaaatagctctggagggctgggttacattcaggacatgtacta

SEQ ID NO: 17769 - DNA, 633 bp, Homo sapiens
tgagggtaaaacaaggaacaagatgagaatgccccactcccatatggcacatgtaaaagcataaaagtctatctgaatcatttttgaaacagaaggcccatgacattgcctgctgagtccacattggctcttgtttgtggataccagcacatattaaaattatctgaaatattcagttgtgagccccctcccctgatatggttaggcttcgcgtccccacccagatctcatcttgaattgtaatccccataatccccataatccctatttgtcaaaggagagaccaggtggaggtaattgaatcatggggatggtttcccccatgctgttctcatgatagtgagtgagttctcccaagatcggatggttttataaggggcttcttcccctttgcttagcacttctcctttctgccaccttgtgtagaaggtgccttgcttccccttcaccttccaccatgattgtaagtttcctgaggcctccccagccrtgctgaactgtgagtcaattaaacctctttcttttataaattacccagtctcaggcagttctttattacagtatgaaaatggactaatacagtgagaaaaaaaatagctctggagggctgggttacattcaggacatgtacta

SEQ ID NO: 17770 - DNA, 590 bp, Homo sapiens
tttatcccagtggattccgccgaccacgtatccaaagcctcctccgagacctggggaaagagacagggtttgagttcccttctgcgggaggagaagccccaaacgcggtggccccgttcttagaaggacatgaaggtagccaaggccattccagggacgtgggcacagaacctgttccacctaaaccccaacaaaatgggacaggattcccagggcgggccccttgaggaggtccccctcctgtcctgcacagccacctgcagggccyttcctggtgtgacccccggcagcagcacagtgaccacctgcctacatccccttccacttcctgcctgttccactttccccgtaacctttcaggcccctggagcgaatgttgacaccgggcacatcctccctccgagggcccctccagctcagggccgaccccatggctcacacacagccgaccacatgtgtgcatgcgggtgtttgtccccatgcacagaacaccatgaggagagccgccccctgtggtgaccacagatgggtcctgcctccccacaccctggcaggcagctctccgatctctgagctatcagcctacagca

SEQ ID NO: 17771 - DNA, 590 bp, Homo sapiens
tttatcccagtggattccgccgaccacgtatccaaagcctcctccgagacctggggaaagagacagggtttgagttcccttctgcgggaggagaagccccaaacgcggtggccccgttcttagaaggacatgaaggtagccaaggccattccagggacgtgggcacagaacctgttccacctaaaccccaacaaaatgggacaggattcccagggcgggccccttgaggaggtccccctcctgtcctgcacagccacctgcagggcccttcctggtgtgacccccggcagcagcacagtgaccacctgccyacatccccttccacttcctgcctgttccactttccccgtaacctttcaggcccctggagcgaatgttgacaccgggcacatcctccctccgagggcccctccagctcagggccgaccccatggctcacacacagccgaccacatgtgtgcatgcgggtgtttgtccccatgcacagaacaccatgaggagagccgccccctgtggtgaccacagatgggtcctgcctccccacaccctggcaggcagctctccgatctctgagctatcagcctacagca

SEQ ID NO: 17772 - DNA, 590 bp, Homo sapiens
tttatcccagtggattccgccgaccacgtatccaaagcctcctccgagacctggggaaagagacagggtttgagttcccttctgcgggaggagaagccccaaacgcggtggccccgttcttagaaggacatgaaggtagccaaggccattccagggacgtgggcacagaacctgttccacctaaaccccaacaaaatgggacaggattcccagggcgggccccttgaggaggtccccctcctgtcctgcacagccacctgcagggcccttcctggtgtgacccccggcagcagcacagtgaccacctgcctacatccccttccacttcctgcctgttccactttccccgtaacctttcaggcccctggagcgaatgytgacaccgggcacatcctccctccgagggcccctccagctcagggccgaccccatggctcacacacagccgaccacatgtgtgcatgcgggtgtttgtccccatgcacagaacaccatgaggagagccgccccctgtggtgaccacagatgggtcctgcctccccacaccctggcaggcagctctccgatctctgagctatcagcctacagca

SEQ ID NO: 17773 - DNA, 590 bp, Homo sapiens
tttatcccagtggattccgccgaccacgtatccaaagcctcctccgagacctggggaaagagacagggtttgagttcccttctgcgggaggagaagccccaaacgcggtggccccgttcttagaaggacatgaaggtagccaaggccattccagggacgtgggcacagaacctgttccacctaaaccccaacaaaatgggacaggattcccagggcgggccccttgaggaggtccccctcctgtcctgcacagccacctgcagggcccttcctggtgtgacccccggcagcagcacagtgaccacctgcctacatccccttccacttcctgcctgttccactttccccgtaacctttcaggcccctggagcgaatgttgacaccgggcacatcctccctccgagggcccctccagctcagggccgaccccatggctcacacacagccgaccacaygtgtgcatgcgggtgtttgtccccatgcacagaacaccatgaggagagccgccccctgtggtgaccacagatgggtcctgcctccccacaccctggcaggcagctctccgatctctgagctatcagcctacagca

SEQ ID NO: 17774 - DNA, 381 bp, Homo sapiens
ttctgttttcccaaacacaccttcctaagtatgacgacatctgagtatgacacttagtcacgctgtataaagtttacagagttattaaatagaaaacaatataaaattttaatttttaaccacagtaattgggaagtctaagtcactgggatataataatctgttataaaaatgtctggcttttactgagacatcattctttaaattcattttattgctcacttgcttaaatcctgcatttcataacaggttggatttgagtcttttttgagacactgtaggtgacatgtatcctatctgaaagtcccttcttggagaagctcagctgtccataacacaacaaagaattaagaagtrggctgaaaagatctccctgaataa

SEQ ID NO: 17775 - DNA, 597 bp, Homo sapiens
cttgtgaagctacccttctcactcacaggaagatagcacaggaattgtggctgctctgactgtatttctccccttcaaaagaggtttcattggaaatgatgtcatgacatggactgagaagatagactagctgctttctcctctatgcccaggagggtgcccttcrcatgaagaacccttttcaatcattccagactgaccaaaatctatgcaagtggtaagattgtttaaacttccctttgctggaagttcacctcaagtgtctcattctctaaggttctcaaggcagaggtcttatcttggttgttgttggtccccagttattaaagtgcaattattacttcaaaaacaactggagaaaagcctcaatacgtgatggtagtgagagttcaatggcatgccacaccagttcctggtgaagtttatgagaagtcaagaaattggtgcacttggagaagagtatttgggggagaaagaataggatatgcaaatgtcttgggggtaggaaacatggaaaaatgcatggaagaaattaggtatgaatatgtgtgtcaattacagagaaacactgttgggtacagctctcctacctccaca

SEQ ID NO: 17776 - DNA, 597 bp, Homo sapiens
cttgtgaagctacccttctcactcacaggaagatagcacaggaattgtggctgctctgactgtatttctccccttcaaaagaggtttcattggaaatgatgtcatgacatggactgagaagatagactagctgctttctcctctatgcccaggagggtgcccttcacatgaagaacccttttcaatcattccagactgaccaaaatctatgcaagtggtaagattgtttaaacttccctttgctggaagttcacctcaagtgtctcattctctaaggttctcaaggcagaggtcttatcttggttgttgttggtccccagttattaaagtgcaattattacttcaaaaacaactggagaaaagcctcaatacgtgatggtagtgagagttcaatggcatgccacamcagttcctggtgaagtttatgagaagtcaagaaattggtgcacttggagaagagtatttgggggagaaagaataggatatgcaaatgtcttgggggtaggaaacatggaaaaatgcatggaagaaattaggtatgaatatgtgtgtcaattacagagaaacactgttgggtacagctctcctacctccaca

SEQ ID NO: 17777 - DNA, 602 bp, Homo sapiens
aaaggacatcaaagcaagaaaagatgagcaaagacctatagcaagaaagatcatagctagatcattgagaactgaacattgtcctgggattatgagaggctttgcaaggtaagctcaggagcataactttttattggaarcagtagagtatcattaaatgattataagaatagtaagaaaatgaaaaacaatgaaaaagcagacagtattgttttactattccatagttaataataatagtaatcacttgcacaattttaataatatatggattatttttaaaataatcatctattatcaaatatatagattattctccttaatgaaggcaaatattacttaaatactttaaatgaattaatttatttaatattttccctatttttacagatgaagaaacagtcatagagaagttaagtgacccctgaaggtcacatagtgtgttggtttgctcttgcattgctataaaggaattcctgggactgagtaatttacaaagaaaagtagtttagttggctcacggttctgtaggctgtacatgaagcatggtatcagagcatctgcttctggcgagggattcaggaagcttaccatcatgttgg

SEQ ID NO: 17778 - DNA, 539 bp, Homo sapiens
aagacaccttaaagaaagtaaacagatgaaccacagagtgggtgaagatatttataacttatcaacaaaaaattaatgtccagaatacttagcttttctaaacttaaacaratttactgctgcttctctgtgacttcatatctgtagtcacctgttgttagatttatcttgggatccccagccctacctgaagttgattgatcctgcaaatttaaagtgaattattacagaaataattctgtactaggcctctattaaatcagattgtcatctataaaatccacttttactcataatttgatgtatcaagccacctcttttagggaacccaatagaaagatacacctttctagtactctgtttctatactattcaataatattttcctaacaatattcctgtaataattcaaattcacatatttcttacattgaactatagttaataacagaggagaaattctgttgacatctaaaagtgataaaaattattagttgcagccacatgtttagatttattttttaatgtacagtacctat

SEQ ID NO: 17779 - DNA, 543 bp, Homo sapiens
gtattaaccagagatacagaagcactagccactcagaaatgttgtgacaccagagacatgacacagagcaggatctgcaggtcctctgcatctgcttactggattgtggggaggttccagggtgggggccgggcagccagtgcagcagggctgtgcttgagaagctaagagcagcagccagttaccaaccggytcagaaggctttcaacagttgaagagccagagtggccacaccagctagaaatcagcctggctctccaaccacttctgagcaggctgaccttctggcagaggctgcagccccgttcctgcaagccacattttatggagttcttttattagtctctcatgtaacccatagccacatcataaaattaaacaccccattctgtacatcaagtccactgacttcttgagccctgattagcactgggcttttccctctgggagttctattaaagtaacattgtaacggacagaaaaggagtctttgctaggagcagccaaatccgcagactgactgagcttctgctggagtcacca

SEQ ID NO: 17780 - DNA, 543 bp, Homo sapiens
gtattaaccagagatacagaagcactagccactcagaaatgttgtgacaccagagacatgacacagagcaggatctgcaggtcctctgcatctgcttactggattgtggggaggttccagggtgggggccgggcagccagtgcagcagggctgtgcttgagaagctaagagcagcagccagttaccaaccggttcagaaggctttcaacagttgaagagccagagtggccacaccagctagaaatcagcctggctctccaaccacttctgagcaggctgaccttctggcagaggctgcagccccgttcctgcaagccacattttatggagttcttttattagtctctcatgtaacccatagccacatcataaaattaaacaccccattctgtacatcaagtccactgacttcttgagccctgattagcactgggcttttccctctgggagttctattaaagtaacattrtaacggacagaaaaggagtctttgctaggagcagccaaatccgcagactgactgagcttctgctggagtcacca

SEQ ID NO: 17781 - DNA, 590 bp, Homo sapiens
agaccactactatttgattttcaaggtggaacgcctcagtccacctcagaataccaagggctgagcttgaaaagctccaggacctatttctaaactattcaagaaagaccgtgcactttccctcagggcacaggagtaactttccttaacatcgtccctcctttccactcactaaatcttccctgttattgtttatatccatggcctcttggttgaccttccttatagaacaatcgattagaatattttttcaaaacaactgaatactcgctagttacgattagagggaacctaggtcccagtgtgaaccaaggccaagaagcctccgggggtggggagggactcgmtctgtagggaaggagacccgccaggccctaccccagtcaaacagtcctgctctttggaggggaagagcagttcattctgagcgtccctcggccagacatatccgagttctgtgaagagcagcaggaccaaaagggaaattgggaaagaccatcttgctgaggtctttcaggaaatcagagcacagatggtagagctttgggactgaaagctcacacagagggaagagggttgaataatctttt

SEQ ID NO: 17782 - DNA, 532 bp, Homo sapiens
ccctctccaccaagctcaggataccatctagtttcacatttcccggcatcatctgctgctgcctgaacccgaactcaccattggaggctttggcatcaataatcccrggggagggctctgactggccccgtttggcccagatagtaatccttggaccaatcagtgaggcccaggcaggagggggtctcccacaggcccggcttgtcttcagtctctggcacggagggtggggtcacgtgacaacacggaagtagccctcgcccccgcaatgaggcagtgtggtgggtggggagatggtttttcagaggaagggaggatttggactggccagaaaaaaaaattgcggtctacctaccctgcccagcctgtgagaatcacacaggcccagcagaggggaagtaagtgaggcagaagcttgagggatgggaagcaacaagaaagggctgggttggcggtgagtgcgtggagggtgtcaggaagacagtgcagtgtgttgcgaggaggagagtcagtgaaggccgaaggtgggggg

SEQ ID NO: 17783 - DNA, 532 bp, Homo sapiens
ccctctccaccaagctcaggataccatctagtttcacatttcccggcatcatctgctgctgcctgaacccgaactcaccattggaggctttggcatcaataatcccaggggagggctctgactggccccgtttggcccagatagtaatccttggaccaatcagtgaggcccaggcaggagggggtctcccacaggcccggcttgtcttcagtctctggcacggagggtggggtcacgtgacaacacggaagtagccctcgcccccgcaatgaggcagtgtggtgggtggggagatggtttttcagaggaagggaggattyggactggccagaaaaaaaaattgcggtctacctaccctgcccagcctgtgagaatcacacaggcccagcagaggggaagtaagtgaggcagaagcttgagggatgggaagcaacaagaaagggctgggttggcggtgagtgcgtggagggtgtcaggaagacagtgcagtgtgttgcgaggaggagagtcagtgaaggccgaaggtgggggg

SEQ ID NO: 17784 - DNA, 532 bp, Homo sapiens
ccctctccaccaagctcaggataccatctagtttcacatttcccggcatcatctgctgctgcctgaacccgaactcaccattggaggctttggcatcaataatcccaggggagggctctgactggccccgtttggcccagatagtaatccttggaccaatcagtgaggcccaggcaggagggggtctcccacaggcccggcttgtcttcagtctctggcacggagggtggggtcacgtgacaacacggaagtagccctcgcccccgcaatgaggcagtgtggtgggtggggagatggtttttcagaggaagggaggatttggactggccagaaaaaaaaattgcggtctacctaccctgcccagcctgtgagaatcacacaggcccagcagaggggaagtaagtgaggcagaagcttgagggatgggaagcaacaagaaagggctgsgttggcggtgagtgcgtggagggtgtcaggaagacagtgcagtgtgttgcgaggaggagagtcagtgaaggccgaaggtgggggg

SEQ ID NO: 17785 - DNA, 528 bp, Homo sapiens
atttaggaaactggtgcactgggactttatccaaacaaacacataatggggaagagactattaagattttcccaaagttcattgttagagatggttgtcaagaagacttctgaggtcagcagcagaagtcaaccttgttcagttatttgtggggtaattctctatccagacattttttaaaaagcagggctaataaaaatggattctgctctatctaccctttgcttggtttcaacccttggattagtttttactcaggaccatgaacttgaacatcagagggtccacatcattaaggactcacagtgagccagtgattgattgtaaaaacattccttccagagtgactgccaaggagtagaactattagctgcatcaccccaaggcacatcaagcattgtgtctgtaacctgcatctcaccrcagtcccaaaagaactcaatattctttatggccaactacaaagtgaaatcaactgggattcctgacacatgaattacaacatagagaaagtcacagaagggcgcc

SEQ ID NO: 17786 - DNA, 592 bp, Homo sapiens
tcaccagtctagttttaggctaatggctttagggagcaaaacaattttggtgggggaggggaacccagaaaagtgaagaaattgggaaagtcaggacaggagccccartgaaacatatcaacaattttggcttcaggagtttgactgaaagggatagggtttaaaataaagacttccctggctttccagtttgctgtaggcagcccctaaaatggtcccaatgagccttgactcctaggacccaagctcttgtgtagttgtcttcccttgagtgtgaactggacctagtggctcttttgtaacaaataaaatacagcaatagtgactgcatgtcacttctgagattccgttatgtccatccttagctgccttccctcgctctcttgctcactcaatccagagacatccagtggtcacattgtgcactgtcctgcagagtgtcccatgtggctgggaatccaggccctcagtccaacagtccacaaggaaatgaatgcagccaacaaccaggtgagtgagcttggaagagtatcctctcctgattaaaccttgagatgacagcagccctggccaccattttgatttcagcctt

SEQ ID NO: 17787 - DNA, 551 bp, Homo sapiens
agtaaaaagcgaccctactcaacagtttgaaacagttttcagagatattcttggaattcagtttcattttacatttcactatgttttgaaattgtctcctattaaagaaactcattaaagacatctcttttctctgcactgtggttcaaatgaactcactgaaggtaaagttaaaatctgaaggaatctgaagtgacagagacatctaaatatttagctaggtaaatactgtcttattcccttcctaaatcaaatagaatttccatgttgcatctgcaggtgcaaacatggaaaaaggtgaaatcccagatggtatgtcctggactgaggaaaactcatataatctaacagatatcacatcagtgaacacatttgatttagctaatttatttattttcagcttttattttagatttgggggktacatgtgcaggtttgttacctgggtgtattttatgatcctgaggtttgggatactaatgatcttgttacccaagtcctgagcatagtacccaacagttttgtttttcaaaccttgcctcccactgtcc

SEQ ID NO: 17788 - DNA, 648 bp, Homo sapiens
cttgggatatttattcgttgatgcctgccagcagtttgaattcaaggaggcccaaacaggactccttatcttatcaatcaaacctactcttttttctttcaatgtcaaagcatttgactcccctccatctctttttccctcatgttcaattcattgtcaaacactcattccatgttgcaccctgggacctctcctgttgatcatcccatggccattcccatggccacaatggcagttcttcctctcaatgtatctcaaggactataccaatggttctggtttccagccactctctgaactgctggttattggcctcttcaatccaacatatgctgagcctccagatcaattgtcttgatactccttatgaccaggctattcctatgtttacaaaacctcaggagttctctcatccctgtagaccaaagcccaaaatctttagtcctgaacataacacagcmtttgtactgtgacgcagcacaactttctacttactctccttcatggatcctgtaactctagccagactccgttttgcatcagatacaccagaattttcctctcctattactggcttgtgtagttctctttctgaaacgaacctagcccaagttccatatgttcaaatccaaagcacttctcaaggtt

SEQ ID NO: 17789 - DNA, 606 bp, Homo sapiens
gcatgtgcctcattttgctctcttttccctctgcagtaaggccagtgatatcttacatatgacggctctgtcaacttggatttccagaaaaaggagaacgtggaacagataactttgagaaatgggcttttagcaagtggkaaaataggcatgtattttgagctgtgtgttgggttcttcgtgactgcagtgttactcaccctgtcttgaatgatgatggttagtatttgcaacatatacatgtcgaattcccgactagtttgtggaggaagggaagagtgccaatccatatccgtaagcccatcctcaatccaccagcttccaccatgtagtccagcacctaatggttgtttaataaattcttgaagagctatattgaaattggtttgtgtaatcttggaatagacccttcagtggtaaaaaccagcatttttccaaaggttgggtgagattttaggagttctataagtttcttttaggtggttcacagacacagcaggaaacaagattgaatcatagggtggagaaagttttcctttttgagttttcttttaacacattgtatagcattcaaaacaaaatttctcatagccacgtatttcagtg

SEQ ID NO: 17790 - DNA, 606 bp, Homo sapiens
gcatgtgcctcattttgctctcttttccctctgcagtaaggccagtgatatcttacatatgacggctctgtcaacttggatttccagaaaaaggagaacgtggaacagataactttgagaaatgggcttttagcaagtgggaaaataggcatgtattttgagctgtgtgttgggttcttcgtgactgcagtgttactcaccctgtsttgaatgatgatggttagtatttgcaacatatacatgtcgaattcccgactagtttgtggaggaagggaagagtgccaatccatatccgtaagcccatcctcaatccaccagcttccaccatgtagtccagcacctaatggttgtttaataaattcttgaagagctatattgaaattggtttgtgtaatcttggaatagacccttcagtggtaaaaaccagcatttttccaaaggttgggtgagattttaggagttctataagtttcttttaggtggttcacagacacagcaggaaacaagattgaatcatagggtggagaaagttttcctttttgagttttcttttaacacattgtatagcattcaaaacaaaatttctcatagccacgtatttcagtg

SEQ ID NO: 17791 - DNA, 606 bp, Homo sapiens
gcatgtgcctcattttgctctcttttccctctgcagtaaggccagtgatatcttacatatgacggctctgtcaacttggatttccagaaaaaggagaacgtggaacagataactttgagaaatgggcttttagcaagtgggaaaataggcatgtattttgagctgtgtgttgggttcttcgtgactgcagtgttactcaccctgtcttgaatgatgatggttagtatttgcaacatatacatgtcgaattcccgactagtttgtggaggaagggaagagtgccaatccatatccgtaagcccatcctcaatccaccagcttccaccatgtagtccagcacctaatggttgtttaataaattcttgaagagctatattgaaattggtttgtgtaatcttggaatagacccttcagtggtraaaaccagcatttttccaaaggttgggtgagattttaggagttctataagtttcttttaggtggttcacagacacagcaggaaacaagattgaatcatagggtggagaaagttttcctttttgagttttcttttaacacattgtatagcattcaaaacaaaatttctcatagccacgtatttcagtg

SEQ ID NO: 17792 - DNA, 1908 bp, Homo sapiens
taaaaatccatttcatacgtttatttacataaatgaaaaaggaggcaaaaatctctactcctcgtttattccttcttcacgcttcaggaggaaagtctgctatagagcttttttttttttttccaatgcatagaaactaaaagtttctcaagtaagaaatacmaggtacatatttcagaagtttgggtggctttgcatagcctcagaaatgctgagaatatagaacacactgcagtatatctaattatctttataagatctctcaaaatcaatggcattatactcaagaccagctgcggccggggaagtaaaacagagcaagtgtcagggaggttactgagaagtatggctttcttcctaatagcacaatttttatggaacatggagtctttgaattgttatattctgttaactcttttaaagacccaaacagaatttaaccattttgttcgaaggcatcaattcaactcttatctcagttattttatttttttgcacttttaactcctgaaggacaaaaaacacaggttttgagacacaactctaaatctagcttaccctggattataattttgctagcagtgacagtgtccaatcattctactttaaccgttgccactgcaggaatattcaaagtagttgcacattaattgggtgttttgttgccgttccaaacgttcttatctttttttaaagaatgtttccaatataaacaggaaccagactttcaaataagaaaatcatagggaattcagggaagcctgaaacctaaagcaaggggctaattcagctgtttcctaagttgagtttttagaaatagttcttaaagtgttaaaaggtgatcgattaaaaaaagagctatggtcatagtaaagctattattactacgagaaagagaaaaagagagaaacagagagaagggaggaaggaagagagggagacagactgcagagaagcaaactaccccaagttatccaactggatagatgtgttttattcatttacacaacaattattaaatctctactatgtgctggtctccatgctaggtgctgagcacaagttggtgactaagacagacgtagtactgctctcacagttttccatttggtggaaaagaaagcgtatcatattaaaacataacaggtaccattacaattatgctgtgaaaagacaaagaagggtatgtaactgagaggctttccagaaacgatacctacacacaatcataatgaacaataggattgagtatacaaagggtttcagagatccccatactctaccgagggaaacacacacacacacacacacacacacacacacacacacacacacacacacagactctctccctctctcaaagagcctggattgtgacaaagtgccatcagatgcggatttaggacacgataggctaagcagcaactgcactttgagggccactgacaacatttccagacttgatcctaaaatcagcggaaggtagagtagaaatttcagcaagaatgatggcgatcatgtaacagaaaatcactctttctggtatatggagaatagattaatggggacaagagtggaggaagaaaggccagtttagaagtgttgacagcactccaggcaggagggaagagtggctttggccaggagaatagaaggagaatggagagaagcaaaaagtttcagtcagtaattaagaggggataaaccactggagttgatctctgggcatgagggataagggagaggaaagagtcaagagtgattttgaggccgggcacggtggctcacacctgtaatcccagcaatttgggaggctgaggtgagcagatcatttgacctcaggagtttgagaccagcctggccaacatactgaaaccctatgtctactaaaaatacaaaaattagcca

SEQ ID NO: 17793 - DNA, 1908 bp, Homo sapiens
taaaaatccatttcatacgtttatttacataaatgaaaaaggaggcaaaaatctctactcctcgtttattccttcttcacgcttcaggaggaaagtctgctatagagcttttttttttttttccaatgcatagaaactaaaagtttctcaagtaagaaatacaaggtacatatttcaraagtttgggtggctttgcatagcctcagaaatgctgagaatatagaacacactgcagtatatctaattatctttataagatctctcaaaatcaatggcattatactcaagaccagctgcggccggggaagtaaaacagagcaagtgtcagggaggttactgagaagtatggctttcttcctaatagcacaatttttatggaacatggagtctttgaattgttatattctgttaactcttttaaagacccaaacagaatttaaccattttgttcgaaggcatcaattcaactcttatctcagttattttatttttttgcacttttaactcctgaaggacaaaaaacacaggttttgagacacaactctaaatctagcttaccctggattataattttgctagcagtgacagtgtccaatcattctactttaaccgttgccactgcaggaatattcaaagtagttgcacattaattgggtgttttgttgccgttccaaacgttcttatctttttttaaagaatgtttccaatataaacaggaaccagactttcaaataagaaaatcatagggaattcagggaagcctgaaacctaaagcaaggggctaattcagctgtttcctaagttgagtttttagaaatagttcttaaagtgttaaaaggtgatcgattaaaaaaagagctatggtcatagtaaagctattattactacgagaaagagaaaaagagagaaacagagagaagggaggaaggaagagagggagacagactgcagagaagcaaactaccccaagttatccaactggatagatgtgttttattcatttacacaacaattattaaatctctactatgtgctggtctccatgctaggtgctgagcacaagttggtgactaagacagacgtagtactgctctcacagttttccatttggtggaaaagaaagcgtatcatattaaaacataacaggtaccattacaattatgctgtgaaaagacaaagaagggtatgtaactgagaggctttccagaaacgatacctacacacaatcataatgaacaataggattgagtatacaaagggtttcagagatccccatactctaccgagggaaacacacacacacacacacacacacacacacacacacacacacacacacacagactctctccctctctcaaagagcctggattgtgacaaagtgccatcagatgcggatttaggacacgataggctaagcagcaactgcactttgagggccactgacaacatttccagacttgatcctaaaatcagcggaaggtagagtagaaatttcagcaagaatgatggcgatcatgtaacagaaaatcactctttctggtatatggagaatagattaatggggacaagagtggaggaagaaaggccagtttagaagtgttgacagcactccaggcaggagggaagagtggctttggccaggagaatagaaggagaatggagagaagcaaaaagtttcagtcagtaattaagaggggataaaccactggagttgatctctgggcatgagggataagggagaggaaagagtcaagagtgattttgaggccgggcacggtggctcacacctgtaatcccagcaatttgggaggctgaggtgagcagatcatttgacctcaggagtttgagaccagcctggccaacatactgaaaccctatgtctactaaaaatacaaaaattagcca

SEQ ID NO: 17794 - DNA, 1908 bp, Homo sapiens
taaaaatccatttcatacgtttatttacataaatgaaaaaggaggcaaaaatctctactcctcgtttattccttcttcacgcttcaggaggaaagtctgctatagagcttttttttttttttccaatgcatagaaactaaaagtttctcaagtaagaaatacaaggtacatatttcagaagtttgggtggctttgcatagcctcagaaatgctgagaatatagaacacactgcagtatatctaattatctttataagatctctcaaaatcaatggcattatactcaagaccagctgcggccggggaagtaaaacagagcaagtgtcagggaggttactgagaagtatggctttcttcctaatagcacaatttttatggaacatggagtctttgaattgttatattctgttaactcttttaaagacccaaacagaatttaaccattttgttcgaaggcatcaattcaactcttatctcagttattttatttttttgcacttttaactcctgaaggacaaaaaacacaggttttgagacacaactctaaatctagcttaccctggattataattttgctagcagtgacagtgtccaatcattctactttaaccgttgccactgcaggaatattcaaagtagttgcacattaattgggtgttttgttgccgttccaaacgttcttatctttttttaaagaatgtttccaatataaacaggaaccagactttcaaataagaaaatcatagggaattcagggaagcctgaaacctaaagcaaggggctaattcagctgtttcctaagttgagtttttagaaatagttcttaaagtgttaaaaggtgatcgattaaaaaaagagctatggtcatagtaaagctattattactacgagaaagagaaaaagagagaaacagagagaagggaggaaggaagagagggagacagactgcagagaagcaaactaccccaagttatccaactggatagatgtgttttattcatttacacaacaattattaaatctctactatgtgctggtctccatgctaggtgctgagcacaagttggtgactaagacagacgtagtactgctctcacagttttccatttggtggaaaagaaagcgtatcatattaaaacataacaggtaccattacaattatgctgtgaaaagacaaagaagggtatgtaactgagaggctttccagaaacgatacctacacacaatcataatgaacaataggattgagtatacaaagggtttcagagatccccatactctaccgagggaaacacacacacacacacacacacacacacacacacacacacacacacacacagactctctccctctctcaaagagcctggattgtgacaaagtgccatcagatgcggatttaggacacgataggctaagcagcaactgcactttgagggccactgacaacatttccagacttgatcctaaaatcagcggaaggtagagtagaaatttcagcaagaatgatggcgatcatgtaacagaaaatcactctttytggtatatggagaatagattaatggggacaagagtggaggaagaaaggccagtttagaagtgttgacagcactccaggcaggagggaagagtggctttggccaggagaatagaaggagaatggagagaagcaaaaagtttcagtcagtaattaagaggggataaaccactggagttgatctctgggcatgagggataagggagaggaaagagtcaagagtgattttgaggccgggcacggtggctcacacctgtaatcccagcaatttgggaggctgaggtgagcagatcatttgacctcaggagtttgagaccagcctggccaacatactgaaaccctatgtctactaaaaatacaaaaattagcca

SEQ ID NO: 17795 - DNA, 1908 bp, Homo sapiens
taaaaatccatttcatacgtttatttacataaatgaaaaaggaggcaaaaatctctactcctcgtttattccttcttcacgcttcaggaggaaagtctgctatagagcttttttttttttttccaatgcatagaaactaaaagtttctcaagtaagaaatacaaggtacatatttcagaagtttgggtggctttgcatagcctcagaaatgctgagaatatagaacacactgcagtatatctaattatctttataagatctctcaaaatcaatggcattatactcaagaccagctgcggccggggaagtaaaacagagcaagtgtcagggaggttactgagaagtatggctttcttcctaatagcacaatttttatggaacatggagtctttgaattgttatattctgttaactcttttaaagacccaaacagaatttaaccattttgttcgaaggcatcaattcaactcttatctcagttattttatttttttgcacttttaactcctgaaggacaaaaaacacaggttttgagacacaactctaaatctagcttaccctggattataattttgctagcagtgacagtgtccaatcattctactttaaccgttgccactgcaggaatattcaaagtagttgcacattaattgggtgttttgttgccgttccaaacgttcttatctttttttaaagaatgtttccaatataaacaggaaccagactttcaaataagaaaatcatagggaattcagggaagcctgaaacctaaagcaaggggctaattcagctgtttcctaagttgagtttttagaaatagttcttaaagtgttaaaaggtgatcgattaaaaaaagagctatggtcatagtaaagctattattactacgagaaagagaaaaagagagaaacagagagaagggaggaaggaagagagggagacagactgcagagaagcaaactaccccaagttatccaactggatagatgtgttttattcatttacacaacaattattaaatctctactatgtgctggtctccatgctaggtgctgagcacaagttggtgactaagacagacgtagtactgctctcacagttttccatttggtggaaaagaaagcgtatcatattaaaacataacaggtaccattacaattatgctgtgaaaagacaaagaagggtatgtaactgagaggctttccagaaacgatacctacacacaatcataatgaacaataggattgagtatacaaagggtttcagagatccccatactctaccgagggaaacacacacacacacacacacacacacacacacacacacacacacacacacagactctctccctctctcaaagagcctggattgtgacaaagtgccatcagatgcggatttaggacacgataggctaagcagcaactgcactttgagggccactgacaacatttccagacttgatcctaaaatcagcggaaggtagagtagaaatttcagcaagaatgatggcgatcatgtaacagaaaatcactctttctggtatatggagaatagattaatggggacaagagtggaggaagaaaggccagtttagaagtgttgacagcastccaggcaggagggaagagtggctttggccaggagaatagaaggagaatggagagaagcaaaaagtttcagtcagtaattaagaggggataaaccactggagttgatctctgggcatgagggataagggagaggaaagagtcaagagtgattttgaggccgggcacggtggctcacacctgtaatcccagcaatttgggaggctgaggtgagcagatcatttgacctcaggagtttgagaccagcctggccaacatactgaaaccctatgtctactaaaaatacaaaaattagcca

SEQ ID NO: 17796 - DNA, 1908 bp, Homo sapiens
taaaaatccatttcatacgtttatttacataaatgaaaaaggaggcaaaaatctctactcctcgtttattccttcttcacgcttcaggaggaaagtctgctatagagcttttttttttttttccaatgcatagaaactaaaagtttctcaagtaagaaatacaaggtacatatttcagaagtttgggtggctttgcatagcctcagaaatgctgagaatatagaacacactgcagtatatctaattatctttataagatctctcaaaatcaatggcattatactcaagaccagctgcggccggggaagtaaaacagagcaagtgtcagggaggttactgagaagtatggctttcttcctaatagcacaatttttatggaacatggagtctttgaattgttatattctgttaactcttttaaagacccaaacagaatttaaccattttgttcgaaggcatcaattcaactcttatctcagttattttatttttttgcacttttaactcctgaaggacaaaaaacacaggttttgagacacaactctaaatctagcttaccctggattataattttgctagcagtgacagtgtccaatcattctactttaaccgttgccactgcaggaatattcaaagtagttgcacattaattgggtgttttgttgccgttccaaacgttcttatctttttttaaagaatgtttccaatataaacaggaaccagactttcaaataagaaaatcatagggaattcagggaagcctgaaacctaaagcaaggggctaattcagctgtttcctaagttgagtttttagaaatagttcttaaagtgttaaaaggtgatcgattaaaaaaagagctatggtcatagtaaagctattattactacgagaaagagaaaaagagagaaacagagagaagggaggaaggaagagagggagacagactgcagagaagcaaactaccccaagttatccaactggatagatgtgttttattcatttacacaacaattattaaatctctactatgtgctggtctccatgctaggtgctgagcacaagttggtgactaagacagacgtagtactgctctcacagttttccatttggtggaaaagaaagcgtatcatattaaaacataacaggtaccattacaattatgctgtgaaaagacaaagaagggtatgtaactgagaggctttccagaaacgatacctacacacaatcataatgaacaataggattgagtatacaaagggtttcagagatccccatactctaccgagggaaacacacacacacacacacacacacacacacacacacacacacacacacacagactctctccctctctcaaagagcctggattgtgacaaagtgccatcagatgcggatttaggacacgataggctaagcagcaactgcactttgagggccactgacaacatttccagacttgatcctaaaatcagcggaaggtagagtagaaatttcagcaagaatgatggcgatcatgtaacagaaaatcactctttctggtatatggagaatagattaatggggacaagagtggaggaagaaaggccagtttagaagtgttgacagcactccaggcaggagggaagagtggctttggccaggagaatagaaggagaatggagagaagcaaaaagtttcagtcagtaattaagaggggataaaccactggagttgatctytgggcatgagggataagggagaggaaagagtcaagagtgattttgaggccgggcacggtggctcacacctgtaatcccagcaatttgggaggctgaggtgagcagatcatttgacctcaggagtttgagaccagcctggccaacatactgaaaccctatgtctactaaaaatacaaaaattagcca

SEQ ID NO: 17797 - DNA, 1908 bp, Homo sapiens
taaaaatccatttcatacgtttatttacataaatgaaaaaggaggcaaaaatctctactcctcgtttattccttcttcacgcttcaggaggaaagtctgctatagagcttttttttttttttccaatgcatagaaactaaaagtttctcaagtaagaaatacaaggtacatatttcagaagtttgggtggctttgcatagcctcagaaatgctgagaatatagaacacactgcagtatatctaattatctttataagatctctcaaaatcaatggcattatactcaagaccagctgcggccggggaagtaaaacagagcaagtgtcagggaggttactgagaagtatggctttcttcctaatagcacaatttttatggaacatggagtctttgaattgttatattctgttaactcttttaaagacccaaacagaatttaaccattttgttcgaaggcatcaattcaactcttatctcagttattttatttttttgcacttttaactcctgaaggacaaaaaacacaggttttgagacacaactctaaatctagcttaccctggattataattttgctagcagtgacagtgtccaatcattctactttaaccgttgccactgcaggaatattcaaagtagttgcacattaattgggtgttttgttgccgttccaaacgttcttatctttttttaaagaatgtttccaatataaacaggaaccagactttcaaataagaaaatcatagggaattcagggaagcctgaaacctaaagcaaggggctaattcagctgtttcctaagttgagtttttagaaatagttcttaaagtgttaaaaggtgatcgattaaaaaaagagctatggtcatagtaaagctattattactacgagaaagagaaaaagagagaaacagagagaagggaggaaggaagagagggagacagactgcagagaagcaaactaccccaagttatccaactggatagatgtgttttattcatttacacaacaattattaaatctctactatgtgctggtctccatgctaggtgctgagcacaagttggtgactaagacagacgtagtactgctctcacagttttccatttggtggaaaagaaagcgtatcatattaaaacataacaggtaccattacaattatgctgtgaaaagacaaagaagggtatgtaactgagaggctttccagaaacgatacctacacacaatcataatgaacaataggattgagtatacaaagggtttcagagatccccatactctaccgagggaaacacacacacacacacacacacacacacacacacacacacacacacacacagactctctccctctctcaaagagcctggattgtgacaaagtgccatcagatgcggatttaggacacgataggctaagcagcaactgcactttgagggccactgacaacatttccagacttgatcctaaaatcagcggaaggtagagtagaaatttcagcaagaatgatggcgatcatgtaacagaaaatcactctttctggtatatggagaatagattaatggggacaagagtggaggaagaaaggccagtttagaagtgttgacagcactccaggcaggagggaagagtggctttggccaggagaatagaaggagaatggagagaagcaaaaagtttcagtcagtaattaagaggggataaaccactggagttgatctctgggcatgagggataagggagaggaaagagtcaagagtgattttgaggcygggcacggtggctcacacctgtaatcccagcaatttgggaggctgaggtgagcagatcatttgacctcaggagtttgagaccagcctggccaacatactgaaaccctatgtctactaaaaatacaaaaattagcca

SEQ ID NO: 17798 - DNA, 583 bp, Homo sapiens
tgaacgtgggctatgaatgagaggaccacattctattccttgctttgaactcaaataaatgatttgtccaasgtcacttctttatacctcatttcactcacatgctcctttaattcattcacacaagtatctgctatgtaggttctaggtcctgtgcaaaatcatgggaacacaaaggtgaataagagggttgttgaggaaacttgctcaaagcaagtaatctctgtgtggatttggaaagatcaaccaagaggatttcaccaggtgtgaaagtggaagatggtattccaggcagcatgcaaagaagtttcaagaattctgagaactttttgttttgaagcctgggccacagatggaggcagaaagaggaaagggtggttgcagttggggctgaattgagagacaagactgaactgtaaatgggctatctatggattattttggaggtaggcagggtttccttctgtgtgttctgtggcccgctggccccttcagaggttcatgaacaaataatctggttgatggtccatactgtaacccccttttggctatgttgagtacctcattagcatacaaaaggtca

SEQ ID NO: 17799 - DNA, 593 bp, Homo sapiens
gatgtctgcacctatagtcattctacatgtactgagggaatcrgtcagcatacaacttctcagtcttcctccctcccgcacccctattttttggagtttcactctatgcatcctcagcaaggcctctagtaaaccctatacaggttttgcagcttttgtttctatgcaggtctttcatttctagaactatgctttgcaatttctggccatgtctacattcccacctccaacctacatcttcacaactcatcaagtctttgagtaagtttcctctacctttgcctatgtctgaaaatcacttcaagcattcagccaagaagatcttagggcttacctcattcattcccttctctcagggatcatggtgtgcactgcctgttgccgaatatctaaaaatagttgttccatatattttgtccagtttcactgcagaaagttaagtctggttcttgttactcttccaaagatgaaaacagaattcctagtactctttttataacagatacttaacattcttttttgtttctgcagtactaaattctttgtttagcttttgttttttgtcatctcttgatgcaactcatgtaattttg

SEQ ID NO: 17800 - DNA, 512 bp, Homo sapiens
cacataatttctctgtcagataaagaagctatttgcccagtagctagttgagggagtttatatgtttatcttgccctcttcatctcttcaacaatgctaacactccataatcactgggaaaatactttaaatggatggatgtttacattgataaaatatcttcattctcttttctgtctaaggaaaaatgtcaccatcataattagcacagtaggtaattatccccccaaaaggggattggaaatcaatggaattatctgtagtgacccattatctaagatatttgggttgataacatcctctggagctcaacaaactatggtacatacacaaagtggtgaatgaaaattttgagtggcccttctaaatgtttaccccatcagctctgccaaaaagactaagttctgtggaattgctggcacagggacaagttattggaatcaggaagggagaraagagaaacttgtgttctggtgctgagtccatagcatgcaggaggtaggatgtggtta

SEQ ID NO: 17801 - DNA, 264 bp, Homo sapiens
ccactgactgatttaccagagcgatttagctggtttccgccttctctcaaaattctctctctctctctctctctctctctctctmtctatctatctatctctatctctctctcacctccccgtttccctctctccctgggcaacacacacacaaaggtgaatttgagtaacttaaatttatctacgatgattctgaattgaatgtaataagctccatcattatttatttttttttttaagttttattttatttttttttgagac

SEQ ID NO: 17802 - DNA, 416 bp, Homo sapiens
tacaaatcatagcccactttaagactggttagttatgataaacagctcccttacacacacacacacacacacacacacacacacacacacacacacattaacaaagtaagcctgttctaggtcctctcaaaaaaatatactcttggctttatgaattgggttgatatcagatgactgaaagatattttcagtcagttgctgagtttttgggaaatgcagcaggtagtagaaaattcaagcaatcagggtacaattaatgaacaatrtattatttggttgttgttttaattgtgttaaattttatttttaaaggtattcaaaactattataatttgtagatttatataagaaaatgtttgcgtgcacgtgtacatctactattaaactttcatcgttcctaaaaatcttaaagaatg

SEQ ID NO: 17803 - DNA, 639 bp, Homo sapiens
atcctccacacggtgtcgaagctgtcggtcagcactgcccattccagggccgtcttgccccgaacagggtccactgctgtcaggtcagcacctgggaaggagcacagggggtgacatggggcgggataggggttggtgatttgtggaagggcagattctttaggagcaagactgatgtgggttacattcgaagccatagagtcccatcctgttgaaggtggaatcrgggaggccagtgttgcaacctcctgtttaagagagattaagacacttaggtccagagaggggaaaagacttcagagagacctattgtggggctccacctagggcagaatagggatctcctcaatccaaggagctgagcagagcagcggtgcaggctgcccaggacaggcagaggcctgagctgcaccctctggggcaggtgggtggggatgatcggctggttccctctcctggttcttctcttctcaccatctccctctcccatcttggggttgtgggaggagcagtcactctaagacaaaagaaagggtgtagagcgccctcctttttcattcactcctttttcactccaaacccagtggggtgtgtggggaagggaaaaatggaggcaggggtcccccagagtgaccagca

SEQ ID NO: 17804 - DNA, 588 bp, Homo sapiens
tgaagtgcttagaatacttcaaaccattagatgtgttactacttctgcagtggtgtttgatgccaactgttgcttataaattataaataattttccttggcatcattctcctcacatcactccgccactatcactccacccaagaaattatttaaacttaaatatccagtrttgatatcatcagaacatcttgttttgctgtttttcaaaaattatttatatattttaatgcacacataaaaattgtatatatttatcaagtaaaacatgatttttttttttgagatggagtatcactatgttgtccaggctggtctcaaactcttgggctcaagcaattctcccacctcagcctcctgagtgaggcagtgctccttttgcaggggcactagctgcagggagtctgtcccttgcagacccctggcccagcaacagatgaatcaagtatattgacacacagatattctgcttcgccagtgcagctgagggtccgaggccactcacagactccaaggagagtcctgtaaacaatggcagccgtggccctgagcagctcgcacttcaggcatttatttggaatagaattaa

SEQ ID NO: 17805 - DNA, 581 bp, Homo sapiens
caaaaaattagtggtaagaggcccaatataatctcttaggctttccctccaacatgggattttctctcctatagatgccaacccaactgaaagaacacacatgtgttccycaggtgacatcaccgaggtctggccagccctggagttggaaaccctctcctcaggcccaaatctcaattctgaaaatcccgaatctcaggctgttgggagcaaacaagctaagaagttatgtaattcaatactgctctaaaagcgatgtgaagtcatgcagtttggcttgtcctcaagcatgggcgtaacactaatttcttcatttgaaccaaaattaaactctaccgaaaactgggagaatgttaaatcaagtggcagttgttcatttagtaaagtatcaaatttcacatcaccacgtgtgcacatcttccccttgcccataacctggccctccaagaaatcactgactccattcaaatttctgaaaggtgaaatttaggcagaaactggtgggagaggcaccaaggagccccaaggaagtccagcaacccccttaatattacccctttgttacaagctctgagagttat

SEQ ID NO: 17806 - DNA, 528 bp, Homo sapiens
ctggcactcattctctctcctgccgccctgtgaagaggtgccttccaccatgattgcacattttctgaggcctccccagccatatggaactgtgtcaattaaaactctttcctttataaattacccagtcgcgggtattccttcatagcagtgtgagaacaaactaatacaactccttatttatcctgtttccagcctctagtacgcaactgagcttatggcaatttgaaaaatgtttgctaaattgaaaaagggcatagatgggactatagctccarttctgccactgatactatggaagtcagtaaaatcacctaactttctcagagctttctttgtcaataagacaaaagcattggattggatgacctgtaaagtcctgttttgtttacttggcaaacctagaacctaaaatctaaacaaagtctgacatatagaatatgttcagtaattatttgttgaattaatgaatagacgcttgcttcctgttcattggtacaatcacagaaaaacacatcagggcaacca

SEQ ID NO: 17807 - DNA, 579 bp, Homo sapiens
tttccttagctaaaaccagaaatggaaaaggcaaaaataccgtgagaacagcagttttcttgtggtatttccagctcattggaagtggagtatactggaaatcacgggagacaggcctttcccatggggctctaagcccagcagtgctaatccaagaggtttggtttatttaaagcaatcctttcaggctcatctatcactagtctcaagaccttgaacaaaacccatagcagacaaggcaattttacatgtgttctggcagtcttcttctatgtagagttattgtccaaatagacaaacattttcctttcaacaaatatgtaatgggttttcataactatgaaagatgggtctccaagtataggttctcttttcatgttctgtgtggaggtttggatcacttcctaatcgcagaatggaaaacaaactccctttcaaaccatcmgcattttaattccttcctctttcagtttatttatcgtgagatgacaccgtcactgccaacactagggcaggggatgcacaatgatttgaaacactgtgggcatgagtagtacatttggagtttctcagttacca

SEQ ID NO: 17808 - DNA, 1749 bp, Homo sapiens
aaacacaaactagtattacatgtcgtcgaccaggatgccttcrtttggtaacctggatgattattttatttacaaccaagaaagagagtacttcatatagggggtgtggcaggaaaccccacattaagctgaggcaactactacatacttggtgtaagggcaaacaagaaataaacctgacaagcagaaaaggacaagagaagtcacctgtctcaatctcggcactggatgagggagggaaaacaaatctcatctaaaaatttaaagctagtgctagctttacactgttacactgtaagtgtaacagaacttacagtgtatgttctgagtatacactctaagtttaaagtggtttcaaattgatagtttctgacagaagcaactcatctactgtctacaagaactcactgcaatttgagcctataataattgtatactgccatttactgtaaaatgcattctgatttgagagttgttaaaatgtgaaaaaaacacataacagaatggatgaaagatgatatgagatgcactgcctgccctaaagagcttaaagcatctgaggtcatgtgatcgacaagataaaacacaaacaacacaagttattatataaaagtgtaaaattagttttgagatgtgtaggaaaatgagaattcaaaattggtaaacttctgggaagaacggtgaagtgggaagtcttcatgggaaggtgagacttgatctgggccttgatacctggattgggttgcaacgggggagggaaagaggggatacctataccatgtaagaggtggagtctgatttaatgacaatacttttagattggagaaagtgaagacaccattccagctgaaacaaagagcttgtattgggtagcaatggcagataaatttagaaaatcctactgagaagacgtaataaaaggcccttaaggaaatgccaagctaaggaattaggaatggaaatgatattcattcaatcattcagttagctacctgaccaatcagcagccaaccaccaaacattaagcagctgtatatgccagatgttgtgctaagaattcagtataaaatggtggataacacagcattttgtcctctaagttacattattttagttgagcagacaaaaaattgggacaataccacagtaagatctattaatttagctgcaatttattgagcagctattatttttccaggtactatatagggaattgatgttatatattacatttcaaaaccaaagcatgtctattttagagatgagaaatctgaggatcagaggcacagagatttttctgcacttcttagtgtctcagtatcacttacaatagagccttgattactcaaattatgtgatgtcacaattataaaatattcaaaatcctggaaaaagactttgaaactttttgaaaataaccaagaaacttgttgtgttttgatattaagacaagtacattgaatgatgaagttttaagtcaattaatatcctcaactctacgtaatctctgaggtagagtttgcgcagttattttggaaacttagctgaggcatggtaaagcattgatgtaacacattatctgcagcaaatcattagtatgtaccaccagtgtcattaatttacagccacataattatagatggggagacaaattttacattaatttagtgaaactgtggtgtggattcaaattcctcccagtaccattcaaggcagaaatgttctttccctcactgctgatggcacaag

SEQ ID NO: 17809 - DNA, 526 bp, Homo sapiens
gtacagttcccactaccccatgtggctatttaaatataaattcattgaaatgaaatgaaatgtaaaattcatctccttagtcacagtagccattgttgccattggcgaccacattggacagtgcagattatggaamtttttcatcactgaaagtgttttttttttggatagtcctgttctagagatttctaaaaccttgtttgttcactaagcgtcctctatgaacgtttaagttctactccaaatccttctagatggtgatttccaaccatgactctacattaaaatcacctggggagtgtttgaaaatgccaattagaatcagaattgggagggggagggggctcggacccaggcaccactatttgaaaaaatgccctcagtgattccaatcagctgccaactttcacaactaccattgtagacaataatactttattttttaatatacaaatcagtgtctcctgaacttagtacctttcttttcctttgtcctcctttgaattctgcttagagagaggcagtg

SEQ ID NO: 17810 - DNA, 526 bp, Homo sapiens
gtacagttcccactaccccatgtggctatttaaatataaattcattgaaatgaaatgaaatgtaaaattcatctccttagtcacagtagccattgttgccattggcgaccacattggacagtgcagattatggaaatttttcatcactgaaagtgttttttttttggatagtcctgttctagaratttctaaaaccttgtttgttcactaagcgtcctctatgaacgtttaagttctactccaaatccttctagatggtgatttccaaccatgactctacattaaaatcacctggggagtgtttgaaaatgccaattagaatcagaattgggagggggagggggctcggacccaggcaccactatttgaaaaaatgccctcagtgattccaatcagctgccaactttcacaactaccattgtagacaataatactttattttttaatatacaaatcagtgtctcctgaacttagtacctttcttttcctttgtcctcctttgaattctgcttagagagaggcagtg

SEQ ID NO: 17811 - DNA, 526 bp, Homo sapiens
gtacagttcccactaccccatgtggctatttaaatataaattcattgaaatgaaatgaaatgtaaaattcatctccttagtcacagtagccattgttgccattggcgaccacattggacagtgcagattatggaaatttttcatcactgaaagtgttttttttttggatagtcctgttctagagatttctaaaaccttgtttgttcactaagcgtcctctatgaacgtttaagttctactccaaatccttctagatggtgatttccaaccatgactctacattaaaatcacctggggagtgtttgaaaatgccaattagaatcagaattgggagggggagggggctcggacccaggcaccactatttgaaaaaatgccctcagtgattccaatcagctgccaactttcacaactaccattgtagacaataatactttatttttyaatatacaaatcagtgtctcctgaacttagtacctttcttttcctttgtcctcctttgaattctgcttagagagaggcagtg

SEQ ID NO: 17812 - DNA, 583 bp, Homo sapiens
cctttaattttactggtaatgaaatatacaacctttaatactggatattcagtattcatattaaatcataataaatattcatggtgaaccataagtcacctgatattgcaaatggtcatttattttgtcatttatataccactgttagatctgataggataatgtttataatttattaagcaatatgacacaagaaaatgtccaattccacactatttccatattagtagcaatggatgttgccagggcatggtggagtwtaaattatttctcaatttcagcatgatgttaccgcaataaaatgccccacggctaagaaagtcattagcatgaaccgtacaacaagcttgtcatacataacacacacacacagacacacacgccacacaaaattagaatacttagtattataaacataaaagaaataaaaagaagtaaacacaaagcagacagtcctctgatttacagcaaacacaggagggaaggatgcaagtttagctcttttatagcaagttaaatacatttccctcgtctacaaaggagcatagttcaaagtcaggtcagccaggccaacttgtaactt

SEQ ID NO: 17813 - DNA, 583 bp, Homo sapiens
cctttaattttactggtaatgaaatatacaacctttaatactggatattcagtattcatattaaatcataataaatattcatggtgaaccataagtcacctgatattgcaaatggtcatttattttgtcatttatataccactgttagatctgataggataatgtttataatttattaagcaatatgacacaagaaaatgtccaattccacactatttccatattagtagcaatggatgttgccagggcatggtggagtataaattatttctcaatttcagcatgatgttaccgcaataaaatgccccacggctaagaaagtcattagcatgaaccgtacaacaagyttgtcatacataacacacacacacagacacacacgccacacaaaattagaatacttagtattataaacataaaagaaataaaaagaagtaaacacaaagcagacagtcctctgatttacagcaaacacaggagggaaggatgcaagtttagctcttttatagcaagttaaatacatttccctcgtctacaaaggagcatagttcaaagtcaggtcagccaggccaacttgtaactt

SEQ ID NO: 17814 - DNA, 656 bp, Homo sapiens
tcatagcacatattcttaaaattaactgtttgactttgctgtctaatcatcagttgcttctttgggaaaacattggagattaaccacattaaagaaatagctgacatttttaatggggaaaataaaacatgtccctaaacatttcacggaaactcagtatttgttaattcatacctccaaaaaattctaacatttaacattgtttcacagtgaaaagtgggaattaggcagaataatgaacctaytacttcaactatgttcaaagtggccccataaactggagctttgattttacaatggagacactgaatgcttttgtgtttaatctgtcttcactgtggttccacagggagtccctatatttcaaacatgtctggcttaatgaatttttttttcttattattgctgcaatctgttttgttgtcagatttactccagcttggagggctttgttattctcttttcaggcatcagaccctttcagtttctggatatgttgactgaggatgcaaaacaactggtctaagtggacctgcaatgccaccatggtagaaaccagacgaaaccttcaaaacaactcccgcctccttttgatcagtgaagcaaccgcagcctaatattttgaagtgtatttttcttatctttagatcaactca

SEQ ID NO: 17815 - DNA, 1272 bp, Homo sapiens
ttttcatatacgatctggccattgaccatttgtatacacaatctcaagggaaacactagaagcatatccattaaagtcaggaaataaggatgcctactctcccaattttgtactcagatttggttaggtaatctagccaaagcaataaagaaaggaaataagctgacaatacccgaaacaaatcgttaaaattatcatcaattatagataatgtgattgagaacctaggagaaatgaaaagaaactcttactaatcagtacgtagtttcctttaatatcaacaatayccagaaaaaacataattttaaaatctctttcataactaaactacaacttaagctatttcttaggaatcaatttgatcagaaatgtgagacctatgcaaataataatataacacattatgtaaagatataaaaggaaaactgaataaatggaaaggtacaagaccttcaattaaaagtatctgtgaagatacaatccaaattggcatataattaatattggtgatcaaaatcttattgggatttttgaggaacataacaaagttatgttttacagttgattttatagttcatttgaaaagataaatgcataagaacggtgggatatttttgtaaaaagagaattaagtacttgccctatcaaatatcaaaatatattccaatactacaataataaaaatgttctgattccaatacaggaattaagagctataccaatgggacaaaacagagtctagacgtagataataggaatgtggtatatggatatatgaattcttgtataaacagaggtttcaaattctatgaggaataagtaattatggtataactacctaaccattaacaaaattcaggctaaatctctacacttcatatcattcataaaaacaaatcccagccagaataaggctctaaatataaaaacaatctctcaagtgtgaaaggttaccagaaggcataacagaaaacaatgatacatctgacaataaaaaagtttctaattgctacatgacaaaagactaaataaagttaacatatatttttaacaaaagttatataacatgtgtaaatatccctaatacaaaaattattttgctagtgattcttacaaatcactaagaaaaagacaaataccccagttacccatgagcaaagaataaaggacagctatttaccaaagaaatacaaatgatcaatgattctatgaagagtgctcaacttaacaaagacaactacttggaaggggaaggaaacaatgagattggaa

SEQ ID NO: 17816 - DNA, 1272 bp, Homo sapiens
ttttcatatacgatctggccattgaccatttgtatacacaatctcaagggaaacactagaagcatatccattaaagtcaggaaataaggatgcctactctcccaattttgtactcagatttggttaggtaatctagccaaagcaataaagaaaggaaataagctgacaatacccgaaacaaatcgttaaaattatcatcaattatagataatgtgattgagaacctaggagaaatgaaaagaaactcttactaatcagtacgtagtttcctttaatatcaacaatatccagaaaaaacataatttwaaaatctctttcataactaaactacaacttaagctatttcttaggaatcaatttgatcagaaatgtgagacctatgcaaataataatataacacattatgtaaagatataaaaggaaaactgaataaatggaaaggtacaagaccttcaattaaaagtatctgtgaagatacaatccaaattggcatataattaatattggtgatcaaaatcttattgggatttttgaggaacataacaaagttatgttttacagttgattttatagttcatttgaaaagataaatgcataagaacggtgggatatttttgtaaaaagagaattaagtacttgccctatcaaatatcaaaatatattccaatactacaataataaaaatgttctgattccaatacaggaattaagagctataccaatgggacaaaacagagtctagacgtagataataggaatgtggtatatggatatatgaattcttgtataaacagaggtttcaaattctatgaggaataagtaattatggtataactacctaaccattaacaaaattcaggctaaatctctacacttcatatcattcataaaaacaaatcccagccagaataaggctctaaatataaaaacaatctctcaagtgtgaaaggttaccagaaggcataacagaaaacaatgatacatctgacaataaaaaagtttctaattgctacatgacaaaagactaaataaagttaacatatatttttaacaaaagttatataacatgtgtaaatatccctaatacaaaaattattttgctagtgattcttacaaatcactaagaaaaagacaaataccccagttacccatgagcaaagaataaaggacagctatttaccaaagaaatacaaatgatcaatgattctatgaagagtgctcaacttaacaaagacaactacttggaaggggaaggaaacaatgagattggaa

SEQ ID NO: 17817 - DNA, 1272 bp, Homo sapiens
ttttcatatacgatctggccattgaccatttgtatacacaatctcaagggaaacactagaagcatatccattaaagtcaggaaataaggatgcctactctcccaattttgtactcagatttggttaggtaatctagccaaagcaataaagaaaggaaataagctgacaatacccgaaacaaatcgttaaaattatcatcaattatagataatgtgattgagaacctaggagaaatgaaaagaaactcttactaatcagtacgtagtttcctttaatatcaacaatatccagaaaaaacataattttaaaatctctttcataactaaactacaacttaagctatttcttaggaatcaatttgatcagaaatgtgagacctatgcaaataataatataacacattatgtaaagatataaaaggaaaactgaataaatggaaaggtacaagaccttcaattaaaagtatctgtgaagatacaatccaaattggcatataattaatattggtgatcaaaatcttattgggatttttgaggaacataacaaagttatgttttamagttgattttatagttcatttgaaaagataaatgcataagaacggtgggatatttttgtaaaaagagaattaagtacttgccctatcaaatatcaaaatatattccaatactacaataataaaaatgttctgattccaatacaggaattaagagctataccaatgggacaaaacagagtctagacgtagataataggaatgtggtatatggatatatgaattcttgtataaacagaggtttcaaattctatgaggaataagtaattatggtataactacctaaccattaacaaaattcaggctaaatctctacacttcatatcattcataaaaacaaatcccagccagaataaggctctaaatataaaaacaatctctcaagtgtgaaaggttaccagaaggcataacagaaaacaatgatacatctgacaataaaaaagtttctaattgctacatgacaaaagactaaataaagttaacatatatttttaacaaaagttatataacatgtgtaaatatccctaatacaaaaattattttgctagtgattcttacaaatcactaagaaaaagacaaataccccagttacccatgagcaaagaataaaggacagctatttaccaaagaaatacaaatgatcaatgattctatgaagagtgctcaacttaacaaagacaactacttggaaggggaaggaaacaatgagattggaa

SEQ ID NO: 17818 - DNA, 483 bp, Homo sapiens
gattaggcacaggaagccgtgggagagagagccggcaggtggaccatcctggtttccccacacacaccattgtccccctgggaaacctgttggtgaagttctagatgtcttatccaagaagggtcctcttgaggtcatctcagctatccccctgcctctaggcaagctgttttctgtttcttccaagctgactggctgaatggtaggagcctttctgccagggaaactraggtctgggaagggagtatggcttgtggggacaccaggggtcaggggaggggagggtccacctgctgaatcaagtggggcctcctgccctcgtgattcccctttgcctggtgctcagtgggggtgatggtgacgccacaggtgtggagtgccagccacgtgctgagcgccaagcaaaacagccagggtgagtctatgcatcatcagtgcctgggaaggaaggccactgcgagcagggagtctgaccgaaaaact

SEQ ID NO: 17819 - DNA, 585 bp, Homo sapiens
gggctggggtgggagtgaggtggggggtgtgtgagtggggggaactaccctccttgcaagcccttatcaaggcatctttccaaaacacacagactgattgctccaagaggaatttggcaataaaaatctctccatrccacttatattggttagctgaaaagacaaaatccactctggccagattaagcaagagaggatttatgacagagtattaagtgtcttacaaaactactaggagggatttagaagagactttaagttgagatttcagcaaggcttacccaaatgaaacctgggtcacgtgccaataagggggctgctaggtcgcctctgaccaggaccggcccccagcagaatggatgcccctcgcctcccaacgtcatgaggacggtgacagggctgcagtgccagtcccctcacggcagtgcccgcagaaacagcgggagcagcaggcaagggtcttcgttggcttccgcccaaatctcacacagtgcgtctgattcgctgagccttaacgccctcggacccctgaccgcatgggaatctgggaaacgtagtttttagctttccagccttcgcactacc

SEQ ID NO: 17820 - DNA, 575 bp, Homo sapiens
gacaagtcagatttgggtggaaagtatttctggtagaggatacattctcaaaagtcagggagcaataaaaaacacaaattcattaaggcattaaaaatgtttgaaatggacagaacatagtaaatatagggtaatggggatgctgagggatcaggctatatccacaagggaaaaaaarcaaacagcatgggatttttgcttctgcaagatcacactggctgcaatgtggaggataggataggagtgtggcaaaaacagagccctagagaccatataagaaggtgttgccaatttttgaggtaagatgatggtggcctgaaatagtggagatgcagaaaaaggaatagaatcatttttttcaagtttatgctgggagcttacttatttggaagtagaacatctgacagccctctccttggtttgtgacaatttcttttctcaagaagtagaggaagcaaggaggggtgctgttcctttggatttaattctaaccaatatagaagaaacaattgatgctatggtgactgctcctgtggaaagctgtagtggtttagctaactagccagccaaaaaaa

SEQ ID NO: 17821 - DNA, 556 bp, Homo sapiens
tggtggcatgcacctgtaatttcagctacttgggaagctgaggcaggagaatcacttaaacccgggaggcggaggttgcagtgaaccaagatcgcaccactgcactccagcctgtgtgacagagctagacaccatctcaaaatgaaagaaagaaagaaagaaagaaagaaagaaagaaagaaagaaagaaagaaaaagaaaaattaaacgtggggtaacacatatatyttatataatgtccaggcatctttgaggaccacagatatatatctgcatattacaatcatttcaggagattttttaaaatagtagtacttggatgcaaccagagattctgattgagctgaaatggggataatccaaagaaatatatttaaagaaaaaaacaaggtcttgctctgtcaccgagctggagtgcaggagcgtgattaaagttcactgtatcctggacctcctgagctcaagtgatattcccaactcagcctcccaaggagctgggaccacgggcaggtaccaccatgcccagctaattttttgattttttgtagagataagg

SEQ ID NO: 17822 - DNA, 554 bp, Homo sapiens
ttacaggtctcagggtctgatcactgagcttccatcacttccctatgttcttttcaccacagttttactgctgtggcaacttctaaccctaacaagttgttaaaagagctgcagctcttgaaaattgtgctggagtggagatagaggagaggaatcatcgcctaaaattttccccaagagctgggtgcaacggttcatacctgtaatctcagaactttgggagtcttagatggaaggattrcttgagcccacagttcaaggccagcctgggcaacatactgagaccccatcactacaaaaatgtttttaaaaactagccaggtacagcgcttggagcctgtagtcccagctacttgggaggctgaggtgggaggattgcttgagctcaagagtttgaggctgcagtgagccatgattgcaccactgcactctagcctaggtgacagacaccatgaaaaagaaagagagagagagagagagagagagaaggaaagaaagaaagagaaagaagaaaagagagaaagagagagagagagaaagagaaaggaagaaag

SEQ ID NO: 17823 - DNA, 631 bp, Homo sapiens
aatgaaaatacttttcattgcccctaaaacaaaatccaaacttgttaccatgttttctgcaccagacttgcttttcccactagggccccttgttaattccctggatgctaccacttctgggtactagtctcctgctaggacatggagctctagaggtgccaaagcacatctctctcccacttttgtacatgttgcttctggtcagaagagtgccaaatgagtggaatctatccctgaacatcaaagagctttgagtgaaattattttccaagtttcacttatagcctcctcctttctataggatttggccacaggttcayggaggaagggaatttggggagccgaggaatgagcggggcaggaagcacatacgaacgtcctgcaccaggctgcactaagaaccttccctctgtttgatggctaaggccttgctttgtgagcaagcttgctgtcctaaaaccttcctcccggaaggattctcagtctgttaagaaaatagaggccacccaaacctttgtcaagatatgtttagaaatatttgaataatttagctttaacctattccccaccaccactaccacctacttttctttaattctctaatcaccactattcccccctagaatatctg

SEQ ID NO: 17824 - DNA, 591 bp, Homo sapiens
tgttggattgtgtttctcagcaggcaagggtgcttacattataaggacttttcttcctctgaacaacactgaaagatggcagcttttcacctaacttagtgtatgagctagggcagtatttgtaggtttgaaatatgctaccaataaatgcaaagaggttaatagacmatatacttccttttacaaggtaggaggtgcaaagtgtaataatgtatctttactttggaggggctattctgacacaccctgcactattgaatccctaaaaattgtacagaagtggaagatttctaagcttcactattttacctcccacccacaggagtgatgtgtctttctaagaactccagtgtgttaggcacctctctctcaatgggtctagtaaatatcgtgctaccagtgtaatgggtcactgtgatgttctgtgagaggtccatatagtcagatctcttcatactatatcatgtgagagaaaaggaaaattaggaaatccttgaagaaaaactctaaatgtattgttattatttttggttgattccatatgaaagcaaactggctctcatctttcctttctcattggtatagaaagga

SEQ ID NO: 17825 - DNA, 591 bp, Homo sapiens
tgttggattgtgtttctcagcaggcaagggtgcttacattataaggacttttcttcctctgaacaacactgaaagatggcagcttttcacctaacttagtgtatgagctagggcagtatttgtaggtttgaaatatgctaccaataaatgcaaagaggttaatagacaatatacttccttttacaaggtaggaggtgcaaagtgtaataatgtatctttactttggaggggctattctgacacaccctgcactattgaatccctaaaaattgtacagaagtggaagatttctaagcttcactattttacctcccacccacaggagtgatgtgtctttctaagaactccagtgtgttaggcacctctctctcaatgggtctagtaaatatcgtgctaccagtgtaatgggtcastgtgatgttctgtgagaggtccatatagtcagatctcttcatactatatcatgtgagagaaaaggaaaattaggaaatccttgaagaaaaactctaaatgtattgttattatttttggttgattccatatgaaagcaaactggctctcatctttcctttctcattggtatagaaagga

SEQ ID NO: 17826 - DNA, 601 bp, Homo sapiens
aaaaaagattataactatataacattggatatttggagttcaaaagagaggttgaactaaatatttatctagttcatttgaaaatattatttaatataaaactttacaattccaagagactttttcacatattatcatgtattgtttgatatatgagcaaaacccaggcttttgaaacagacagatatgactttgtttctaattagtattcttttcaagttacttaaactgtctagtaatttggatctttcatttttaaaatagttacaataattcctaatccagggggcwgttaccaaggattaatgagataacaatataaaactgagtataattcctcaaatataatagaacagtgatttagtactgcaattaatcttaacaataacttgtgaagttgtccattaaagtttatagtttaggttgagaaatttggtcttcaaaagatgaagtcacttgttaatgtgagagtcagagggtccaattgatcaaaaccttcatgctcttcgagatttctggtgagggttaaggtattattgctggtttacctgtactggagagggcagctggacacaagcatcctactccttccctgtatgca

SEQ ID NO: 17827 - DNA, 529 bp, Homo sapiens
ggttgcaaatgccaaatgcactctatacttggagtgtgtktgtgtgtgtatgtgtgtgtatgtgtgtgtgagagagagagagaaagagagagagagagagagagatttccctatctttgaaattttctcaacatcttcttgctcctaaaatgtgggctaggggctgggtgcagtggctcatggctgtaatcccaacactttgcgaggctgaggtgggaggattgcttgaggccaggagtttaagaccagcctgggcaacacagaacctgtaaaagtcaaaaaaaaataaaagagagagagagagaaaagaaaaagataatgtgctgtataggatgacctgcccaagctgtctcttgcctagtaggctgcttatatctttagctgattgttccaggtgcttatatactgtccctcactacattacattattctatgaaagaataagttagatagacctccgtctttgattaagacaataaataccttcttccaaggcttcattggtagagcagcagcatcttgttcttct

SEQ ID NO: 17828 - DNA, 563 bp, Homo sapiens
tgggttgtgtgattcaggacacactggataagtcgaagggtggagggaagaaaggggaggagaagactgaattctaaacaacatctcagaaggccggagctccattagatgggctctggattgagcttttctgccaggaagttattcacaaaggcctccacaatggcaggggtgatcttcttccacgtccatcacatactccatcagtgatgacatgtccaggatagtgagcaaaggggcagcctcaggcaggttggtgtaaccttgcaggaagtctatcatatcatcctccccagatacaaaaaatggaagtgatgctcctcctctttggctttgcacttggcaatgattttctcagctattggctgaatcagctgcttggcttcctgggactctctgtcatcctcagagtctacaaaaaggaggaggcaggggccagttgagmtgcaaagtgttggagtcagagagcttcagcacgggcttgggtgccacgggaactcccagcagtcctcgtcgttaagcacctccactcaccccgccacatgatcacctcaccctgtggg

SEQ ID NO: 17829 - DNA, 629 bp, Homo sapiens
tgttgttttaagccacagaacttcatgaacacagttggggtctgagaactggcatttcttatcactcccaggtgctgctgaagctgctgatctggggccccacacgagcactgcaatgaagccttggggaaaatgtgggtgtgaactcccagtccacggctcttctggatagagggcgcaccgactgcctctgtccaaaattctcttttagaaggtaagagatggattagcccaagggycaagagtaaatttgtaagtcaagtgacataaatatattatgtttcttttgatgctaaccactaacataggaattaatcttgtatactaatgaagtatccgcagagacatgggtattgtcctccaaagacatccagaaatattctattacaaaagttctggaatcaaaagtaactgctgaaaaaatgtccagcttctctcctaaactcagtttcccttatgggcacataggcagtggccccagtgtccagaccattctcctacccctgcaaacctcttcagacagacggacaagcccttttctaattgccgtataaagaaactcagctaagaaatgaaatatgccagccgggcgcagtggctcacgcctgtaatcccagaactttgggagg

SEQ ID NO: 17830 - DNA, 538 bp, Homo sapiens
gaaaaacattttaattaccagaagttttaggtttatttttctcatcaaaaatctaaattttgagcttcartattttctatgctggttttatttgtcagataagttaaaattatttccaaagatattcagttttatgttaattcatgtgtttgttcctactggattgtcgtcacttctaggtgctcctagcttacagagcaaaaaaaatatgtcagcatactaaactgtgcatatacaaaatctataaatatttctgtgtttatctgcatctatattaggctaaactgacatcacactgatgtcttcaactctaattcatggttcattcaaggcttttccccttgtgtctgtaaccttctactctaactctgaaaaacctggctcacgccatctgtcattcacttcacttacctaactgttcaatttcagcacacatgtgtaggggcagggagaacgcctcactttcattctctgtgaagattcactggaatgactgacaacagacagattaataggataaaaggcatatgaatttatt

SEQ ID NO: 17831 - DNA, 580 bp, Homo sapiens
ataaaggcatatggtgctgggctcctgtcatcctttggtgaattacaggtatgaccttcacaggaaccaaggatagatttaaaagtggtgggtacagaaaaccattattgtgctttcaatattgttgaaaccctatttgtatccgttttgatatgcaacctgggaactcattctccagtgattggtaccttagcagctatgatttgatgatggctgtgggttttacagatagaaatggaattgcaagtacacatatctctggggagaaggggcctcctgattccaaggctgacctatgcatgcagccttgtgagtatgcaaacacatgccagaaagtgtggttggctcccacgtcatctattgaccacyttacttgaaagtaattggaatgaattactcctttctcccttggctgtaggttttagatgagctatgaagggtagaacctagtatgtgcaaagtaatttggctcacagcatttgggctgtgatgtagaaggaatcggggtgagatgagagaaggggcacaaatggcctatgggatgcagcagggaatactgatcctgatttaacagtgataa

SEQ ID NO: 17832 - DNA, 571 bp, Homo sapiens
gcttttttaagtttgaccaagactgtgatgtctgctttcatctacagatgaattttcctgcctacaattgaataattacmattactgatgaatagagatttcctaggctttttttttaaagatgtatgatcatgtcaagtaatctcatctattgttttgatgttatcaagatgtttaatgacctttagtagtttctcgtctatgattgtgtcattgagaactgtctgtgtcaatgaattcaaggcaaataaggccctaagaattttgcatttctatttcattcctttaattaatttatttttaattgacagataataattgtgtatacttatggggtacaatgtgatgtttcaatgtatgtatacatagtagatagtacaaatacttaagctaattaacatatgcatcacctcaccgacttatcatgtttttgtagtgaggatgttaatgatctattcttttagcaatttggaaatatacagtgataactaactggtcaccatgcagtgcaaaagatcactaaaagttattcccccagtataattaaaaccttgtaacttttgatcaacat

SEQ ID NO: 17833 - DNA, 1123 bp, Homo sapiens
cccaggttcaagtgattcttgtgcttcagcctcccatgtagctgtgactacaggcacgcctcaccatgccaggctaatttttgtatttttagtagagactaggtttcaccatgttagccaggctggtctcgaactcctgacctcaagtggtctgcttgcctcagcatcccaaaatgctgggattaccggcatgagccactgcaccaggccaaaaaagtctttaattaaacaaaagggaaaaaaataagggtaagttccattataactcccaggaagactcaatggactcaayacatagttttacccacagtaatgatttattacagcaaaaagatacaaagcaaaaactacaaagggaaaagatacatgggatgaagtctgaaggaaatgaggcacaagcttcgaagagttccctcctagtggagtcacacagaacaagcctaattcctctagtaatgaattgtgacaatttaagtgaagtgttatctactagggaagctcatcagagacttagtgtccaagatttttcatggaaactgttcatatatgtatcttctgcctcgcatataccaaaattccagactcccaaaagaaaagcaggtattcagcataaaccacaatgcttatacagttcaggcatacggagacatccttatcatttaggaaaagtttcatttaagtatagagaactgtatgccaactaagtttctaaacaccagcaacggccaacttcgcaaggaggcctttctaaggatagcagtctaagacctgctctgtcaactctattctccacatcttgaatataaaaaatcaaattataagtcaacatccaaaacccataaaagactgataaaattaagtatgtaaaaataaaaaataaaacttaattatggccaaaatttatcaagaaaaaaatcacaagacaagtgacaaactagaagagaatgtttgcaactcatatctcagtcaaaaagataatatagcttttaatagtatctttattatataaacaatttctacgatggctactataagaatacaacttaatagaacaactagggaaaaactgttgacacaaaaggaaacacatatggctcaacctcacctatcaaaagattgaatt

SEQ ID NO: 17834 - DNA, 568 bp, Homo sapiens
tccttctttcatattcatctacataaaacagtcatgataaaattcattctctaaggtggtagtaaaaattagttgagatgatgcatgtaatggtgtttacctcaatgactggtacacaatactccatcatagaagttcttttaatgtatatcaatctaaggcttagaatttcacatttaccagtatttattcctcacctctcattcacacagcatttgaaatcatcatcagctcagacctcctgactttcatggaaggcatccatgaaatcaagtcttttaaaaagtcaaaaatgatttctttcgcccagaggattccagtctttgaactacayaatttggattttttgttctgttttgttttgtttttcagctaagaaagcaagcacttcatttcttaagcaaccgcacctcagcactaacaaccccagcagactatctttccctcaaaatcacaggactgctcatagaatgctcagagcatcacagaatcttacagaactcttttataaagaaaaatatggctgtcatctttttatgtctctaagaaatgacaataattcagattt

SEQ ID NO: 17835 - DNA, 568 bp, Homo sapiens
tccttctttcatattcatctacataaaacagtcatgataaaattcattctctaaggtggtagtaaaaattagttgagatgatgcatgtaatggtgtttacctcaatgactggtacacaatactccatcatagaagttcttttaatgtatatcaatctaaggcttagaatttcacatttaccagtatttattcctcacctctcattcacacagcatttgaaatcatcatcagctcagacctcctgactttcatggaaggcatccatgaaatcaagtcttttaaaaagtcaaaaatgatttctttcgcccagaggattccagtctttgaactacataatttggattttttgttctgttttgttttgtttttcagctaagaaagcaagcacttcatttcttaagcaaccgcacctcagcactaacaaccccagcagactatctttccctcaaaatcacaggactrctcatagaatgctcagagcatcacagaatcttacagaactcttttataaagaaaaatatggctgtcatctttttatgtctctaagaaatgacaataattcagattt

SEQ ID NO: 17836 - DNA, 539 bp, Homo sapiens
aactcctagcctcaagtgatcctcttcctttggtcctcaaagaggtagggttacaggcacgmgccactggcccagcctagagttataatttgagcccagatggtcaggccgcaaagcctctgtccctagctaccacacaacactgccttatgatagaagaagagtgaaaaacagggtttaaggaagttctcatcaacataaaatctcaacagatgagacccatctgagaaggagggaaagaaaccacactcctgagatggccagtcagagggaggcttcgtagaaacacttctttgaaacaaggggtagaggtaggcaggaaagagtctttgcatgcaatgagcttgtttgccattttaaacatatgtagcgcccatagacggataggtaccctgaagacagaatcagagatcccaaacactgaagttacgcagatatctgaggatgaaagaaggggacccttccacaggatagatgcagctgaacaacttatgtgatctggaatcttcaagtcctcttgactttcaccaggcacattc

SEQ ID NO: 17837 - DNA, 539 bp, Homo sapiens
aactcctagcctcaagtgatcctcttcctttggtcctcaaagaggtagggttacaggcacgagccactggcccagcctagagttataatttgagcccagatggtcaggccgcaaagcctctgtccctagctaccacacaacactgccttatgatagaagaagagtgaaaaacagggtttaaggaagttctcatcaacataaaatctcaacagatgagacccatctgagaaggagggaaagaaaccacactcctgagatggccagtcagagggaggcttcgtagaaacacttctttgaaacaaggggtagaggtaggcaggaaagagtctttgcatgcartgagcttgtttgccattttaaacatatgtagcgcccatagacggataggtaccctgaagacagaatcagagatcccaaacactgaagttacgcagatatctgaggatgaaagaaggggacccttccacaggatagatgcagctgaacaacttatgtgatctggaatcttcaagtcctcttgactttcaccaggcacattc

SEQ ID NO: 17838 - DNA, 568 bp, Homo sapiens
atctaagatccacccatgttcctgcaggcattaggggttcgttccttttcctcactgagtcgcctctgtctgaagagtggaacccccttcctccckagttcccatgttgaagatcatctccgtagcctccgggtgtgagttacaaccaatcaagcggtgaacgtcacatgcgggttttacttggacgtcagttttcaaatcagtgtggccaatatctgtcacactttggggatgtgtggtacgaggccactgagctttgtgagccacagcccatgtgacttacaaaatggctgtgccctgtcacgttcccaccagccatggatgagagtttccggggccccgcatcctttctagtattttgggcagtcagtgttgcctgggaaggctcccaagccctgccatcgtgccaccttcccatgggtccctatcctggatagttgtgggtcatggagagcacttttcaccatctgcatgactctttttttttctgccttccgtctccttgggagtcacctgggttctggccctacatgtcccagcccggcccagggcttagagccgggaggtg

SEQ ID NO: 17839 - DNA, 568 bp, Homo sapiens
atctaagatccacccatgttcctgcaggcattaggggttcgttccttttcctcactgagtcgcctctgtctgaagagtggaacccccttcctcccgagttcccatgttgaagatcatctccgtagcctccgggtgtgagttacaaycaatcaagcggtgaacgtcacatgcgggttttacttggacgtcagttttcaaatcagtgtggccaatatctgtcacactttggggatgtgtggtacgaggccactgagctttgtgagccacagcccatgtgacttacaaaatggctgtgccctgtcacgttcccaccagccatggatgagagtttccggggccccgcatcctttctagtattttgggcagtcagtgttgcctgggaaggctcccaagccctgccatcgtgccaccttcccatgggtccctatcctggatagttgtgggtcatggagagcacttttcaccatctgcatgactctttttttttctgccttccgtctccttgggagtcacctgggttctggccctacatgtcccagcccggcccagggcttagagccgggaggtg

SEQ ID NO: 17840 - DNA, 425 bp, Homo sapiens
caattatctcagcacacccggattccttgaggcccccaactctgcattctgggaccactagcgtttgccccggtataaaaaccgatcccgcgtctaagcagccggtatttcatcacctacaactgtaacatgacggcacaatttgagcgtggctgcgaaatatgaaacctcaccacgacctcaaacagaggggggcaattaagggcttgtgtacaatctgtcaggtgagcagcctaaaataaccctaaacacggcacccgggtgggaggcaggagtgggtctggtcaggagacggcctccctgaggggaagaggtctgcgccgaggcagcctgcgcgccccgaaccctagactctcggtccgccggcgggtgacagaaakcacttggaattctggccctcctggaacttccgcccgcgccctcgc

SEQ ID NO: 17841 - DNA, 546 bp, Homo sapiens
ttttattttttcacttgcttctgacaaaataataataatccccaatagcacaatctcttagaacaagagaaaaaagttgtttataaatccatctatattagaaagtgaattactgtgtataatcaatcatttgaaaaaatactaactctgtaagtattcagttgattacgttgggtttcttactaatttctccacttactggtattggcaggcggagctgaagcacgccctgactcccagcagcgtatcaaatttaagtaatttagtaaaagtagtgatcctatattcttctctggccagtctattagccctctattttcagttgcctgaaggaagatatttgcttgatttttcccaatctcattcattcaatattgtttcagtgtgatgttttgctaaattccrtttggaaatacccgatatttctgatatttttagacatgtgtgatctgtactctagacatagtacacagctcttaaaagatgaattgcataaggaaatgttcatttccaccatgaccgatgggctgacaccttaaaggatgg

SEQ ID NO: 17842 - DNA, 513 bp, Homo sapiens
gttctccctattttacagatgaaaacagagtttggttgcaaaaccaaacttaattctataacagaaaagcaaatacttcagatgggcaaatacagatatttcagatgggcaaaaccaaactcaattctgtaacagaaaagcaaataattatagtaaatacttatgtaccaattgttctatgtcagatacacrtaaatatattaacttatttaatatttacaataatcttatgcagaggggactttgttcgccctattttacaaatgaaaaaaaccagacacaaagaggtcaagtgacttgcccaaggttacacagctaataagtgtgctcttagccattatatgctgattcgtatcccatataagctacctgccaccagacaagagcatacatattcagcttatagctgtgctgtgacctaaaacaattaaaataaactgttcggagccactttgcttcttcgtctttgtgctctcactcaaccattccacaaatacattaatatatcgaatg

SEQ ID NO: 17843 - DNA, 531 bp, Homo sapiens
cacttctcggccttttggctaagatcaagtgtgtaaaaagtggctactttaataataatggtgtcttacatttatatagcactttattgcttataaaatcctttcacatgcattaggtcatttatacctcacaacagctctgagaggtagctattatagttcccatttaatagatgaagaaactgaggctcacagagttccagtaatttgtccaaggtcacaaagctrttaaatagtagagccaggactgatactcaactattctgactctaaagccagtgaaatttttcctctgccttttttttataattgtaaaaagagaaaaattaatatgctttaaaaaaagaaaaagtctgaaacatccataatgtcatgattccaacaaaaacattattaaatttacatattatcttccagggtttgtccatgtgccgacaactgctatctagttacaatcataatatatgtacaattatgtattctgttttccctcactttgctctactaccctgaagcattttccaagttgca

SEQ ID NO: 17844 - DNA, 531 bp, Homo sapiens
cacttctcggccttttggctaagatcaagtgtgtaaaaagtggctactttaataataatggtgtcttacatttatatagcactttattgcttataaaatcctttcacatgcattaggtcatttatacctcacaacagctctgagaggtagctattatagttcccatttaatagatgaagaaactgaggctcacagagttccagtaatttgtccaaggtcacaaagctattaaatagtagagccaggactgatactcaactattctgactctaaagccagtgaaatttttcctctgccttttttttataatwgtaaaaagagaaaaattaatatgctttaaaaaaagaaaaagtctgaaacatccataatgtcatgattccaacaaaaacattattaaatttacatattatcttccagggtttgtccatgtgccgacaactgctatctagttacaatcataatatatgtacaattatgtattctgttttccctcactttgctctactaccctgaagcattttccaagttgca

SEQ ID NO: 17845 - DNA, 1448 bp, Homo sapiens
ttttcttgcatgaaaaaaattaaagatcattaaaaacgccaccgatataagaaaaataaacaagtcaagcatcttgtggaagatctttaaaaagttcataacaaactgctccaatattgtagaggctgggcctggtggctcacaacagcactttgggaggctgagacaggaggactgcttgagcccaggtgttcgagaccagcctgggcagcatgaagaaaccctgtctctacaaaaaatacaaaaaaaaaaaaaaaattagccaggcatggttgcatgcacctgtagtcccagctacttgtggggctgaagcaggaggatggcttctgcctgggagcttgaggttgcaataagccatgatcacaccactrcactccagcctgggtgacaaagagaggccttgtctcagaaaaaaaagaaaaaaaagcatattgtagaaatatgaagagtttgttcttgatagagtttttcctcttgataaccgtctatgtcagcatacctagttgttgtttacaaccagtttctttattatataaaagggaaatattcctaaatttatagtatttgcctttatataattcataatttttactacttatcttgctattcagtttagcttactttttatccccttattttcctaaaggcaagactttatcaatgttggaaacagtgagttaatctacatgttgggacaagctccttgatctaggtagctactccagattattttcctgccattaaaactatactgtcagaattttttcccatactaaacttaagctctggaccacatttgttgacagaataatcaccatcatatttaaatcacatactatgaaagaactgtcatgttagcaatatctgtgcatttatcacattgtgatgaaaaatactttgctagctttctttattctgacttggttttccgtatcattcaccagttccagaatacatcaagctgtgatatcattgtaaggtacttaagctaccttctctgctgcaaaatataccaaagtttccaagtaaaaatcttttatacattcttttgtttaagattcagcatctgtatgtattattacattacaggtaacctgtaaagcactaatgtttatatgtgaaatagtgaacatctacttctgctggccttttatttcaatattttttctttggaagaattattttagatttgaccgtttctttatgttatgaatgcaagttctgcttaagtgttcatgttattacttcattagccagcgcatctcctaaagtatcacactgtggtattaacacatttctctatcagcggcaaccacaaaactaaactctctacctgaggcatcagatttccagctaaaactagtatggattcctttgatcttccattcttggaatcacacatttaattgccacattcagaaagaagttctttctcctgattaaaaaaa

SEQ ID NO: 17846 - DNA, 1448 bp, Homo sapiens
ttttcttgcatgaaaaaaattaaagatcattaaaaacgccaccgatataagaaaaataaacaagtcaagcatcttgtggaagatctttaaaaagttcataacaaactgctccaatattgtagaggctgggcctggtggctcacaacagcactttgggaggctgagacaggaggactgcttgagcccaggtgttcgagaccagcctgggcagcatgaagaaaccctgtctctacaaaaaatacaaaaaaaaaaaaaaaattagccaggcatggttgcatgcacctgtagtcccagctacttgtggggctgaagcaggaggatggcttctgcctgggagcttgaggttgcaataagccatgatcacaccactgmactccagcctgggtgacaaagagaggccttgtctcagaaaaaaaagaaaaaaaagcatattgtagaaatatgaagagtttgttcttgatagagtttttcctcttgataaccgtctatgtcagcatacctagttgttgtttacaaccagtttctttattatataaaagggaaatattcctaaatttatagtatttgcctttatataattcataatttttactacttatcttgctattcagtttagcttactttttatccccttattttcctaaaggcaagactttatcaatgttggaaacagtgagttaatctacatgttgggacaagctccttgatctaggtagctactccagattattttcctgccattaaaactatactgtcagaattttttcccatactaaacttaagctctggaccacatttgttgacagaataatcaccatcatatttaaatcacatactatgaaagaactgtcatgttagcaatatctgtgcatttatcacattgtgatgaaaaatactttgctagctttctttattctgacttggttttccgtatcattcaccagttccagaatacatcaagctgtgatatcattgtaaggtacttaagctaccttctctgctgcaaaatataccaaagtttccaagtaaaaatcttttatacattcttttgtttaagattcagcatctgtatgtattattacattacaggtaacctgtaaagcactaatgtttatatgtgaaatagtgaacatctacttctgctggccttttatttcaatattttttctttggaagaattattttagatttgaccgtttctttatgttatgaatgcaagttctgcttaagtgttcatgttattacttcattagccagcgcatctcctaaagtatcacactgtggtattaacacatttctctatcagcggcaaccacaaaactaaactctctacctgaggcatcagatttccagctaaaactagtatggattcctttgatcttccattcttggaatcacacatttaattgccacattcagaaagaagttctttctcctgattaaaaaaa

SEQ ID NO: 17847 - DNA, 568 bp, Homo sapiens
tggctccctcctgtaatcccagcactttgggaggccgaggcaggtggatcacttgaggtcaggagttcgagaccagcctggccaacatggtgaaaccctgcctctattaaaaatmcaaaaaaaaaaaaaaaaattagctgggcatggtggcgcacacctgtaatcccagctacttaggaggctgaggcaggagaatcacttgagcccaggagacagaggttgcagtaagccaagatcatgccactacactccagcctgggcgacagagtaaaactccatctcaaaaaaaaaaatttttaaacattaaaaaataataataaaaataaaaacagtactgatgctgcccttcccacccctcagccttcattcacatggggtctgggtgtggcctgagcatcaggcgttctacatactccccaggtggttctaatgtgaggccaggttcaagaacggccgctctggttcattctgcacctgggctctctccgtaccgcagtagacagagggctctcactcctgagtcctccagaaagagactttagcttcatgttgctgcttctaaacatat

SEQ ID NO: 17848 - DNA, 568 bp, Homo sapiens
tggctccctcctgtaatcccagcactttgggaggccgaggcaggtggatcacttgaggtcaggagttcgagaccagcctggccaacatggtgaaaccctgcctctattaaaaatacaaaaaaaaaaaaaaaaattagctgggcatggtggcgcacacctgtaatcccagctacttaggaggctgaggcaggagaatcacttgagcccaggagacagaggttgcagtaagccaagatcatgccactacactccagcctgggcgacagagtaaaactccatctcaaaaaaaaaaatttttaaacattaaaaaataataataaaaataaaaacagtactgatgctgcccttcccacccctcagccttcattcacatggggtctgggtgtggcctgagcatcaggcgttctacatactccccaggtggttctaatgtgaggccaggttcaagaacggccgctctggttcattctgcacctgggctctctccgtaccgcagyagacagagggctctcactcctgagtcctccagaaagagactttagcttcatgttgctgcttctaaacatat

SEQ ID NO: 17849 - DNA, 570 bp, Homo sapiens
ttttaagtatgcactgttattcacattttataactggggaaacagtcttatagggattaagtgacttacccaaggtcacatagtgggggagccaggataggaagccaggaatgcaatgcaagagcttatgtgcttaactcatttttctgttctacctctcaataayaccatcatattgatctatagattcatttattcattcatctgttaattgattcattcattccacaaacgctttttaaaaaaattttactttccattgcaacaaaattcacattccacacaaacgcttcttaagcaatcattttcaaatcagagactgtagacagtgctaggaattgattaagacaaggtccttgctctaacaattgaggtagcaaattacattaacgaaaaattaaagcatgatataagtgttttaggaatgttatttctgttcctttttccgtaaatttggatgtttttacctgcaaataactgaaaacctcactaatgaaatcttaaacactatggaaatttaatatcatatagataaatttagtttgttaatttcaggacctcttcaggggc

SEQ ID NO: 17850 - DNA, 573 bp, Homo sapiens
acgtttggggtgagaagtgccttcaacccaagagttttcaagggtttggtcctgctttcagaagggtagcaggtctgtgtttgatacaacctatgagtcttcttgcctcttgttcacattagatattttcttatctctatgtcttggtttttcaaaattgttcagtgtctagatctagaacaatgtacaaatcagtggaggagagagttgagtctttagaacttaaaatgaatggttcccttgaagattatcagcatgagaatcagatgtgttcagaaaatgagaaggattagacaaagctctggataataatggttgtaatcagtcatattgacagagagttttctcatcttctccaatttcttcttgtgaaatgatttccattctgaaaataactgctttctttatcagcttggtattgatgagaaaagaggaataactttccttatttttttcacatgttgattcttttttctctagtgggtgttwgtcataaatgaatataaactaagaaatgctagatttcccagagttggcagtttataacttcattctgataaaaactttaaagca

SEQ ID NO: 17851 - DNA, 541 bp, Homo sapiens
gctggacctctcagctcaattgtagcaccttttaatgaaagacactgggaagtgtactgccaggtactgttgggcagtttgttcactgtgcaagcagcatttatcgaactcctaccatatgccagaaagcttgcttagcactttgcctaaactgaaccttgtttcatcctcacactcactctttggtgagggagtcattaacctcagcttctgaaggcaggagccttgggaagctttgtgagtccctcaaattcacactctttccctggctgcatcgggggcaaccctggcaggccccagttcttcagmaaagcaaggcctgcctcgccactgggaagggccaggaagcctctcacgccagacctgccatgcccagggagtcccgggagcctgggacccgcccgaagctggggctcagctgtgggaggcacagtggtgagactctcaggacaggggtcaacaggacctgggtccagccttcctgactctgttcgtcggcaagttgttgaatctgtctgggccttgatttttctcgtgtgtt

SEQ ID NO: 17852 - DNA, 588 bp, Homo sapiens
gtatacaaatgctagtgctttttgtacattgattttatagcctgcaacattgctgaagttgtttatcagctgaagttgatactgattttaatgataaaaaattcctccaatatatgataaatctagacaataggttttattgtattttttgagattgtatatgtttcttttatatttcctgtttgatcacagtatttaaaatattttaatactattaaatgyaaagtattttttaaattttgtcattaatttctacttatatgtgatttctgattaatacatttgtattattcattttcttgtaatgtgtcaagtttttccttgtagtcaactacaacaaattttatgaatattctatttttatttgaaaagactgtgtgtgtgtttattaccttcttaatcatgctcttttcattttctatatctttactaatttttgttgattttatttgtcctggattgagaatctgtgttttagattcttcattttagtgtatttttctctaaagcattttttagttttattttctcttacaaacttatttttattttttcttgaagctctgtattttcttcctcatgaagatt

SEQ ID NO: 17853 - DNA, 588 bp, Homo sapiens
gtatacaaatgctagtgctttttgtacattgattttatagcctgcaacattgctgaagttgtttatcagctgaagttgatactgattttaatgataaaaaattcctccaatatatgataaatctagacaataggttttattgtattttttgagattgtatatgtttcttttatatttcctgtttgatcacagtatttaaaatattttaatactattaaatgtaaagtattttttaaattttgtcattaatttctacttatatgtgatttctgattaatacatttgtattattcattttcttgtaatgtgtcaagtttttccttgtagtcaactacaacaaattttrtgaatattctatttttatttgaaaagactgtgtgtgtgtttattaccttcttaatcatgctcttttcattttctatatctttactaatttttgttgattttatttgtcctggattgagaatctgtgttttagattcttcattttagtgtatttttctctaaagcattttttagttttattttctcttacaaacttatttttattttttcttgaagctctgtattttcttcctcatgaagatt

SEQ ID NO: 17854 - DNA, 588 bp, Homo sapiens
gtatacaaatgctagtgctttttgtacattgattttatagcctgcaacattgctgaagttgtttatcagctgaagttgatactgattttaatgataaaaaattcctccaatatatgataaatctagacaataggttttattgtattttttgagattgtatatgtttcttttatatttcctgtttgatcacagtatttaaaatattttaatactattaaatgtaaagtattttttaaattttgtcattaatttctacttatatgtgatttctgattaatacatttgtattattcattttcttgtaatgtgtcaagtttttccttgtagtcaactacaacaaattttatgaatattctatttttatttgaaaagactgtgtgtgtgtttattaccttcttaatcatgctcttttcattttctatatctttactaatttttgttgattttatttgtcctggattgagaatctgtgttttagattcttyattttagtgtatttttctctaaagcattttttagttttattttctcttacaaacttatttttattttttcttgaagctctgtattttcttcctcatgaagatt

SEQ ID NO: 17855 - DNA, 1710 bp, Homo sapiens
tgtagctggtttttttctgtgatttgtctatgcatgtgtgtgtccttgtgcgtgcacaggtgtgtacacatgtgcttctctgcgtgtgtgtggacctgtgtatgcatatgtatgtgcatgcacactctttccccagcctccttacagtaatcaggggaacctcagggacctgtcctttggaacacagacatgtgctacctgtgctcctgctgctggcctcagcccccgtccccaccccaagagtcctggagacccacacatgccacgcaatgctgccttgcccagaaccctggagtggctccccacatgctttctgttggccttcagggtcgggggcctcctccaggccactctcacttctccygcagatgacctttctggctgctctgattggcatgtggcttcctctactgaaaggcattccgtgactcttcactgagcaagtcctctgatgctgaggctgtgtgctgggctccaggagaggcagcaggggtaatcatgggccagcattccaagacgtcttaggctagtgcagtggcaaaatcctggagctcagacgtaaggtgtgctagagagaggtgagcttggtgaggggtgagagcttcccaacaggaatgcccccctctatctcaccctgagaagcattcttgtctttgagagttccctggcacagcccctcatctggttccccagcggaaaggatgcccttcgtcccccttgaccccttgcacctagtagatccctttcctcttaggactaacggtttcccatcatcagagcttggctcagctggcacgaaggaaggaggccaagggcagtctgactgcaggggcagtacccttgggagacaggggctgggggtcctctgccctctaattgtcctttcccggcagcttccctcaatcaagccattgatttgagggccccctctgtgcttcccctccaggggagcttcttcagggccatgctttgattgctgcggagcgagtgaagcctgtgtgagcatcccctctgagcatctctcaccacctgccctgcatctctgcttggacatctcaaaggcactcagccccagctggcaccttcgggtgccacttccgtgagctggaaacctgtggggtccctaccgactccttcctagtcacctttcctttcccctgcctggtccatggccccattgtgcagattcaccacctaagcatacccaagccctcttctgtctgccagcagcctgccctaggccattgtcatcaccacctaagctcttctccttacgtatgccctagccctcacccttcaatctgttccacatgtgagatctacaattttgatcatggcactctcctgcttaaagccatcaatagctcaccattgcttttaggatgactcctgcccttcacttggcacactaactccttcatcctgcaggtctcggctcaacagcatatctgcagggaggcccccttggacctcactcctcttgccctctacctgtgccaggccaggtcctcttgccatctgttctgctcaagctgggaacgctccgcacttgccagagcccaagggcagctcctcctgactaagtgctatgaggcaggggcagggggaggggcaaggacagggctgtccacacgttgtcctcagtgctagcagtgaagtgttgtgtctgcacagacatggagcccaacagacgtgtgctgaatgaatgca

SEQ ID NO: 17856 - DNA, 1710 bp, Homo sapiens
tgtagctggtttttttctgtgatttgtctatgcatgtgtgtgtccttgtgcgtgcacaggtgtgtacacatgtgcttctctgcgtgtgtgtggacctgtgtatgcatatgtatgtgcatgcacactctttccccagcctccttacagtaatcaggggaacctcagggacctgtcctttggaacacagacatgtgctacctgtgctcctgctgctggcctcagcccccgtccccaccccaagagtcctggagacccacacatgccacgcaatgctgccttgcccagaaccctggagtggctccccacatgctttctgttggccttcagggtcgggggcctcctccaggccactctcacttctcctgcagatgacctttctggctgctctgattggcatgtggcttcctctactgaaaggcattccgtgactcttcactgagcaagtcctctgatgctgaggctgtgtgctgggctccaggagaggcagcaggggtaatcatgggccagcattccaagacgtcttaggctagtgcagtggcaaratcctggagctcagacgtaaggtgtgctagagagaggtgagcttggtgaggggtgagagcttcccaacaggaatgcccccctctatctcaccctgagaagcattcttgtctttgagagttccctggcacagcccctcatctggttccccagcggaaaggatgcccttcgtcccccttgaccccttgcacctagtagatccctttcctcttaggactaacggtttcccatcatcagagcttggctcagctggcacgaaggaaggaggccaagggcagtctgactgcaggggcagtacccttgggagacaggggctgggggtcctctgccctctaattgtcctttcccggcagcttccctcaatcaagccattgatttgagggccccctctgtgcttcccctccaggggagcttcttcagggccatgctttgattgctgcggagcgagtgaagcctgtgtgagcatcccctctgagcatctctcaccacctgccctgcatctctgcttggacatctcaaaggcactcagccccagctggcaccttcgggtgccacttccgtgagctggaaacctgtggggtccctaccgactccttcctagtcacctttcctttcccctgcctggtccatggccccattgtgcagattcaccacctaagcatacccaagccctcttctgtctgccagcagcctgccctaggccattgtcatcaccacctaagctcttctccttacgtatgccctagccctcacccttcaatctgttccacatgtgagatctacaattttgatcatggcactctcctgcttaaagccatcaatagctcaccattgcttttaggatgactcctgcccttcacttggcacactaactccttcatcctgcaggtctcggctcaacagcatatctgcagggaggcccccttggacctcactcctcttgccctctacctgtgccaggccaggtcctcttgccatctgttctgctcaagctgggaacgctccgcacttgccagagcccaagggcagctcctcctgactaagtgctatgaggcaggggcagggggaggggcaaggacagggctgtccacacgttgtcctcagtgctagcagtgaagtgttgtgtctgcacagacatggagcccaacagacgtgtgctgaatgaatgca

SEQ ID NO: 17857 - DNA, 1710 bp, Homo sapiens
tgtagctggtttttttctgtgatttgtctatgcatgtgtgtgtccttgtgcgtgcacaggtgtgtacacatgtgcttctctgcgtgtgtgtggacctgtgtatgcatatgtatgtgcatgcacactctttccccagcctccttacagtaatcaggggaacctcagggacctgtcctttggaacacagacatgtgctacctgtgctcctgctgctggcctcagcccccgtccccaccccaagagtcctggagacccacacatgccacgcaatgctgccttgcccagaaccctggagtggctccccacatgctttctgttggccttcagggtcgggggcctcctccaggccactctcacttctcctgcagatgacctttctggctgctctgattggcatgtggcttcctctactgaaaggcattccgtgactcttcactgagcaagtcctctgatgctgaggctgtgtgctgggctccaggagaggcagcaggggtaatcatgggccagcattccaagacgtcttaggctagtgcagtggcaaaatcctggagctcagacgtaaggtgtgctagagagaggtgagcttggtgaggggtgagagcttcccaacaggaatgcccccctctatctcaccctgagaagcattcttgtctttgagagttccctggcacagcccctcatctggttccccagcggaaaggatgcccttcgtcccccttgaccccttgcacctagtagatccctttcctcttaggactaacggtttcccatcatcagagcttggctcagctggcacgaaggaaggaggccaagggcagtctgactgcaggggcagtacccttgggagacaggggctgggggtcctctgccctctaattgtcctttcccggcagcttccctcaatcaagccattgatttgagggccccctctgtgcttcccctccaggggagcttcttcagggccatgctttgattgctgcggagcgagtgaagcctgtgtgagcatcccctctgagcatctctcaccacctgccctgcatctctgcttggacatctcaaaggcactcagccccagctggcaccttcgggtgccacttccgtgagctggaaacctgtggggtccctaccgactccttcctagtcacctttcctttcccctgcctggtccatggccccattgtgcagattcaccacctaagcatacccaagccctcttctgtctgccagcagcctgccctaggccattgtcatcaccacctaagctcttctccttacgtatgccctagccctcacccttcaatctgttccacatgtgagatctacaattttgatcatggcactctcctgcttaaagccatcaatagctcaccrttgcttttaggatgactcctgcccttcacttggcacactaactccttcatcctgcaggtctcggctcaacagcatatctgcagggaggcccccttggacctcactcctcttgccctctacctgtgccaggccaggtcctcttgccatctgttctgctcaagctgggaacgctccgcacttgccagagcccaagggcagctcctcctgactaagtgctatgaggcaggggcagggggaggggcaaggacagggctgtccacacgttgtcctcagtgctagcagtgaagtgttgtgtctgcacagacatggagcccaacagacgtgtgctgaatgaatgca

SEQ ID NO: 17858 - DNA, 1710 bp, Homo sapiens
tgtagctggtttttttctgtgatttgtctatgcatgtgtgtgtccttgtgcgtgcacaggtgtgtacacatgtgcttctctgcgtgtgtgtggacctgtgtatgcatatgtatgtgcatgcacactctttccccagcctccttacagtaatcaggggaacctcagggacctgtcctttggaacacagacatgtgctacctgtgctcctgctgctggcctcagcccccgtccccaccccaagagtcctggagacccacacatgccacgcaatgctgccttgcccagaaccctggagtggctccccacatgctttctgttggccttcagggtcgggggcctcctccaggccactctcacttctcctgcagatgacctttctggctgctctgattggcatgtggcttcctctactgaaaggcattccgtgactcttcactgagcaagtcctctgatgctgaggctgtgtgctgggctccaggagaggcagcaggggtaatcatgggccagcattccaagacgtcttaggctagtgcagtggcaaaatcctggagctcagacgtaaggtgtgctagagagaggtgagcttggtgaggggtgagagcttcccaacaggaatgcccccctctatctcaccctgagaagcattcttgtctttgagagttccctggcacagcccctcatctggttccccagcggaaaggatgcccttcgtcccccttgaccccttgcacctagtagatccctttcctcttaggactaacggtttcccatcatcagagcttggctcagctggcacgaaggaaggaggccaagggcagtctgactgcaggggcagtacccttgggagacaggggctgggggtcctctgccctctaattgtcctttcccggcagcttccctcaatcaagccattgatttgagggccccctctgtgcttcccctccaggggagcttcttcagggccatgctttgattgctgcggagcgagtgaagcctgtgtgagcatcccctctgagcatctctcaccacctgccctgcatctctgcttggacatctcaaaggcactcagccccagctggcaccttcgggtgccacttccgtgagctggaaacctgtggggtccctaccgactccttcctagtcacctttcctttcccctgcctggtccatggccccattgtgcagattcaccacctaagcatacccaagccctcttctgtctgccagcagcctgccctaggccattgtcatcaccacctaagctcttctccttacgtatgccctagccctcacccttcaatctgttccacatgtgagatctacaattttgatcatggcactctcctgcttaaagccatcaatagctcaccattgcttttaggatgactcctgcccttcacttggcacactaactccttyatcctgcaggtctcggctcaacagcatatctgcagggaggcccccttggacctcactcctcttgccctctacctgtgccaggccaggtcctcttgccatctgttctgctcaagctgggaacgctccgcacttgccagagcccaagggcagctcctcctgactaagtgctatgaggcaggggcagggggaggggcaaggacagggctgtccacacgttgtcctcagtgctagcagtgaagtgttgtgtctgcacagacatggagcccaacagacgtgtgctgaatgaatgca

SEQ ID NO: 17859 - DNA, 522 bp, Homo sapiens
tcttgagtacatttttagactgactactattccacctacacagtatcatgcttcacacatatagagtcatcttttggtatcgacgggggattggttccaggacccccgcaatacaaaaattacaaaaatccaaagatgctcaaatcgyttatatgaaacagtgtagtattcgaatataacatatgcacatcctcctgtatgctgtactgtaaatcatctctagattacttgtaatacctaatacaatgcaaatgctatgtaaatagttgttatatacttatttgtattatttttgttgttatattgttgttttcttttcttttttcttttttttttttttttttttttgacacagagtctcactctgtcacccaggctggagttcagtggtgtgatctcagctcactgccacctccgcctctgggttcaggtgattctcctgcctcagcctcatgagtagctggtattacaggcactcgccaccatgcctggctaatttttgtatttttagtagagacaagg

SEQ ID NO: 17860 - DNA, 596 bp, Homo sapiens
caactgcacagaacttcctgaatttgcccagtcacgagaatccccttggggtacttgttcaatatgcaggccccagggctctgactcagacctacagtctgggagccaggatatttaagaagcacctcaggtgattcttagggtcagccaagtgtgggaagtgctgctctggaatatgccctagagcctagagcagcccccagcacagtgaggtccaactggttgcttgaggtgtaactgggatggagtcaagcccaggggaggtggcaggcaagcagcaggtgaggatgaggagacgggtccccagtaaccaaaggaagaaccacccatataccaagccacaaaacaagtatcaacaatacatagaccacactctctgaccacaatgcaatacaattagaaatcaataataaaaagacagccaaaaagtatccataagcttggaaactcaaaccacacttctaaataattcacatacaagaagaaattgtaatggaaatcatgagktgcttaatgatcaatgaacattgagtactatatatcaaaacttgtgggattcaactaaagcagtaattagaaatctggggccttgaatg

SEQ ID NO: 17861 - DNA, 696 bp, Homo sapiens
ggctggagagcagtggcgcgatctcagctcactgcaacctccacctcccgggttcaaatgattctcctgcctcagccccccgagtagctggaactgcaggcgcgtgccaccacatctggctaattttttgtatttttagtagagacggggtttcaccattttagccaggatggtctcgatctcctgacctcgtgatctgcccacctcagcctcccaaagtgccaggattacaagcgtgagccacygctcctggccctcagacatgtttttaagaagtcaggctagtccaacaacccaccatctcatgtcatcctcacttcctcctctacaagccccctgccacctatacacaaacaccctcaaagatggagagcgcccactcttccaaaaggaggtaaggagtagaagcagcttcatgcagcaaagcaagtgctggtcctgatggaaagaagacaccgctaacaggacctgcatttcacctggggaacatgcagggtggagacaagggatgatactgacccaacgatttactgtttataaaagcatgtgtagggtcgggcacggtggctcatatctgtctgtaatctgagtgctttaagaggctgaggtaggaggatcccttgagcccaggagctccagaccagcctgggcaacaatgcaaaacattgtatctacaaaaaataaaaataaaaacac

SEQ ID NO: 17862 - DNA, 580 bp, Homo sapiens
ttgactgggtttggccacaaaagatatttgtataagacttgggaaatgggagttaaacaccagccttttcctgctctgaaggtggctgtgggcactttgagaggggatgcacattgttgctgagctgctggcttgcctgtgagggtgaggcagcaccatctcccatcagatcctcttcatcttcctgrgccaggtgtaagtgcagtcccatggcagaaggtgtcagcttttgcaggtctcctgcatcatcatgctaagagtaattgagagacagtcatagattccaatctgctatggtctctctaacttcaagtttggttttcttttccaacagtttacacatctgatgtagagtggcttcagcccaacatcaggttcaacagccttgcaggcacttcttcaccatatcccacaattgtgaaaagtctgttcctattaatgatcctttattctataccactgataatgattctgcttctctgattaaatgctccctaatacactatgatttcattttttatttaaaatcatattctagttcatagcatgatggaacaaattatgcttttcacaagctttg

SEQ ID NO: 17863 - DNA, 580 bp, Homo sapiens
ttgactgggtttggccacaaaagatatttgtataagacttgggaaatgggagttaaacaccagccttttcctgctctgaaggtggctgtgggcactttgagaggggatgcacattgttgctgagctgctggcttgcctgtgagggtgaggcagcaccatctcccatcagatcctcttcatcttcctgggcmaggtgtaagtgcagtcccatggcagaaggtgtcagcttttgcaggtctcctgcatcatcatgctaagagtaattgagagacagtcatagattccaatctgctatggtctctctaacttcaagtttggttttcttttccaacagtttacacatctgatgtagagtggcttcagcccaacatcaggttcaacagccttgcaggcacttcttcaccatatcccacaattgtgaaaagtctgttcctattaatgatcctttattctataccactgataatgattctgcttctctgattaaatgctccctaatacactatgatttcattttttatttaaaatcatattctagttcatagcatgatggaacaaattatgcttttcacaagctttg

SEQ ID NO: 17864 - DNA, 586 bp, Homo sapiens
ataaaagaggacaacaggcaaaccataagccatttttgtcatcgctcttccatattcacaaatgtctgcttttcatctttagaggacatccattgagtggcatcagagatccatggaataaaaaacaaattttgtcttaaaatattagaatataatacttctattatattctaaaatgtcaatagttttttttagtctaggaagaggatataaaatttaagtgttttagacaatacattttttaggatatttcgtggcattaattayctacaatctatgataaatgaatacgagaaatactgttagatacctgtggccaaagccactatcttatcccttgtcaaagatatatacattcatctttgataattaattaaggaataaagcagttttagtgtttatgtaatttgaaattttcttaatgtagggatttttaaatacaccataaatagacatagtttgaatcaaccattaggtatttgttgaaaactactttggctagcattagggggaaacacaaaaaacaaaaagcacaataaggttaggtttttgcccttgggaatcttaaagcctcttgaggaaaaag

SEQ ID NO: 17865 - DNA, 589 bp, Homo sapiens
tcagcttattgagctgggtagccttagccttttctgagctttggaaaacctcagatatcatgtcagaaaatcaacagaatctgagaaaaacaccggaaaatcatcagcaaatggtgattctgatagcatctcttccttatggggtcatcatgagaagattccatgataatccccataaagtatcaagtccagattttggcaaaagatcatgctcaataaacactagttgtcattgataataatagcatcatcttttgactttcaaggcagagaaaaagaggtatctccattgatgcctaatgttaaaaaaagtaacattttgtaaatctttggcaatatcttaaaatattttatgatgtaactgtgatgcttggaaaactttctttttagcagtcagaatctttcataaccatatgttaagtacttgctttgtgtaaacaggttgccaggcacaaagggattataaagagaaagaagaaatggsctttgcctttgagcagttcataatgtcataagaattagccatggctatattttaaataggttgtagctaacctaagtttttgctatcagtgttttatttatttat

SEQ ID NO: 17866 - DNA, 552 bp, Homo sapiens
tgctgtctaatcggggacacagcatttcacaaagcattgttgccatgcatcacaaacaccacttcaacccgtgggacgctcctgccaccattccgtcacccacccaagacagctcaaggggcagaggggtgccacctgccatgagtcaggaccagagggcctttgcctgtaatccaggtcactgtcacccttggctattcaggrgtgtgaagtgaattaaggaagctataatgtgagaaagtattttagaaatgtaaatttcacaaggggatttctcataccgggttttcctcagaaaaggggctcatggtccattatggttgcagtcacctgagattctcagtatagtcaaacgtgagcagcactaagaagcccaccagctaagaagcccaccagctaaaaagccagtccgatttttctcatggcaacccttcccggacttggagcacacagaaatcagcattcaccttgcaaggcccgattctctgggcagcacaaagcccgtgtgccttggcccacactgggaaaaggttggcctcctaattgaaggca

SEQ ID NO: 17867 - DNA, 552 bp, Homo sapiens
tgctgtctaatcggggacacagcatttcacaaagcattgttgccatgcatcacaaacaccacttcaacccgtgggacgctcctgccaccattccgtcacccacccaagacagctcaaggggcagaggggtgccacctgccatgagtcaggaccagagggcctttgcctgtaatccaggtcactgtcacccttggctattcaggggtgtgaagtgaattaaggaagctataatgtgagaaagtattttagaaatgtaaatttcacaaggggatttctcatacygggttttcctcagaaaaggggctcatggtccattatggttgcagtcacctgagattctcagtatagtcaaacgtgagcagcactaagaagcccaccagctaagaagcccaccagctaaaaagccagtccgatttttctcatggcaacccttcccggacttggagcacacagaaatcagcattcaccttgcaaggcccgattctctgggcagcacaaagcccgtgtgccttggcccacactgggaaaaggttggcctcctaattgaaggca

SEQ ID NO: 17868 - DNA, 573 bp, Homo sapiens
tcatgattttttttttttaatcaagtacaaagcaggaagaaaagttcaaactgcatcatggttttttatctttctactctctgctaagcatcagcatctgaattctctttaggagaaaatcagcagttttgtatttgaccgcagaggtatgcatggctattaagccttatgtatgaatgctctgggtgtgtgggtgmatatggagaaatcctctgaccaagaatgacctctttaggctgaaattcaattacagctgaaaagccaatgttgctttctcacaatcagattttcagaaccactgaatatgcacgttagagcttaaattccttctttcgcaagggctatcagaattggcatatgtctttgattaagcctcatgcaaatgctgatacaagccatgtctaagaaattgcaaaattttaattgctttttttccttaaagatgggttgcttaaatagtaagtcatatattgcttaatgacaagattatattctgaaaaatgtgttcttaggtgattttgtcattgtgtgaacatcatagaatgtatttacaaaaacctagttggtataatt

SEQ ID NO: 17869 - DNA, 573 bp, Homo sapiens
tcatgattttttttttttaatcaagtacaaagcaggaagaaaagttcaaactgcatcatggttttttatctttctactctctgctaagcatcagcatctgaattctctttaggagaaaatcagcagttttgtatttgaccgcagaggtatgcatggctattaagccttatgtatgaatgctctgggtgtgtgggtgcatatggagaaatcctctgaccaagaatgacctctttaggctgaaattcaattacagctgaaaagccaatgttgctttctcacaatcagattttmagaaccactgaatatgcacgttagagcttaaattccttctttcgcaagggctatcagaattggcatatgtctttgattaagcctcatgcaaatgctgatacaagccatgtctaagaaattgcaaaattttaattgctttttttccttaaagatgggttgcttaaatagtaagtcatatattgcttaatgacaagattatattctgaaaaatgtgttcttaggtgattttgtcattgtgtgaacatcatagaatgtatttacaaaaacctagttggtataatt

SEQ ID NO: 17870 - DNA, 573 bp, Homo sapiens
tcatgattttttttttttaatcaagtacaaagcaggaagaaaagttcaaactgcatcatggttttttatctttctactctctgctaagcatcagcatctgaattctctttaggagaaaatcagcagttttgtatttgaccgcagaggtatgcatggctattaagccttatgtatgaatgctctgggtgtgtgggtgcatatggagaaatcctctgaccaagaatgacctctttaggctgaaattcaattacagctgaaaagccaatgttgctttctcacaatcagattttcagaamcactgaatatgcacgttagagcttaaattccttctttcgcaagggctatcagaattggcatatgtctttgattaagcctcatgcaaatgctgatacaagccatgtctaagaaattgcaaaattttaattgctttttttccttaaagatgggttgcttaaatagtaagtcatatattgcttaatgacaagattatattctgaaaaatgtgttcttaggtgattttgtcattgtgtgaacatcatagaatgtatttacaaaaacctagttggtataatt

SEQ ID NO: 17871 - DNA, 573 bp, Homo sapiens
tcatgattttttttttttaatcaagtacaaagcaggaagaaaagttcaaactgcatcatggttttttatctttctactctctgctaagcatcagcatctgaattctctttaggagaaaatcagcagttttgtatttgaccgcagaggtatgcatggctattaagccttatgtatgaatgctctgggtgtgtgggtgcatatggagaaatcctctgaccaagaatgacctctttaggctgaaattcaattacagctgaaaagccaatgttgctttctcacaatcagattttcagaaccactgaatatgcacgttagagcttaaattccttctttcgcaagggctatcagaattggcatatgtctttgattaagcctcatgcaaatgctgatacaagccatgtctaagaaattgcaaaattttaattgcwttttttccttaaagatgggttgcttaaatagtaagtcatatattgcttaatgacaagattatattctgaaaaatgtgttcttaggtgattttgtcattgtgtgaacatcatagaatgtatttacaaaaacctagttggtataatt

SEQ ID NO: 17872 - DNA, 613 bp, Homo sapiens
taatttctggatattcaaggttttactatatctaactttcaaagaaatagcagaaaaacaaaacaaaaaaaaccactacatttgacactaaaaccatacaagattaattttaatcattttctatgatttagaagatacgtatcagtgttttyacatgcaaaagagaaatcattgtgaatatcacttattttttaaagcataagttagagctttccctttagttagatataagcttttaaaataccttgcttatgcatagcaattacagtagttacaactgtatgtcacactgtatagttccttatcacctgtttcagtaccttaaaggaaaagtaccaaagattgctataaagcatgcaatctttaaatcacctaagagaaatataaaatactattttcttgctccatctctcaatatacatgctctaaatatacacatctttgctataaagaaataaacattataaaaattagatatattaattttaataaaacccagtttaaactgcttaccaagtatctctgaatctctggctggcaatatagttcaggccaagcaaactaagtccattactacttgcagtgtagtacaatataattctcagccagcaca

SEQ ID NO: 17873 - DNA, 2138 bp, Homo sapiens
ggtgaaggcttcaggctctttccatccatggagaaaggtgaaggggagcagatctggagaaatacatggtgagagaggaaacaagagtgttcggggggaatgaccaggctctctggcaaccagctctctgggaaccaatagaggagagctgtataactcattcattaccacaagcatggcagcaagtatttcatgagggatctgaaccctcaaccctaacacttcccactaagctccacttccaacatcggggatcatatttcaacatgagacttggaggagtcaaacaccccatacccaaactggcagctgggctccaaaaacttgaattgggcttttgttctcaattacgtcaaaaagtcacagggattagcctacaatatgatctacataagggtgtatatcataccacgcctgtacatatttgcatttcgcaattgaatttcatttctcaaagtttaaaagtggctaccttactccatatatcctatcttaacatgacagaggatattttgtagttcttagagggtatagtaggtgtcggagaggtcactttagacataattacagtaactagaaactagggaaatgtatcctctagaatgcaaggaattattaaaaactaatttcagagtaatgaaaaccaagaatatttgattacaataatgataataataagttaaatgtttaaaatattagttactgcattaagcatttcatgtatattaatcatttaaggcacacacacacacacaatcacatacatactatttgatgcacaatatctcaatttttaaggtgaagaaaatatttctaaaatgagttgcccaatgtcctttatctcttaattctagaaacactaatgtctgcagcaaatttctggaaatttgataatagatatgtctactatcttaactgttgtgatggtttcacaggtttttatatatgttaaattttatcagattttacactctgtatatatgcatttattatgtgtcaattttagattttaaaaagctgctaaaaaccttacaatcaactatctatcaatagtacattgctcttacacccctatacttttctgtttcaagttatgatagaattatcacagtgattgcacttaatctgtagattaattcatggataactgacatctttgatatcctgggtttcctacctggaaatacaatatatttttacacatatttgtatattcttattttcttcatatagtttgttctatataactcctgcaaatattctattagatttatttctaggtagtatatgaatttgttgctattgtgttagaaatacattttgtgttttacattgattaaaggattattgcttgagtgagttgggtgtgaggttcaggaagaaaaaaggtaattttaaattaaaataggcttgtatgaaaaatttagcacaacatttcaatggagcttcctttctatgagctgcagaacttctcttctattttcttattcagtgctgatattacttatgtttttttctgtttaagactaaagctttataccaaatacaaaatattgtacattatcaagagtctgtggaacatgctattctaagaatatataaagttgtatatgcatatatatttcatatctacatctatcaaaaaagaaacagagagattattattcttttcaaaatggctttcttttttggaaaagcagaaaaaattgtctacattaaaaattgcattctgttctccaggaaaataggcgaaagtgttagggtggtgaaagctccaccctcaggccgaaaagcctgaaaccgcagcccaaagtgagatcttaaattcctattttcctgctcatatgttggcttttcataaactacccatgcctgccccgcctcccatcctgttcctataaacatcccagactcagtcggacaggagaggagaagcagctggatgtcatagagaagtggcttgacttcagagggacagcctgacggcataattttgcagaagaatccggctggagaccaggttcttcaagggaaaattacctgccccaatccccgtccccttttcagttccyctttccgctgagattaccaggctttaatttgtttgtgtgaccttatttttcctggatgctggacaa

SEQ ID NO: 17874 - DNA, 633 bp, Homo sapiens
attgcaaggcggagtaaggaggggagggaacagatccactccaaccttggttggggtcaagagaaaattccatgtacctaaatatatgaagcttataaatcaagctgacacactcttaaataaaatatgttcccatcctyctacctgtgaagtatttctttgtaatgtcctggaaggacaggttcaaatttagaattcctggactcctaggtctctgccctggggcacagtggcatggggggagctggcccttctgtccccaccccggctctatcccgcaccacaactggtgtagcacacctgcctggacagagtggaactttacataactgcggttcaaggaccatctttgggacacttctgttgatcagatctcttttctccctcatggctgtagctgcatttgactttaagacaccttacacagccttgtagaaatgccatataaagtgagctcctgtattgatttgggcatgaagctcccttctgggacaagtgctatgtctgattgatgccttctgggagtccatataagcgcctacttcattgcctacaaattgaaggataatcacttttctaaacaggcttgcactgaattcttcagaggcaaatcagaactgaacctggctgctg

SEQ ID NO: 17875 - DNA, 633 bp, Homo sapiens
attgcaaggcggagtaaggaggggagggaacagatccactccaaccttggttggggtcaagagaaaattccatgtacctaaatatatgaagcttataaatcaagctgacacactcttaaataaaatatgttcccatccttctacctgtgaagtatttctttgtaatgtcctggaaggacaggttcaaatttagaattcctggactcctaggtctctgccctggggcacagtggcatggggggagctggcccttctgtccccaccccggctctatcccgcaccacaactggtgtagcacacctgcctggacagagtggaactttacataactgcggttcaaggaccatctttgggacacttctgttgatcagatctcttttctccctcatggctgtagctgcatttgactttaagacaccttacacagccttgtagaaatgccatataaagtgarctcctgtattgatttgggcatgaagctcccttctgggacaagtgctatgtctgattgatgccttctgggagtccatataagcgcctacttcattgcctacaaattgaaggataatcacttttctaaacaggcttgcactgaattcttcagaggcaaatcagaactgaacctggctgctg

SEQ ID NO: 17876 - DNA, 633 bp, Homo sapiens
attgcaaggcggagtaaggaggggagggaacagatccactccaaccttggttggggtcaagagaaaattccatgtacctaaatatatgaagcttataaatcaagctgacacactcttaaataaaatatgttcccatccttctacctgtgaagtatttctttgtaatgtcctggaaggacaggttcaaatttagaattcctggactcctaggtctctgccctggggcacagtggcatggggggagctggcccttctgtccccaccccggctctatcccgcaccacaactggtgtagcacacctgcctggacagagtggaactttacataactgcggttcaaggaccatctttgggacacttctgttgatcagatctcttttctccctcatggctgtagctgcatttgactttaagacaccttacacagccttgtagaaatgccatataaagtgagctcctgtattgatttgggcatgaagctcccttctgggacaagtgctatgtctgattgatgccttctgggagtccatataagcgcctacytcattgcctacaaattgaaggataatcacttttctaaacaggcttgcactgaattcttcagaggcaaatcagaactgaacctggctgctg

SEQ ID NO: 17877 - DNA, 546 bp, Homo sapiens
cccacatctaaaacacccttctactgtgactactgagctatgtttttctccagatttgtttggaggtggaacatatgtgccaccttcttgatctaatctctccacctacaataaattaaaataaaacctaaactacaatatggataaatctcacatatataacattgagcaaagcaagtcagaggtaatagtacactctatagcactatatttatattaaagttcaaacaggcaaaactaatctatgctgttagaagtcatgattggggttatctttagggggctaatgaatagaagagggcacaagaaggtctttttgggtcttggtaatgttctgtttcttgctctgggagctggttgcatgggtatactaactttgtgaaattcattcagccatacacttagaacttgtatacctgtgttatacttcaactaaaaaggttttggtgtgcaggggtctcttatttcagataaaacagactttaaaccaacatgatcaaaaaggacaaagaaaggcattacataggccgggcrcagtggctcatg

SEQ ID NO: 17878 - DNA, 994 bp, Homo sapiens
ctagacacaaaatgtctaaatgagatttttattttaaatgggtgagggtcagaaacaaataatttttttaaaaaatttaatgtcaaataagggtcttggttttgacatctataataaaacctcaactaatgaatgcaataatactatctcttcttttaccaagcaaaaagattaaatgttttaaaacatttctttcaaaatatgtttgaaataaacaacatgccgtgactgtcaagtttggcttcaaatgatttttcctgtctccattatttaatatatgtctgaattaactaccaatattatgtccagttgtcatcacttagattatctatcacaatcacgcagtgatgttaattgattcagaagtagtaccagagaatacattttcttagtttagctcataaaatctcagggtaacagtgttcacaagatgactgatgtcatcktctatgttctaagatctgttttcttcttcagagcagatattttatcaaaatgactgagccctaattttaaaattaaaatgaacagaactgctgaaagtctgaataaatagataggctttaggctatatgtatctcttgttttaataaattggtattttagagtattttggtcaaacaaaaatatacaaccacactgttagtcatactgctagtctttgctaacattagagttcagccatgctcattcatttatcaaatacttgaggagcctccaccatgtgcctgactttgcaagactttccaaggacactaggagacatatgacatggcagcttcagcaaggcaggctaatataaccaacctgctcccgcagcatttggtaggtgtcacgggcactgagcagctgagccctttgtaagacctctgaagccaatccttcctattctccctctacaacttgatgtgctcaaacctcactcagtgaactggctgcaccagtgctacctgggggaaattttggaaaatacagatccccaggtcccacttca

SEQ ID NO: 17879 - DNA, 508 bp, Homo sapiens
tcctatgatgtgttttagaggaaggtcagcaaaggttttattacctgcttccggggagaaaggtggcaaaggarggtcagagtaatatttccacttaaaatttgccattttctcaaatccttcagcttaaaaaattcagtttgccaaggtgccatattttggggcagcgtgtcctcaaccccatcactgattattaaatctgaccctgcagttaatcctgtaaatcaactcagataagcaactgtagccatataatgatggccaggagattaagttccaccttaactctggaaaagcatgtttatattttaatgtcaagagctgccctcttgtctatatgtgcttttttattgttattagtaactataattatgcttgacattaacaatggctataacaaatatgaaagccaaaagaatcaaaggaaacgttttgctattaaagtacttaagtattttatttaaattcgttttattggtatctttgattttttttttttttttttttt

SEQ ID NO: 17880 - DNA, 645 bp, Homo sapiens
atcaatgtcttaaaaaattaaaataaaaaccaacttaataatgtaaaagatgggaagtttccaccgggctgggtgccagrgctagggcttccctgaggacgcagaagcaagaagcagggaccttggcacgcaccagactttccctcctgacagagcctaagccccccgcccacgcctcaggcccccggcatggtgctgctggctgggacccagccacagggtggcggggagcgctgcgtgaccctgccaccgccgtccccactcctaggcacacaggtcgaggaggaccgcgctgactgcaaagagttccaggacttctccagtctgcccgacacccgcagcatcacctgggacgactctttctacactttccaggaggaggaggagcacggcgtccagggcgtggagagcgtactggaggagggcgtcctagaggaggtcgtattggaggcatggggctgctgcagactttggtgcggcagggggtgagcattgagaagacgtaggagctgaccacaatggctagaccggccttgatgtcgcctgcagatcacctgaggttgggagtctgaaagtagcctgaccaacatggagaaaacccgtctctactaaaaatacaaaattagccgagcatggtggcacatg

SEQ ID NO: 17881 - DNA, 645 bp, Homo sapiens
atcaatgtcttaaaaaattaaaataaaaaccaacttaataatgtaaaagatgggaagtttccaccgggctgggtgccagagctagggcttccctgaggacgcagaagcaagaagcagggaccttggcacgcaccagactttccctcctgacagagcctaagccccccgcccacgcctcaggcccccggcatggtgctgctggctgggacccagccacagggtggcggggagcgctgcgtgaccctgccaccgccgtccccactcctaggcacacaggtcgaggaggaccgcgctgactgcaaagagttccaggacttctccagtctgcccgacacccgcagcatcacctgggacgactctttctacactttccaggaggaggaggagcacggcktccagggcgtggagagcgtactggaggagggcgtcctagaggaggtcgtattggaggcatggggctgctgcagactttggtgcggcagggggtgagcattgagaagacgtaggagctgaccacaatggctagaccggccttgatgtcgcctgcagatcacctgaggttgggagtctgaaagtagcctgaccaacatggagaaaacccgtctctactaaaaatacaaaattagccgagcatggtggcacatg

SEQ ID NO: 17882 - DNA, 556 bp, Homo sapiens
ggtttgttctgttgacaaattcattgatttagttcaaatgaactaagaagagttagataaagactataatctttataaaaataaatagagaataacatttctttgtattttatattttgagagtttgaatgaaacaatgtttactgaaatatttacttctgtaagaaatacttctaattatccaaaacttcaacaaaccacttggggagacaccagatatcaccagattcaagccatgcaaaatctcagggwcactcacaaattgttccacccaacataagtcaacaaaactgttggaaacaaaacagaaatttgaaatacagtcaaaatatacaatgtaatgctttactatacttcataacagtatctttttaacaagacactaattgagttagcagttactaataatttgcaaaattattgttgtttatacctcaattagtgtgcaccccattttttatatcacaaatgttttcccctgctattctgaaaaatttattttcatcttttaagactcagaaagtaggctgggcataatagctcacatctgtaatcc

SEQ ID NO: 17883 - DNA, 556 bp, Homo sapiens
ggtttgttctgttgacaaattcattgatttagttcaaatgaactaagaagagttagataaagactataatctttataaaaataaatagagaataacatttctttgtattttatattttgagagtttgaatgaaacaatgtttactgaaatatttacttctgtaagaaatacttctaattatccaaaacttcaacaaaccacttggggagacaccagatatcaccagattcaagccatgcaaaatctcagggacactcacaaattgttccacccaacataagtcaacaaaactgttggaaacaaaacagaaatttgaaatacagtcaaaatatacaatgtaatgctttactatacttcataacagtatctttttaacaagacactaattgagttrgcagttactaataatttgcaaaattattgttgtttatacctcaattagtgtgcaccccattttttatatcacaaatgttttcccctgctattctgaaaaatttattttcatcttttaagactcagaaagtaggctgggcataatagctcacatctgtaatcc

SEQ ID NO: 17884 - DNA, 556 bp, Homo sapiens
ggtttgttctgttgacaaattcattgatttagttcaaatgaactaagaagagttagataaagactataatctttataaaaataaatagagaataacatttctttgtattttatattttgagagtttgaatgaaacaatgtttactgaaatatttacttctgtaagaaatacttctaattatccaaaacttcaacaaaccacttggggagacaccagatatcaccagattcaagccatgcaaaatctcagggacactcacaaattgttccacccaacataagtcaacaaaactgttggaaacaaaacagaaatttgaaatacagtcaaaatatacaatgtaatgctttactatacttcataacagtatctttttaacaagacactaattgagttagcagttactaataatttgcaaaattattgttgtttatacctcaattagtgtgcaccccattttttayatcacaaatgttttcccctgctattctgaaaaatttattttcatcttttaagactcagaaagtaggctgggcataatagctcacatctgtaatcc

SEQ ID NO: 17885 - DNA, 1199 bp, Homo sapiens
caaaattccaccccaaactcaattcagcataagaagactcctacccaaagcataaacatatatactcacataaaaaataaaaaaaacttttaaaattaataaagaaattaaggttttaagaaagaaactttctccctactagagaaaaccatcacctcttggtggggaaaactgaatttaaagttcaggttcgggcagttactacttatgtgatggagtaaatcaattcacctcactgagctatagtatccttttctgaaaaaaaaaagataataataatggttctctcctcacaaaactgtagtcagaattatataaaataaaatatataaagacactctgcaaactatcaatcatcttatacatataaattgttattactggaaatcctagcttatattttggacagagaatttcagagtcaagggaagtcatttcacaaatgacaaggctgtgattcaaaagcctaaattactttcstacttacagtggcatggatgacggagcagaaatagagaattcttgattaaccaggagaagaatatcataggcatgggtgtgagatcaactggagattcaaggaagctaaagtgcccagaatgaactaatgttgtaatgtagactgtgagcagagataaaattccagaagccaaggagtgttgtacggtaagtcctggcagtgcctttggtgaggagagtaaagaagaaatagaaagattagccaaaaaaaatttcaactataccaaattagtattccatcctgcacagtaaaattttgatgcctttacaaactaaacaaagtagggaatttaagataattcccatgtttatgctgtttctttccactggtcagaataattaaccataggttaggaagttaagaaaacaataggatagacgtcagtgaagttcaagtgctttaattggattcctttgggtacagtttgtttccctttttctctgaccattaatccagcagaggaaagtgatctaacacagcaccatgacatgaagggacggaccctgagagcctgtctctctatgatgactgttcttgtgcatccaggcagcctattgaaactaacaatgcctgctgctgctgccgaagaggatcatccaaactctgaaaatgaaacacatcacacaaagggatgaaagaattcttattccacagggtttagcttgcagctggtcatgca

SEQ ID NO: 17886 - DNA, 611 bp, Homo sapiens
catgatgggtcaggggcttctcaggtttctacagcccaaatactgcccagctccggaggctcctatcccaccaggagtaggtataacacaaatccttcccaaagatcatgcggtacctgctgagtggatgacaccctcaactctttcccagaggcccagggtcccatggggcagggaaacagaggaagatggagctcctcaagggcctgacaaggrgctgagtcccagccagggcctcacccaagatgaggattctccatgggtttggagttgggtttccttttcctgccctggaggaggaggcagaggtactaggatgggggctgagctccagctgagcagggttaagggaagtgtgtccaccaggcatctgtgcatgggggagttgttgggaaagcactggccactgcccagtgttctgccccagggcagctcagggggccctgagcacctagggtccaggaagtgccgtgcattgaggtttgttgagttggctcctctggtgttttgctgatggggtaaggaggcaaatggagaccccaggccagggactctcctgtcccacaagtgcccagctcccccaggaggacctggctcaccccaagccagca

SEQ ID NO: 17887 - DNA, 685 bp, Homo sapiens
tgcatgttctcaaagatgcggttactttcagtatcactgctttcctcatggtttccacttcaatattagtctaacttgccttagggacccaagatggctgctattcacttcaattagctaaacacttctcttttcatggctgtgagagactagctacctcttccataaatgaattttctcttctttctgggcacaatagtctctatttcccagcctcttttacaattaggtgtatccatgcaactcagttctagccaatggcgtgtgagtagtagtgatatccaccacttgcagacctacacataaaggctcccagacacatcttctgtgctctttactggaacacttgcttgattccaataaatacagcaaccttagcagctacatattgcagttggcagagctttcatgtttcagcttcttcatattttttagttttgttgtcactgttggttttttttttaattgattcaggagatgacctaataaaaaattgaagaaaaataaagcattttgttctggatttctcattaggaacatgaggtttactctattgcaactggcttagttcatatgatcatcccctgaggtgagggaaaaagatgygtgaattgattaagccaaggtcacatggtcgaaatgtagaattgggttttgaggtcagtttccctaaatcacccagata

SEQ ID NO: 17888 - DNA, 905 bp, Homo sapiens
aaaaatctagatctagcaagaggaagatggaagaacaatgacatattccaaatgtgagcaatttgcacatattcgaatgggctagccatgtaattatctaatttgtgcattgtattattttagtgctccaaagttggtaatgtatgttattttttgtattctatgtctttgtctttttacatttatatgtctttgtcttgtagtcataatatagtactaagtatacttttgttaagtatacaaaaccaagtaaaaattttagaaagtaatctaattttggctgggcacgtaactcacacctgtaatcccaggactttgtgaggccaaggcaggtggatcatgaggtcaggagatcgagactagcctggctaacacagtgaaaccccgtctctactaaaaatacaaaaaattagctgggcgtggtggcacgcgcctgtagtcccagctactcgggaggctgaggcaggagaattgcttgaacctgggaggtggaggttgcagtaagccaagattgtgccactgcactgcagcctgggcaacagagcaagactcygtctcaaaaaaaaaaaaaaaaaagaaagtaatctaattttatcaaaaagaaaaagttaagtgtaaaattatttggaatgtcagtggaaaaaatatatctcttcagacaaactaaacgatatatcatgtagactttacttttttttaggtttctttggaagtatatttggattaatgggtgtatacatttatgatggagaactggtatcaaagaatggattttttcagggatataaccgactgacctggatagtagttgttcttcaggtaaagcatttaaagtcttagatttaatgctaataaactgtattttaatacaaagaatcaaagtagctcctgatatactgatgtga

SEQ ID NO: 17889 - DNA, 592 bp, Homo sapiens
gaacttccaacctcaggtggtctgcccacakcagcctcccaaaatgttgggattacagatgtaagccaccacgcccagccctactctccccttttatacctgctttcttgtgtgctacaagcactgtgacacatggtttgcctgcaagttttatcaaatattttgatatactatcacaaaggttattggctctccatatgttagaatctgtttccttgttactcactgccagtctgttaagccagtgccacttgttttggatttttacttccaggtccttatttctgtattacttaagatatatactaagctgctacaacaaagacatcacaaaaaactcaagtcgcttgaatatggtcaaagtctgtttttcatatagcagtctagacgtgggtggccaggttgactgggtgacatgtctccatacggtcttttggggacccagatttctcccatcttgttgctgatttgtctggtacaatgttgccgttgtctacatggtccagaaagaatagcacatgggttcccatctacagaaggtggagagaggttggagaagtgccctccactgttttaatgatgagacacagaa

SEQ ID NO: 17890 - DNA, 1767 bp, Homo sapiens
aaccattcattgtgaaacagcaacatagagataccatggacatcccaaaatctaaacaaatccccaaactaagactgcaaatgaaacagagctctacctactttaaagagcactttaacagtgctcttcacagtacattatatagtccaagagaagagaaagtatattcttccccacacaacatgttattggttcttataaaatgctcccttgcaaataaaatttcaaatttgatcatggcctacatataatttccagctttgaaatcttggtagggagagacagacagggaaatggaagataagaaaagttattaatttttttctattttagttcagtaattattgaatataattgatacagaaaattagcatgctacatcctcacccatgtttgtttatctattcattcagtcaacaatgatttatttattgcctactttgtgccaagcactatgtatacatatttatattacaacacacaaacactatgaaaatggtgcaatcttttcccttctttacagtgcagttcaaacgccacttcctctggaaagcctcactaactaacctaagcagagataattcagatttcttctacggcccatgggtctttgtctatatccttactaaagtgctttccaccatgtgctgtgatttaccatgtttttatgcacttagtagagctttaataaatggatactcacttttcagctgttaggccttccatcatattatacattagagcaacaacaaaagaaaccctacttattttgccaaataattggaagtctatggagaaatttctaaggaaatattgacataaaatatcaaagcaacaatttgtgctgattttttaaacataattaacctcttaaggaaaactcaatcatttttgacttactaatgcccgaaatcatggtccaaattgttatgcctcttctgccagagacatggactccaaaggagatgagttctcacaggaatggagaatgaaaagacacataaagtgtaagtggtacaaagactggaaaagacaatggatagtgttggaaagaagagaaacacaaacacctaatttgcttctctcctagaggtatttcattcattatgcatatgtgaatcatagacatatatgaccttgaaagaattggcaaaactgcaagaatgctcacagtaatctcatcctacttccatgtattcagtgtccataaaatgcaagatcaactgtctgcaaatgcccagtgtgaaactgatcctgtagaccctggccaacagtggctgactctgcagccaaaaatttacagtgttctttggattttactggctttttcatgaaatctaacctctcattaccaaatgtaactttttttcctattctttaattttctgggtctgtccttatgttgcaagtacatttatattactatgacaacagatttacaaagcaaaaaattgacttggtttcttatctaagattatattttctaacaaaaatatagatagtttctttcaagttccataaagaattctgtaacttttaaaaggattgtaaatgcctgcaattcttgatattaatataaccataaagctataagtacaagcataaagataaaaagtatgccttaaatatataaaatatctaaatatctcaaaactacagctctaaaatatcattgggactttattcattctacaggcaaagtgaaatgtctcttactcttataatgcttagggagaaggtttagtktggaatcttcagacttgggaa

SEQ ID NO: 17891 - DNA, 1767 bp, Homo sapiens
aaccattcattgtgaaacagcaacatagagataccatggacatcccaaaatctaaacaaatccccaaactaagactgcaaatgaaacagagctctacctactttaaagagcactttaacagtgctcttcacagtacattatatagtccaagagaagagaaagtatattcttccccacacaacatgttattggttcttataaaatgctcccttgcaaataaaatttcaaatttgatcatggcctacatataatttccagctttgaaatcttggtagggagagacagacagggaaatggaagataagaaaagttattaatttttttctattttagttcagtaattattgaatataattgatacagaaaattagcatgctacatcctcacccatgtttgtttatctattcattcagtcaacaatgatttatttattgcctactttgtgccaagcactatgtatacatatttatattacaacacacaaacactatgaaaatggtgcaatcttttcccttctttacagtgcagttcaaacgccacttcctctggaaagcctcactaactaacctaagcagagataattcagatttcttctacggcccatgggtctttgtctatatccttactaaagtgctttccaccatgtgctgtgatttaccatgtttttatgcacttagtagagctttaataaatggatactcacttttcagctgttaggccttccatcatattatacattagagcaacaacaaaagaaaccctacttattttgccaaataattggaagtctatggagaaatttctaaggaaatattgacataaaatatcaaagcaacaatttgtgctgattttttaaacataattaacctcttaaggaaaactcaatcatttttgacttactaatgcccgaaatcatggtccaaattgttatgcctcttctgccagagacatggactccaaaggagatgagttctcacaggaatggagaatgaaaagacacataaagtgtaagtggtacaaagactggaaaagacaatggatagtgttggaaagaagagaaacacaaacacctaatttgcttctctcctagaggtatttcattcattatgcatatgtgaatcatagacatatatgaccttgaaagaattggcaaaactgcaagaatgctcacagtaatctcatcctacttccatgtattcagtgtccataaaatgcaagatcaactgtctgcaaatgcccagtgtgaaactgatcctgtagaccctggccaacagtggctgactctgcagccaaaaatttacagtgttctttggattttactggctttttcatgaaatctaacctctcattaccaaatgtaactttttttcctattctttaattttctgggtctgtccttatgttgcaagtacatttatattactatgacaacagatttacaaagcaaaaaattgacttggtttcttatctaagattatattttctaacaaaaatatagatagtttctttcaagttccataaagaattctgtaacttttaaaaggattgtaaatgcctgcaattcttgatattaatataaccataaagctataagtacaagcataaagataaaaagtatgccttaaatatataaaatatctaaatatctcaaaactacagctctaaaatatcattgggactttattcattctacaggcaaagtgaaatgtctcttactcttataatgcttagggagaaggtttagtgwggaatcttcagacttgggaa

SEQ ID NO: 17892 - DNA, 530 bp, Homo sapiens
taacatcttgttataaagctgtttttttttwaaatcaagtttagttttcttctgggttgaaacgcactcaaaaactaataacaaaaatataacatttcatttattttgatgcaattaggatttctttctaatacacagtttagggccttggaaatgttaatccatcttagataatggaattctaaaccaaacttccatgggtgtgatttaatcatgtaattttccccttaaaatacccagttgaatcaagtgatatttaatttcctcgctttgtatgaaaacattttcctcccatgctacctttctctttattccatgaacacattattctaaagcactgtgaagcctgcaaatgaaagcctcgcacagacatgaggagcagggaccatccccacccgtgtcctggtgcacctgtccctttctatggagcagggaccatccccacccatgtcctggtgcacctgtccctttctatgtgtgcctcattcatcactaggcttagtcttcccatctctttcgagacagctact

SEQ ID NO: 17893 - DNA, 530 bp, Homo sapiens
taacatcttgttataaagctgtttttttttaaaatcaagtttagttttcttctgggttgaaasgcactcaaaaactaataacaaaaatataacatttcatttattttgatgcaattaggatttctttctaatacacagtttagggccttggaaatgttaatccatcttagataatggaattctaaaccaaacttccatgggtgtgatttaatcatgtaattttccccttaaaatacccagttgaatcaagtgatatttaatttcctcgctttgtatgaaaacattttcctcccatgctacctttctctttattccatgaacacattattctaaagcactgtgaagcctgcaaatgaaagcctcgcacagacatgaggagcagggaccatccccacccgtgtcctggtgcacctgtccctttctatggagcagggaccatccccacccatgtcctggtgcacctgtccctttctatgtgtgcctcattcatcactaggcttagtcttcccatctctttcgagacagctact

SEQ ID NO: 17894 - DNA, 596 bp, Homo sapiens
gggacagaacagggccaaatggaaaagaatgaaagagaaagacagatagacacacacacacacacacasagagagagagagagagagaacgagctcagtgaattgtccaggtgacacactgatgagggagtaacaggacactctgagttagtgccctcaggacacacagcatacagggatcatgaaaagactgtgctcaataattttccataaaatgtgctcaagtttccatgcagtcgccatgagaatacagtttttgaagtctggtccacctacagtaggttagtaaatgataaggggaggaagaaatggaaacctaaatatctactgcaatgaaaaccaacagcaatgttagtaggaataattcaggcttgcttgaaaagatgtaatcgataatgtcagcccgctctgttttccctgaaccaggagtctccagatgtcaacacagaagtagctgttcacaattgctcagttacctggggcatggtgggccttggtcttcttcctcttcttcgtcctttttaattcctgcaatacattcagacagggacagacaaaataagccaattcacctacacccataacagtccactgtc

SEQ ID NO: 17895 - DNA, 596 bp, Homo sapiens
gggacagaacagggccaaatggaaaagaatgaaagagaaagacagatagacacacacacacacacacagasagagagagagagagagaacgagctcagtgaattgtccaggtgacacactgatgagggagtaacaggacactctgagttagtgccctcaggacacacagcatacagggatcatgaaaagactgtgctcaataattttccataaaatgtgctcaagtttccatgcagtcgccatgagaatacagtttttgaagtctggtccacctacagtaggttagtaaatgataaggggaggaagaaatggaaacctaaatatctactgcaatgaaaaccaacagcaatgttagtaggaataattcaggcttgcttgaaaagatgtaatcgataatgtcagcccgctctgttttccctgaaccaggagtctccagatgtcaacacagaagtagctgttcacaattgctcagttacctggggcatggtgggccttggtcttcttcctcttcttcgtcctttttaattcctgcaatacattcagacagggacagacaaaataagccaattcacctacacccataacagtccactgtc

SEQ ID NO: 17896 - DNA, 596 bp, Homo sapiens
gggacagaacagggccaaatggaaaagaatgaaagagaaagacagatagacacacacacacacacacagagasagagagagagagagaacgagctcagtgaattgtccaggtgacacactgatgagggagtaacaggacactctgagttagtgccctcaggacacacagcatacagggatcatgaaaagactgtgctcaataattttccataaaatgtgctcaagtttccatgcagtcgccatgagaatacagtttttgaagtctggtccacctacagtaggttagtaaatgataaggggaggaagaaatggaaacctaaatatctactgcaatgaaaaccaacagcaatgttagtaggaataattcaggcttgcttgaaaagatgtaatcgataatgtcagcccgctctgttttccctgaaccaggagtctccagatgtcaacacagaagtagctgttcacaattgctcagttacctggggcatggtgggccttggtcttcttcctcttcttcgtcctttttaattcctgcaatacattcagacagggacagacaaaataagccaattcacctacacccataacagtccactgtc

SEQ ID NO: 17897 - DNA, 596 bp, Homo sapiens
gggacagaacagggccaaatggaaaagaatgaaagagaaagacagatagacacacacacacacacacagagagagagagagagagagaacgagctcagtgaattgtccaggtgacacactgatgagggagtaacaggacactctgagttagtgccctcaggacacacagcatacagggatcatgaaaagactgtgctcaataattttccataaaatgtgctcaagtttccatgcagtcgccatgagaatacagtttttgaagtctggtccacctacagtaggttagtaaatgataaggggaggaagaaatggaaacctaaatatctactgcaatgaaaaccaacagcaatgttagtaggaataattcaggcttgsttgaaaagatgtaatcgataatgtcagcccgctctgttttccctgaaccaggagtctccagatgtcaacacagaagtagctgttcacaattgctcagttacctggggcatggtgggccttggtcttcttcctcttcttcgtcctttttaattcctgcaatacattcagacagggacagacaaaataagccaattcacctacacccataacagtccactgtc

SEQ ID NO: 17898 - DNA, 596 bp, Homo sapiens
gggacagaacagggccaaatggaaaagaatgaaagagaaagacagatagacacacacacacacacacagagagagagagagagagagaacgagctcagtgaattgtccaggtgacacactgatgagggagtaacaggacactctgagttagtgccctcaggacacacagcatacagggatcatgaaaagactgtgctcaataattttccataaaatgtgctcaagtttccatgcagtcgccatgagaatacagtttttgaagtctggtccacctacagtaggttagtaaatgataaggggaggaagaaatggaaacctaaatatctactgcaatgaaaaccaacagcaatgttagtaggaataattcaggcttgcttgaaaagatgtaatcgataatgtcagcccgctctgttttccctgaaccaggagtctccagatgtcaacacagaagtagctgttcacaattgctcagttacctggggcatggtgggccttggtcttcttcctcttcttsgtcctttttaattcctgcaatacattcagacagggacagacaaaataagccaattcacctacacccataacagtccactgtc

SEQ ID NO: 17899 - DNA, 559 bp, Homo sapiens
gtgtgcatgtggacaaggcaattcatatgatagagaaggcgtgagttagttctctctcatcccacattcaagaatatcattctattatcttcatcacgtttactttctagcatcttccagagcccccctgctcggtgatgggcctcaagtgtcaccctcagctgggaaggcttcccttttcccttgttgaaatatctctccttaaatctctgctcttgggggtgcctttgctcttatattaagaggggacataggaggctgatcagacaaaacgtcccttgattttatgtcaggatcacgtgtgcacctgtcggagctataagatgccgttcagtgaactagagacagagctggggtgcaggaggaaatgggttaggttgtgagtacatgtcagtagcttttaagtatctgtataccccctcctctatgcacgcacccggctggctccaaatgcctcttaccaaggccggcatcacacgtttagtttattaactacctaccatccttgcagctgctctgggcgctgctgtgcaygctgcctcggagcccatgaagctat

SEQ ID NO: 17900 - DNA, 1169 bp, Homo sapiens
atataatcactagattaaacaccaagataaatgctgaaaatgtcttctccttttatttttctgttaattgcctctattcccagttgtatgacatggagtgttagtggtgaggtaggaagtagaagagggaattgtaaatctgttacactgtggagagagactttgattatataaaattttcaaaaagctgaatatgagacttatttcctatatgtacaacgttgatgggcttcatgatgtcagaaaattctgattaggctctcctatctgaacagtcctctaactgtccctttatcccagcttcagaaagagtacagtagctgaggggaccctgcatcaggatcatctatgggttcacagttcacttcgtgggctaaaggttctggggcaggagtatgtaagaggaactttttccactggatttcctaacccttctaatggagacgatgctacaagaaactcacgctacaatgcccatctgatatttaagacttctgagaatttagcttcttcacctacctcgtatgcacattagtccagccccatgtgcactgagtaggctaattgcattaaagacttctgacaaccagggtccaacaaagcaaacacaatgattttccaatacagatgcagtaattgtgccttaggggaaatggcagattagaagatcaagtgatcacactctccatttcctagttttgtccagctccagagtccacagctctgaaatagaagtgtctggaatgaaggcttcctgatgcaggtccctcactsgagctttaaaactgtgtgggcttttttttttttccaggaaatgaaaattgcactttaattttccctcactataatacactggcatatttttatcctacagcttatcagaggagaccaacccattgatcacaaaaaaggatagtacagaggtataaaactcaataagattttgaaaaggagttatctggtgaatgcagaaagtttccaaagttttgagttgctttttcatggcaaagtaaaataaagaatgctcatctttccaagtatgtatccgtatcataggattatgaacctgactttctgttttagagggatttcctatagagaaactcataatgcaatttaaatcccactcttccatttgcaccctaggaagatatttttctgtatagtca

SEQ ID NO: 17901 - DNA, 565 bp, Homo sapiens
gccaagtttacctaaatctccaagggtcagggagactttcatatgaaatctggactgcagaagaacaggaagaggcaaggacactgcccccggaagggaacaccctctttgatggagctgtgagaatcctccactgtgaggtggattcactgtccacaggaaggccttctcacaatgcaatttccaagtatttttaatacggatattaaggtgcctttccagctgccaccaggaaacactaacctaaaatataatcttgcatcatgttacaacaacactaaagagtgaggaggggagatgtagatgatattttttacttacacaaatagaagaaaatcttgaaaaacgacagtcagaatacgattttttatttttttatgagatggagtttccctcttgttgcccaggctagagtacaatggcrtgatctccgctcagtacaacctctgcctcctgggttcaagtgattctcctgcctcagcctcctgagtagctgggattaaaggtgcatgccaccatgcccggctaatttttgtgtttttagtggaaacgggtttcatcgtgt

SEQ ID NO: 17902 - DNA, 565 bp, Homo sapiens
gccaagtttacctaaatctccaagggtcagggagactttcatatgaaatctggactgcagaagaacaggaagaggcaaggacactgcccccggaagggaacaccctctttgatggagctgtgagaatcctccactgtgaggtggattcactgtccacaggaaggccttctcacaatgcaatttccaagtatttttaatacggatattaaggtgcctttccagctgccaccaggaaacactaacctaaaatataatcttgcatcatgttacaacaacactaaagagtgaggaggggagatgtagatgatattttttacttacacaaatagaagaaaatcttgaaaaacgacagtcagaatacgattttttatttttttatgagatggagtttccctcttgttgcccaggctagagtacaatggcgtgatctccgctcagtacaacctctgcctcctgggttcaagtgattctcctgcctcagcctcctgagtagctgggattaaaggtgcatgycaccatgcccggctaatttttgtgtttttagtggaaacgggtttcatcgtgt

SEQ ID NO: 17903 - DNA, 554 bp, Homo sapiens
tatgcaggtcagggaacacagcttgtgccacagccccaagataaggaagaatgtgccaggttcaagaaggtgtgtgatctgtccaaggtcataaggccaggaagtagcaaaattgggacttgattccaagtcttctgattgtaagatgagtggttaaagcttttctcactacatcccatatctcagaagaaccttaagaactaaccaacccacccacccaccccttactgttcaattttctgagcaattacaagtgaagttgtagaggcaccaccactggctagaggcaggtggtgcagatattgtggacaaaaaatacttttatgagagacagggaaaggccagctttaaagaactacaatctgtccycctagccaaagcaccctaaagaacacatgtgacagccagtttagtcagtcatcaaatcttgctgattacttatttaaatgtcttcctaactcttcattgcagaaggggcagaaaaggcttcctggagtctatgacttgggtccacaggtcttttccattcaaaatcaccaataggtaaccactgt

SEQ ID NO: 17904 - DNA, 586 bp, Homo sapiens
aaaatgaagacagtggaaggaaactattactaagtgtgcctggcgtggttgcctgccctgggttccgattgatacccactcttgttgttcaaaagagagatgagtgctgcttctttttggccccggcctgtggcaagtatctcagtcttcatactgctgggaagctctgtaaccaccagcaagaccagaagtggggtgatcagcagtgcaggaaagcccatttgggtgcagtccccgcacctagcccttttggaagtgcttctccaaaagggaattgtgccggaaaagtagggattgaaaccaaacagccacatcctgccatcaggatgctctttatggccccactgaccaagaaatcacagcttctgtactcagtgatgactgcttgacttcagttgaggamaacaatgaagttctgtagccaggcgtggtggcagatgtctgtaatcccagctactcgggaggctgaggcaagagaattgcttaaaccccgggaggtggaggttgcagtgagccgagatggcgacactgcactccagcctgggtgccagagcgagactctttgtctcaaaaaaaaaaaaaaaaa

SEQ ID NO: 17905 - DNA, 548 bp, Homo sapiens
ttgtttttttgagacggagtcttgcctcccaggttcaagcaattctcctgcctcagcctccctagtagctgggattacaggcatgcrgcaccatgcctggctaattttgtatttttagtagagacggggtttctccatgttggttaggctggccttagaactcccgacctcaggtgattggcccgcctcagcctccgaaagtgctgggattacaggcaggagccatggtgcccggcctatgttcccacctttctacccactatcacatttccccacaggcatcaaagactttgggttggcactgatttcagtttctctctttccaagctattctgtgtgtctcatatataaatgtacatcccaatgaatgctcacaaagtgatcacacccagatgaagaaatatattatcagtaccccagaaccccctcctatgcctcctaaaattgctcactactcctactctacaaaaataaccttcatcctaacttaaattacagatgggttttgcctgttttgtatttgtataaaagtagtaacagagtatgct

SEQ ID NO: 17906 - DNA, 377 bp, Homo sapiens
ccacaatggtgaaaccgtctctactaaaaatacaaaaattagctggccgtggtggagggcacctgtaatcccagctactcgggaggctgaggcagaattgcttgaacccaggaggcagaggttgcagtgagctgagatcgtgccactgcattccagcttgggcaacagagcgagattcaaaaaaacaaaaaaacaaaaaamcaaaaaaacaaaaaaacaacaaaaaccatgcttctgaagttcacatagaaaaaaaacctcataaaaagacagacggatcggtgacaggttcttctccatttgtgccaagccatatggatcttgctaaaatgtcacacttatatacttgagttcattacagcatactgcctgtatgc

SEQ ID NO: 17907 - DNA, 583 bp, Homo sapiens
tgacagtggcatgagagtttattatatttttctttctacttttgtatatattttaaattatccataatatatttttaaaatgtwcaactctttccaatttgactccttaaatttagcagcattaatattgagagttactttaagatatcccctaaaattcctgggattttcatggtcacacatcaggtacccaatagctacatgttcctgtctctaaaatatggtgaaaaacatctgacctgtttggaggcatcacccagttgtttggaggcaaacttgtgcacagtagtgatctcctcggttcactctgagtcatcaattctggagctctcagtttgtggagaaattttctagaaactggagagagaggggtaaaataataggagacatacaataaagccaatgacaccataatggggctgtcaggaggcagaaaaggagacgagcaaaaagaaacaaacaacataaacatatggatacataataagtaagagttacatcagcgtttcccaaacctggctgccaggtagaatcatttgcagcacttgtttaaaatttagatgcccaaatcctgtctctgaaa

SEQ ID NO: 17908 - DNA, 583 bp, Homo sapiens
tgacagtggcatgagagtttattatatttttctttctacttttgtatatattttaaattatccataatatatttttaaaatgtacaactctttccaatttgactccttaaatttagcagcattaatattgagagttactttaagatatcccctaaaattcctgggattttcatggtcacacatcaggtacccaatagctacatgttcctgtctctaaaatatggtgaaaaacatctgacctgtttggaggcatcacccagttgtttggaggcaaacttgtgcacagtagtgatctcctcggttcactctgagtcatcaattctggagctctcagtttgtggagaaattttctagaaactggagagagaggggtaaaataataggagacatacaataaagccaatgacaccataatggggctgtcaggaggcagaaaaggagamgagcaaaaagaaacaaacaacataaacatatggatacataataagtaagagttacatcagcgtttcccaaacctggctgccaggtagaatcatttgcagcacttgtttaaaatttagatgcccaaatcctgtctctgaaa

SEQ ID NO: 17909 - DNA, 645 bp, Homo sapiens
ctcactgcaatctctgcctcccaggttcaagcaagtcacgcctcagcctcctgagtagatgggattacaggcgcgtgccaccatgcccagctaatttttgtatttttagtagagacgaggtattgccatgttggccaggctggtctcgaactcctgacctcaagtgatctccccgcctcagcctcccaaagttctgggattacaggtgtgagccactgctcccgacctgacttcactttctttccacataagcaaaattccatataaatcagcaacactgtttttacccattgacaaggttgtgtccagttcatcgatcattcctcaggttacacgcacgtgacctacctaagtttataacacaatgcttaaaaacagatttcaatgggggcaatttcttattaaggcattttgataatcagttgatttcaattctaaaactaaattaaatttgtttttctcttagtggaaggaggcagcaagayatatagaaaaggcctttaactccagaatccaatgatggtttcagtgctcaaattaataatgcaacttttctaagccttgggttttttaaatcaaaaggtagagataatcataccaatgtcatagaattgttgtaaggtttaaataacgatcttaaatcat

SEQ ID NO: 17910 - DNA, 1345 bp, Homo sapiens
gaggttatgtgttcatctctctgctgagccaggggctgtgtcttmggctgctctttgtttctaagacgctgggcacagtgtcctacaaatagttgcttaatgagcctggatgatggattggcccttcctctctccccgtcctgcactgagaatccttttatcttggcagtctcatgaagccaatttttataggatcagcattttctctaagtaggcccggtctcccacgttggatagaaaggatggtactgttagggaaagggatgagtttgggtggcgaatgttgtgactgtagccaagagctattcctgggtgtctagtgaatgtcctgaaatgatcttgcaggcctgagtcctgaagtagtcctcagaggatatgaagacaggccctcattcacacagggcgtagacttgctgggggcttcattccttcccagtctagtagcttctgtgctgcctctgactgcctctcacctcgccacctgcccttcccttgtcctcaagcgcagctcaggaagatatcgttatcagcacatcaaatcctctgcttccttcctgggctgagggagggccccttattacacagatccatcttgaagaacaatttcaatttgcccaaagtttctccaaactatagtcaagctggcattttaacctcaaggaaactttgggagccccctcaagccccctctccggtggacttaattgcctcccaccggcagtagcttattttaggtaaactgtgtagaagagaccccaagcgtttagctgaaactcatacacttcttgcctctcagccaggaattttatttgaaccaatgggaaggaaaattctggatttctcacataaaatggaattggtctaagcaaagagggcactcctaaattttagtacagatacagttggtgtctaagcctgactttctcttgatttggtggttcccaaacagaatttaaaatataccttgaactcatcttccagcttttcttaggagagcttaaagcacttgttcaaactggatttaagaggtatccttggctttcccaaattcctaaacattttcactagatgtagccctgcatacaagccctaatttagtaggtggccttaaggtcagccacttatccccatggacgtaggcagtggtgccagcgcacatccactaacacacacacattcacacacacaactgtaagggcagatgggggttaataagtggttgttttagattagtgttttaattataggaagtttttccttccctttccctctgttggcaatttcatatttttattgataaaatatgtattttattatttttatgcttacttttccaattttaaaa

SEQ ID NO: 17911 - DNA, 551 bp, Homo sapiens
gttttatacatatatatatacacacacaaacacacatatatatgagggaagcaatttgtttagttttgtaactgttttcccaccatgtgtacataatttagattcatatttagaaaaatatatatggagtggcttacattccatttattacaaaagagcatgggatacatcatccctcatggacatatggaattgcaacaaacttaatcaagatagaattatccttgtattaaacataaatttgaactaaggaatattaacttgtttgatgtcatagagcaagtgcaactgaaattcaagaaaaaggctgaaaattgttatcagtttatcmatttatgcatttaatggcataaaagtattcaatttaaggttcttcatagggaattaaatatctctttgggttttgctctctttatatgcaaaattaattaaatgttcatatttttacaccacacacatttgtgtatatatacatgtatacatacattcctgtatgtatgtgtatatatatgttgaatattctatgaaattgtttctagtgattctaaatc

SEQ ID NO: 17912 - DNA, 603 bp, Homo sapiens
ggctagrggtacagggaccttacccaccaggctcaacatcccccttctgaccacttagtgtctttcgggtcaacagagtatccacggctgggccttcctgaaatggaaaagactgatttcccctcctggaagaggtgaggaggctcagagagcctgagccgcctgcctgggctcacacagctaggagggtgagatgtgacttaagggcaggcctgggacctcaggccagagtagaggcttcacccaagagccgtgggcagagcagagcagaaccatggggttcacacggagctgctccagtggctcctgagcagagtgaggtccctgttgaagggcacctggatccctgaggactcacagccaggcagctgggcaacctgtgcctgagtcccaggctgccccatcctgggcatgaaagacaagccctctccagcagcattgacaagacacccttccagggccaggcacggtggctcacacctataaccccagcactttgggaggccaaggcaggcagctcacttgaggtcaggagttcaagaccagtcaacatggtgaaaccctgtctctactaaaaatacaaaaaattagccatgtgtggtg

SEQ ID NO: 17913 - DNA, 603 bp, Homo sapiens
ggctaggggtacagggaccttacccaccaggctcaacatcccccttctgaccacttagtgtctttcgggtcaacagagtatccacggctgggccttcctgaaatggaaaagactgatttcccctcctggaagaggtgaggaggctcagagagcctgagccgcctgcctgggctcacacagctaggagggtgagatgtgacttaagggcaggcctgggacctcaggccagagtagaggcttcacccaagagccgtgggcagagcagagcagaaccatggggttcacacggagctgctccagtggctcctgagcagagtgaggtccctgttgaagggcacctggatccctgaggactcacagccaggcagctgggcaacctgtgcctgagtcccaggctgccccatcctgggcatgaaagacaagccctctccagcagcattgacaagacacccttccagggccaggcacggtggctcacacctataaccccagcactttgggaggccaaggcaggcagctcacttgaggtcaggagttcaagaccagycaacatggtgaaaccctgtctctactaaaaatacaaaaaattagccatgtgtggtg

SEQ ID NO: 17914 - DNA, 523 bp, Homo sapiens
catttaatctgatcaacaactcaattaggtaggtataattttaatctacatttcacagataagaaactgaaagcagaaaatgtattcaaggtccccaagctaaaaagtgggatttgtggaaacagagaacttcagacttaagtagtatggcttcagagcccatttcttaactcctacactataatggaggaggatcctgggctctctcatgatacccataaagataggatggttaaaagacggattataaagggtggtgtacccagctgataagagcttcagaagataagtgataagaagacagaattaaattgggatggcagtgatgactaaaawggacacaaatgtaaaaggggaaatgaagctctgctcctggaagataggagaaatgacactgtagtaaatgtttgaggttgtacagaatttgattcctaaaactcagtaagcaagcattgagagccagcaaggagatcctgagaaggttgtactggatagggtatatgaattttgaacatcagatttg

SEQ ID NO: 17915 - DNA, 519 bp, Homo sapiens
catttcagaaaatgggacctactatcagatagagttggtgagggaaaatgagctggggtagaatagtgaggagatgtggcttctggtcctgactctgcctctcagtaactgagtgaccttagtgattatttccttctctaggcctccatttcctcctctgtaaaatgagaaggctrgataggttgtatctatttccttttaacgcttcctttttacggatttaatatgattcttatgaccaaatatctgtatgaagcatccaggcagtatctgcaatgattcggtggcatttgaaattgtgacaagtgtccaaacttgaggcctatactttccttaattttattaatattttaaggagaagtattttgttatatttgggaaaggtatggggtgggagggggctgggtagtgcttcattctactttatttgctggtatagattagatttatttgttgggttcagattaatttgaaaatacttatatctgttgtctcactggggtgacttttgggtactgg

SEQ ID NO: 17916 - DNA, 534 bp, Homo sapiens
caggctggtcttgaactcctgagctcaagtgatccacctgcctcgggctcccaaagtgctaggattacagaagtgagtctccgcgcccggcctccggctaatttttaaaatgtttttattttttgtagagacaaggtcttgctgtgttacccaggctggtctcaaattcttggcctcgagccatcttcctgcctcagcctcccagtgttgagattaagcatgagccactgcacctggcgagatcctgggttctaaggaagacttcttggggttcactgagggtgtggggttgtgctgggaactccaccctgaactttgcactccttaggcccatcctgcctccttctctcctctgccggaggccctgacccaggcctccacccacgcttcgcctccagggctgcagcatggggcccagactcccctgyttccccttctcgtggctattaaaggcaaataaacagacccttttacaactctagaggtttcctgcctgttgttacggggagcaggcagctgttagcaatcagcaaa

SEQ ID NO: 17917 - DNA, 543 bp, Homo sapiens
tttttttttcagattgtggggcattaatctgatgaccaataatatcagtgaggaataaagacagattaataaattgagtgagaaaagatgggacgtggttggttttggccacatagttagcagcactgtctgacctttcattttctaggcatatagtatcagtttccttagtgtgggccgggcaatgaacaatagcaatcttagtaggaaggtgaatagcctgtaatggtgcattaattatgtgcccattggcaataaggatatcagcagaagttaagaacccatgggatttccaaatcrtgccaactaattggcagacttcaaaggcatatttggagtcagtataaatagtggcagttttccttttgccaaagtgcaagctctagtgagaactagaagcttagcagcttgtgctgacattatcgagggcagacaacgtgcctcaagaatttcatgtggagaaactatatcaaggccagttattatgttcaccttgaaattttatttgcaagagctgtcacaaagaagtaagtctgggttgtc

SEQ ID NO: 17918 - DNA, 590 bp, Homo sapiens
ctcttttgggttgagcttttgagtgccttatcctaagtaggtaacaattgtccgcacccattgaagtttagatctggatggtttacggcattgttcagctggagtttttaggagaatggagtcaacaagggtaccccgttagtctcattggagagcaaaggatgatcaacctactgaaaaaggatagctctttggataaaggttatagagtctaaattggcgttaaggatttgagaatatactcacaatatccctaaggtatgtgagtccattttaattgtcttcttggtttactgtaaaccaagctgcatcagcgggaattgaggtgaggataggaacagaattaggcacagaaggagcttatggctcttagatactgtacaaattgatagatttggctgctgtatgaatcatttttttttccttcttgcctggtaaaattaggtggggtgttacacagagaggtagtaaacataagcactcactgctataaaaggaagcttattatagattcagttcctcactctgcatctcctgaaaggagktactaagcttctaaaggaaaagattttttcctttccagtaaatgt

SEQ ID NO: 17919 - DNA, 551 bp, Homo sapiens
cacatatatgaggtggtcccataacaatataatacagcgatatcatatttatactgtaacttttctatgtttagatacaaatacttaccattgtgttacaattgcctaaagtatttagtacagttacatcytagcctacaggtttgtaacctgggagcaatagtatatacagggaatttttttatgtgctgctaaattctagtgtgaaggcactccacgaatatcgattgaattcatgaatcacagcattaaactaggtgctcttccttttttctatctttttactcttgctgagatactgttataattactaataaatgaatttcaatactgaatcatcatagattttttccacccaaaggaaaaaattaaaactccacaaagactcagtgaaatgctcctagaaaatataataaacacctgttgttatcattttctgttatcttgagtaccagggtgcgagttgggtgacctggcttcttggccagctctcctgtgagcccttaccttctcctctccctaggcctttgtttctcaagagtaaaataaag

SEQ ID NO: 17920 - DNA, 551 bp, Homo sapiens
cacatatatgaggtggtcccataacaatataatacagcgatatcatatttatactgtaacttttctatgtttagatacaaatacttaccattgtgttacaattgcctaaagtatttagtacagttacatcctagcctacaggtttstaacctgggagcaatagtatatacagggaatttttttatgtgctgctaaattctagtgtgaaggcactccacgaatatcgattgaattcatgaatcacagcattaaactaggtgctcttccttttttctatctttttactcttgctgagatactgttataattactaataaatgaatttcaatactgaatcatcatagattttttccacccaaaggaaaaaattaaaactccacaaagactcagtgaaatgctcctagaaaatataataaacacctgttgttatcattttctgttatcttgagtaccagggtgcgagttgggtgacctggcttcttggccagctctcctgtgagcccttaccttctcctctccctaggcctttgtttctcaagagtaaaataaag

SEQ ID NO: 17921 - DNA, 551 bp, Homo sapiens
cacatatatgaggtggtcccataacaatataatacagcgatatcatatttatactgtaacttttctatgtttagatacaaatacttaccattgtgttacaattgcctaaagtatttagtacagttacatcctagcctacaggtttgtaacctgggagcaatagtatatacagggaatttttttatgtrctgctaaattctagtgtgaaggcactccacgaatatcgattgaattcatgaatcacagcattaaactaggtgctcttccttttttctatctttttactcttgctgagatactgttataattactaataaatgaatttcaatactgaatcatcatagattttttccacccaaaggaaaaaattaaaactccacaaagactcagtgaaatgctcctagaaaatataataaacacctgttgttatcattttctgttatcttgagtaccagggtgcgagttgggtgacctggcttcttggccagctctcctgtgagcccttaccttctcctctccctaggcctttgtttctcaagagtaaaataaag

SEQ ID NO: 17922 - DNA, 551 bp, Homo sapiens
cacatatatgaggtggtcccataacaatataatacagcgatatcatatttatactgtaacttttctatgtttagatacaaatacttaccattgtgttacaattgcctaaagtatttagtacagttacatcctagcctacaggtttgtaacctgggagcaatagtatatacagggaatttttttatgtgctgctaaattctagtgtgaaggcactccacgaatatcgattgaattcatgaatcacagcattaaactaggtgctcttccttttttctatctttttactcttgctgagatactgttataattactaataaatgaatttcaatactgaatcatcatagattttttccacccaaaggaaaaaattaaaactccacaaagactcagygaaatgctcctagaaaatataataaacacctgttgttatcattttctgttatcttgagtaccagggtgcgagttgggtgacctggcttcttggccagctctcctgtgagcccttaccttctcctctccctaggcctttgtttctcaagagtaaaataaag

SEQ ID NO: 17923 - DNA, 551 bp, Homo sapiens
cacatatatgaggtggtcccataacaatataatacagcgatatcatatttatactgtaacttttctatgtttagatacaaatacttaccattgtgttacaattgcctaaagtatttagtacagttacatcctagcctacaggtttgtaacctgggagcaatagtatatacagggaatttttttatgtgctgctaaattctagtgtgaaggcactccacgaatatcgattgaattcatgaatcacagcattaaactaggtgctcttccttttttctatctttttactcttgctgagatactgttataattactaataaatgaatttcaatactgaatcatcatagattttttccacccaaaggaaaaaattaaaactccacaaagactcagtgaaatgctcctagaaaatataataaacacctgttgttatcattttctgttatcttgartaccagggtgcgagttgggtgacctggcttcttggccagctctcctgtgagcccttaccttctcctctccctaggcctttgtttctcaagagtaaaataaag

SEQ ID NO: 17924 - DNA, 560 bp, Homo sapiens
ttcctctctgatgctcatatttgcatgaatccaaaatccaaattaagtcataggtcgtgggactatgcaggcaggcagccagcagctctgccaatgccagttaccttcataaaaccaagacgtcttttattatccgaggatcctccgagtgaggcttgccctttccactgaagttttcagcaagttaagtccagggtacttagagctgcttgtttactttaaaatttcctctcttgctctctctctctgtctctcttaacccgcgaccctttttctctctcttgtctctctgtttgtctctttctggttttcttttttcctttccagcttctttgctcctcttggctactcttgagagcaagcaytggcaggcaatgaatcaaagtgggctatttttgctctcgctgtgaggatgtttacaacatattgaaaactcggctttgtagtttaacgtcattttcagtatattttcagaaaatctgactggcttccaagttcagtagatgactgtgaaacccacagagggccttatgtacctcataccttaccttaggcggctg

SEQ ID NO: 17925 - DNA, 608 bp, Homo sapiens
tgtgtggtgtgtgtgtgtgtgcatgtgtgtgcttgtgtgtctttcacaagcatacttgtgacatacttgtgatggcgttcagggctcacctggataatctacccactgtaagatctttaatttaatcaaatctgccaagagttctcttcttccaaatagggtaacatttacagattgcagggattaagacctgatattttggggcccattatcagtctgccacaaagaggcttccatagattttatccttgttaaaaatcacgtgtcatatggcccccaatagctgcaaggtgaaaaggaataaagttgagttagccaagcaacaagtggtatctgatgcagttttacagtgagaagcagggaaagaaaactaaaggaataaagctggagagagaaggcattctagaaagagaggaagcagatgagcaacggcacagaagtggaaaggtttctggcrtggagggcaatagtggagagtgagagaccgcgagaactcatctctcattcactgggagatgaggatggaaaagcagttttgtgtgcagattgtgctgggactggaatttcatattaagaggcaagcttttattttgcagaatggacaccat

SEQ ID NO: 17926 - DNA, 574 bp, Homo sapiens
tgatatagtttcagtcacctgtttataatcaatattgaattcacgttacacttmtaaaaaaatctccttttggttgtttaaaaagccctgctgactgggtggagtgactcaaaactgcaataccagctattcaggagactggggctggaggataacttgtggccaggagttggagaccagtttgggtgttatagcaagacccccatccctacaaatttttttttaaatgggccaggcatggtggtgtttgccagtggtcctagctactcaggaggctgtagcagaaggattgcttaagtccaggagtttgaggttacagtgagcaatggtaacaacactgcactcagcctgggtgacagagcaagacactgtctcttgaaaaaaattataaattaattaaaaaagaaaattttgaaaagtcttgcttctccaatgttattatcttattcaaataaattttattcgaaaactatttttatataatacaatgagatgactatagtcaataataccttaattgtgtattttaaaataaatggtgttttctgccactcttgtaaacaacagacaagta

SEQ ID NO: 17927 - DNA, 553 bp, Homo sapiens
tttacrtcacttatagtgttgacttggaccaatggttttgtctagacagtattaaaatgtatatttttgtgttataataaaatggtaccttgaaagaaaccaaacagaagttacagttgtcagcacatttatgctaaaaaataaacaacctaagccatattttcttgcccttgccatgataaaagaaaattttgagttctgtgcaaaggaaaaatgccaacaaaacatgctctgggtagaaactacctggttagaaaacttgatttacggcatatataaaataagcgctgaagcaggtattgctatttgacatcagaagctaatgctgaaaaatatctaccgaatttcatggttttctttattgaaagttatagactcagattcctagataaagagctcgctttggtaatgttgttagtcttttcactgaaaaacggatcaggaagccactgtactggtttaatatagaatcacctcctgtaagaggtaggaggtcagatacttttagacactgttgagaagataatagctcataattaagaataggaagctt

SEQ ID NO: 17928 - DNA, 603 bp, Homo sapiens
taaaggagttacatactcctttttctttatacattgggtaattctgaatgttccctgaacataataaatgytaaatttctgaaactctggattctttaatttttctccagttagcatttttttctttctttttttaatcagctgattaaacacatttaaactgcaaactgtttcttgggaagaagtttcttatcttttgtctttagctgagcagctctgagtgaagctatcactcaggggtcatgtgagctgtcagtagacagattttggatcccctctctaacaaacatagtttccccaaattcagctttcacaggccatagagaccagagttcttctacttatcttcttgttatcttctcccatgccacaatgtacaccatgccattttcacccagccccaggctgagagctgcaaaacatgagatgtcatttcatatacctccatcttctttgaggatgtattcccaatcaggttctccccgcttctgttcactctttagtgcctttaggataatggtctttgtgctatgctcagatttttagttgcttctgtgagggccgtagcccagaaggacctcattcagtcactagccctcctca

SEQ ID NO: 17929 - DNA, 783 bp, Homo sapiens
ccttcccggctccactgctttgtctgccgcccgtggaccccacataccgctccagagctttaggagtccagagcctgccacaccatcagggccacacctacggatgaggtagagacccaggcggcgcggagcgagcccttcggttcgcagccccggccgcggcgatcgcaarcaaccggactaactcagggagccaaagagcgaaggcgctggcgggcaaaggctctgcagactcttcccaggtgacctgacgcctctgtcgcttatgccctcctattggctgataatgagtccaacgtgaggataaagtatccaatcagtgaaggtctttttagagtgaagcgctcataggtggtttagggaaatacactaagagtcaagggactgatccaatgaggacccaggaacactatattggccctaactactcgccgtccaccaagccctaaccgaagaaatttgattccggctgggaaactgtcacaccttcacaacctcaatacccagctttgtggggccagcaggacttctccggtcctgcattcggtaattcaaattgagtatttctttagcaactcttgcaattctaataaaggcaatacctaatattttattcgcttctgtgagtcttaattcataaattttttttgttttgtgttttactgtggacgttagcactacattaggcgttccttggattttcgtttatttcttcttggtgtccactgtctccctagcagcttgaaagacgcaaagtacagttttcgtttaagtagcaattta

SEQ ID NO: 17930 - DNA, 783 bp, Homo sapiens
ccttcccggctccactgctttgtctgccgcccgtggaccccacataccgctccagagctttaggagtccagagcctgccacaccatcagggccacacctacggatgaggtagagacccaggcggcgcggagcgagcccttcggttcgcagccccggccgcggcgatcgcaagcaaccggactaactcagggagccaaagagcgaaggcgctggcgggcaaaggctctgcagactcttcccaggtgacctgacgcctctgtcgcttatgccctcctattggctgataatgagtccaacgtgaggataaagtatccaatcagtgaaggtctttttagagtgamgcgctcataggtggtttagggaaatacactaagagtcaagggactgatccaatgaggacccaggaacactatattggccctaactactcgccgtccaccaagccctaaccgaagaaatttgattccggctgggaaactgtcacaccttcacaacctcaatacccagctttgtggggccagcaggacttctccggtcctgcattcggtaattcaaattgagtatttctttagcaactcttgcaattctaataaaggcaatacctaatattttattcgcttctgtgagtcttaattcataaattttttttgttttgtgttttactgtggacgttagcactacattaggcgttccttggattttcgtttatttcttcttggtgtccactgtctccctagcagcttgaaagacgcaaagtacagttttcgtttaagtagcaattta

SEQ ID NO: 17931 - DNA, 529 bp, Homo sapiens
atatgtttgtcaagtaaagggctatcttcacaggctttatttgtaaaaagcgtgaacaaataacctcactcacttttggtaccatggccagcagccagccacgcaactctggtaactcagctgagttccaagcttccaccagacaggtatactctgtcacctgtacacaatcagagcctctgaccaggtgaaaaacccaggttcccatggaaaggacacaactgtcatcaaaagcaaagactcctgtaatttctctcacyagctgtggaacctttcacagtaggcaggtggctctgtcaggctttttgcaaacagtgccagggaccttcttgctgcctttatagtccccgaggtgtaaggaatcctcggttaggggccactgtgtctgcagtgaagagaccatcactagggaaaaaaacagaagcccagcattctgccttcacagtgtcttgcctcatggtagcacactaaaagccctgtccatttctccaaagagaatatctagaagtatatatgtgtgtgtgagaaa

SEQ ID NO: 17932 - DNA, 566 bp, Homo sapiens
tccactcaaacaactgcataacaatacaaccgccatacttcagtaggtagcatactagcttatgaatgtatcccattccattccaataatttaaaatgtgtatactgaggccaggtgcagtggctcacacctgtaatcccagcactttgggaggccgaggtgggtggatcatgaggccaggagatcgagatcatcctggctaacacgatgaaaccccgtctctactaaaaatacaaaaaattagccgggcgtggtggcaggcgcctgtagtcccagctactcaggaggctgaggcargagaatggcgtgaacccggggggcagagcttgcagtgagccgagatcatgccactgcactccagcctgggtgacagagagagactccatctcaaaaaaaaaaaaaaaattacagaactatgagtttggggtacagttcatgaccatcactcagattcactgcagatgacatcaggggactcagtagagaagaaagacatgagcccattgctgaaatggtggagagagatgagcatgtgtcctggagcatggctctttataataatcaag

SEQ ID NO: 17933 - DNA, 654 bp, Homo sapiens
aagagatgagacacccgaactcagtagagatggtccagtggaactgtgggatattggcagagggccaagggatacggggacgcagcctaccgcttgggctaccttttactttttcagattttatttttatttattcacgcctccctgcccctgaggaagtgaaaatgttgggtttcaagaaaagaagggtcagcaggagcaggagagcggggacgcatgtttgaagggctgccgtgccgctgcctcccatcgagccacttcctaaccagtgcagcaggtgtctcggcaggtagagggctcgagactgtgctgctgcttggacccattagagattccacgggtgccaygtctggacaactgaggtctccttgggccctctcctgtcaggcctgcagggcctgcagtaaggtgctttcacctcccacagcttccagggactcgtgattcatgggcatgagggcagtgggcatttaccctggctatgcagcaaagtggtccctaaaaaacaactcttgccccaagatgggggcagagacatgcacatgagcccgctgggcatcttccccactgagagcagctgcacatgtgtggccacgtccctgtgcgttggtgctccttctcccatgctgaatatggctgccgtttattgagcgc

SEQ ID NO: 17934 - DNA, 680 bp, Homo sapiens
aatctagctggggctgtgtggtttctgattccccctggcttattctttactttttcccacttttccaggctcagcagggagctgctggatgagaaagggcctgaagtcttgcaggactcactggatagawgttattcaactccttcaggttgtcttgaactgactgactcatgccagccctacagaagtgccttttacgtattggagcaacagcgtgttggcttggctgttgacatggatggtgagtacctttctatgaaggtgataaggatccactgagtcttctggttagggtcatattcctactgcaagtggcccttactgagctgagagatgtcattgccacagggaggtcctataggcacatgtaggttgaatgaaactctagttccacttggaagcccagacaagggatgggtcagtgagcaaggctctcttcctagtctcaggccatgcctgtggcgccctaatcctactctcatgacgttggacctgggcagatgtgacaaattcacacaactctgattttgtctcaattttgtagatcttgtagatttcatccttcactctaatttcagcgtctaaaatcctcgctaccgtgaacaatctgagtatttgatgagacagggctgaatagtgcagtttttctcctagcaaccatttgggggcatttgctttaa

SEQ ID NO: 17935 - DNA, 593 bp, Homo sapiens
aaacaacctaaggtgctttagcagtacctggggatgctcaagtctcagtttgggttcaagcctgcaagtgaaaacatgcacctgtcttctgycctggcaatatcaatgtttttcactaatagtcttcccaacaccctcaagaaatctctcattagaagcaaggggagttatagaaggcgggatgggggaaaaatagggaaaatattatttcttccccaaatgggagcaaagtagaatatatgagtagagtgataaatgaggcatatgtaccttgaatgaaagccatgacatagaaattagatttaagcaattaccttagtataaacaatttctgaggaaaaaaatgcagaaaagtatcagccagatccagagttttttgctttccccccaaattacagaattgttaaatctcattatagaagtctccagcatactgttttcttctgcattatgttgagttgttaattccattgaaaatccccgtaatacaaataatttataaagaaaagaggtttagttggctgtacaggaagcatgatgttggcatctgctcagcttctggggaggcttcaggaaactttcaatcatggtgg

SEQ ID NO: 17936 - DNA, 597 bp, Homo sapiens
gatcaattaaactctattaaattctattaaattaaattctattacattacatgttgagcatgtactctatgcagagtggtagaataatatcttaacatacaattaatgtaattttctctccctgctccaggattatacccatacttcagtgaaggtttgtattatagagcagaccatgaaatggttactaaatgttatgttactttatgattcctacattgtggtagtaagagatgagccaagagaggaaaccaagcaatmtggagaactactacttaaggttagcctaaaaggaaaacagagtggcacacaaagtaaacccacatctagattacgtttttcactaaaaagatataaaaaagcaattatagaaagacaaggaagagaaaaagacaacattgaagactgaagatacggcatttgaaataagagaatggatgaaagttcaacttgttgtaaaaacagggagagagagagagagagagagaaagacacaaacagtaaatatgggtcatattagagacatgcctcagagatattttcagtctaactccagaccactacaataaaatgagttttgcaataaaacaagtcaca

SEQ ID NO: 17937 - DNA, 581 bp, Homo sapiens
ttttagtgcagactctaatatgtaatatacaattcctataaatttaaattcaatgagctgagatgactaatgaaaatttttatttcaaaccatagaccatgttacagagaataatattcataaatgtaaggaccagacaaattaacaaaggtttttatggactgaatgtttgtgttctcattcccygtcaccccaaaattcatatgttgaggctgtaacatggtggtagttggaggtggggccttgggaatgtaattggatttaaattagatcatgaaggtaaagcccccatgatgggattggtgcccttgtaagggaataaaggaaccagagcttgctctgctcccttctgccatgttcaaatacagtgaaaagatggctgtctattaaccaggaagcagacccttaccagacatggactctaccagagtcttcttgatattggagttctcaacctctagaactgtgagaaattagtgtttattgtataagccagagtctacggtgtatttgttaaagcagcctgaactaagataattaacactttgtcatatttgctttcttcaaggatagtaaaataa

SEQ ID NO: 17938 - DNA, 581 bp, Homo sapiens
ttttagtgcagactctaatatgtaatatacaattcctataaatttaaattcaatgagctgagatgactaatgaaaatttttatttcaaaccatagaccatgttacagagaataatattcataaatgtaaggaccagacaaattaacaaaggtttttatggactgaatgtttgtgttctcattccccgtcaccmcaaaattcatatgttgaggctgtaacatggtggtagttggaggtggggccttgggaatgtaattggatttaaattagatcatgaaggtaaagcccccatgatgggattggtgcccttgtaagggaataaaggaaccagagcttgctctgctcccttctgccatgttcaaatacagtgaaaagatggctgtctattaaccaggaagcagacccttaccagacatggactctaccagagtcttcttgatattggagttctcaacctctagaactgtgagaaattagtgtttattgtataagccagagtctacggtgtatttgttaaagcagcctgaactaagataattaacactttgtcatatttgctttcttcaaggatagtaaaataa

SEQ ID NO: 17939 - DNA, 523 bp, Homo sapiens
gaggagtaccttgtttagtctattgctgacaggttagccattcataggcagcagtagcgggattggtgtaagtgctgtctacctgttaggtgatgctacacacgataggttagtggatattcttttattccccctcaagatctgcccttcttccttctgcctctgctctctgccctctaggaggctggcccctgccctggaggtttggtcattggaaggccccagtagatcagagagcaggagagagcagttgagtatttattctgtgagctccctccctttcaagccatggctttgcagaggctgttccccttaaccaagggccacaggtgctgtggagcagccctcttctatagctccaagttccccaggkttcccagttagggatggtaatggcctcccactgtcaatacccgcagagtgctgcttcggcctcccctgctggcccctctgatctccactttgtgaagtggctctacattcaggctgtcttgagtcaccctctctgaggatgccatctatt

SEQ ID NO: 17940 - DNA, 564 bp, Homo sapiens
taaggggcgtatttctgtttggcgcaatctcgaccctgcctctctaaatgtgagtgcgcagaggtcgctttccgccacgaagcggcgctaatccaccaccgaggacagacccactcagttttttgcaggatttgaagttttgaacttttacaagtgtcagaaaggtaattcacaagtttagaggaatgtgctaaggcacgagtggtgggtgctccrgccaggggtgggctgcagaaggggcgcggtgtcgccgggctcccctccgacctctggggtccacagtgcgggcttgggctggggaagcctcagaggtgcgtgcgggggcgggtgccggcgcccgggctaggtgagggcagaggtgcgcgctgcgcgtgggatcagcccggcgccgacgggtggctccgaggagctcgctccttcctcgcccccgccccctcgccgcgcggggccagcccggccgctcctcccctgggtgggtccctgctccttttctggcagggtctatttgcatagaggaaactgcccaaagtggccgctgtggaggagctggctgcggcgaagggg

SEQ ID NO: 17941 - DNA, 500 bp, Homo sapiens
gtaatagtaattatagtaatagccatggtgaagaatctgtagtactccaaactaccaatgagcttaatgtgaaagcaaatawtttgattttttatttgtttgttttttgcttgctttttgttttgttttgttttgttttggcccctgtcaacagatcaaaggctgcttaacattccagaggtgataaacagggacaaacacaaagagatctggcatttccccgagagatggcttctattccgttaaggcatactgtatatgagtgaacagaaggagaatattattataggctttgctcagggcactcaaatgaaaatcacatttcactacgtgattgcatttacaacacacaaaacaagggaaaagaatgtgactggctgcgcgttttgctacatgtgactttcttgtcctcaagttaaatctgacaaaatcatgcaaacttcttacttcccacttagaaaacaaacgtgaattttatgtttatatttacataaatacta

SEQ ID NO: 17942 - DNA, 640 bp, Homo sapiens
gtgaggatatactaaagttaattaaaacaaatcacaagctacaacatatgagtcacggaatttcacagaagattgaagtttctgacagagagtaggattgaccattagaaagtttggtttaaaggagactacagaatttttcctggagactttttttttttttttgagatggagtttttggtcttgttgcccaggctgagagtgcaatgaatggcatgatctcggctcacggcaacctctgcctccccggttcaagcaattcttctgcctcagcctcccgagcagctgggattacaggcatgcgccaccacacccagcttattttgtatttttagtagagacggggtttctccacgttggtcaggctggtctcgaactcytgacctcaagtgatccgcccgccttggcctcccaacctggaggctcttaaagagagtttgagataggttgggtatggcaaagaggagttttcaaatgccagcctgtgggccagtgtttatctgtactacattttcataggtcttcagtgaaatgagaaaaacatagatggcatggttcagatattgttgctagatcttcatttttaggagggctgtttgttctgtattttttctagtttccaggggcattgaaatatttt

SEQ ID NO: 17943 - DNA, 2207 bp, Homo sapiens
ccttccctgtatctttgggccctcaccactcagaccaaggttgtaacatttttattctagaagttgaaaaacactgccctaaatcccttgattaaaaacattctagaagcttgagcattttgtggggagagggagacagtgtgtgaacatgcctcacatgtgctggctgagcaggggatggcctccatcactttatttcctcttcctaatggattgcaatgcgaaaggccatccaccgaggtgatctctccccaatgattgagattytttttttcattgactgtgttctgctgcagtccagcccctcaggtttggccttccacatcattccccgacaacccacccccatgcccttctccaagaaggatgacctcaagtgtgaaataatctccagcatctgtttggggctttgattttgtgggtttattttacacatcctaattctgcaggaaactccctgcagatgtggagaagccctcagttactgaccccttgttaaaagaaacagccagaaaccagaaacatgaccaggaagataaacagctgttgaggtctcagctgctctccagagtggcatcatcttcggaaataagccttgcattcatcttcaccgaggaaattgggccttgaagttcatttagttagagatggtaaaagcatggcacacatacctcccacccttctctcgcacccgtgacagacatcactcatcaatcattatatcctttttctctgggtctgaaatcagccccagaattctcctcaaaaaggggtccagacaaactctgtgaaaccatattaaatatatttgtcattctagaagtctaggttctaagggataaagattctgaaaagaaaaattaaataaaatctgtgcatttttgttgggaggggttggggagaggttagggggtacttggttcaagtcctaaacagagtaggaaattctgtttccttgaaataccatctcaaagcccacaatactgatttaagaaaagagccctcaactaaaagcagaagaagttgctggggctgacaagtatttgcatttcctgaacgtgagctgtgttccaggcactgctctaagcacctcacatgtattgtctcatgtaattaacagaagatgattctgatgctaacatgacccaggattcaagactcatttctcagatccaacatgtttcacagatgagtgcagcacaagtcacacaagacagctgcctgccaagagtgcgctcaccctccccagacctgagctccattaattctgctcaggaaggagggcctttttcaaatccagcacagccctggcccatctgctccagtgtgtcacttagccatagtctgtttctgaatgtgcagcttcaaaaagaagcagattttgtaacggattccccctttgtcccagatagacagcacaacctccatgaaagatgtgcatcttccttcttccagtgaagaagttctgctgacagttctgagcactatgagggccacaggtctatcctgcaacaaacatatcaggctaagggcttactttcaaagaactagagagagggaggctggtttgtttcttctcctaggcttgggtcagacactggcaaactgactcatttgccttgatgggctggcatttggccgcagccttggtcaatgccaatttcagcgttatttggcccttggggattgtccatgggtcctgggtgacagccatgcaccaactgcccccagagctggggaatgagaaaatgacatgaacaatgataaaaataaaaatgagagctactgactgtattggatgtttagtaagcactcagaaaatgtaccaaaggcttcatatacactctcatgctgaatccccaaattcttctgtgacctgttcatctagaaagctgccgatgtccacctcttagagaaatggttctgtggtagtcgagtgtcggtttcaaagctaggattttgaagaagtcctttaactctgtttccccatttgtgagaagagattacccttatgtttcatgttatgcatcatgaagaaaaatgatccacaaaaatatgccttggctattctgcagaaaagaacaaagtaagttctcagtttatgactgttatggttgctgatatactgctctggcttccggtttgctgggtgtatcttatcacactgtcctccatatgtgaatcctaaaccttaaaaacaatgtttc

SEQ ID NO: 17944 - DNA, 2207 bp, Homo sapiens
ccttccctgtatctttgggccctcaccactcagaccaaggttgtaacatttttattctagaagttgaaaaacactgccctaaatcccttgattaaaaacattctagaagcttgagcattttgtggggagagggagacagtgtgtgaacatgcctcacatgtgctggctgagcaggggatggcctccatcactttatttcctcttcctaatggattgcaatgcgaaaggccatccaccgaggtgatctctccccaatgattgagattctttttttcattgactgtgttctgctgcagtccagcccctcaggtttggccttccacatcattccccgacaacccacccccatgcccttctmcaagaaggatgacctcaagtgtgaaataatctccagcatctgtttggggctttgattttgtgggtttattttacacatcctaattctgcaggaaactccctgcagatgtggagaagccctcagttactgaccccttgttaaaagaaacagccagaaaccagaaacatgaccaggaagataaacagctgttgaggtctcagctgctctccagagtggcatcatcttcggaaataagccttgcattcatcttcaccgaggaaattgggccttgaagttcatttagttagagatggtaaaagcatggcacacatacctcccacccttctctcgcacccgtgacagacatcactcatcaatcattatatcctttttctctgggtctgaaatcagccccagaattctcctcaaaaaggggtccagacaaactctgtgaaaccatattaaatatatttgtcattctagaagtctaggttctaagggataaagattctgaaaagaaaaattaaataaaatctgtgcatttttgttgggaggggttggggagaggttagggggtacttggttcaagtcctaaacagagtaggaaattctgtttccttgaaataccatctcaaagcccacaatactgatttaagaaaagagccctcaactaaaagcagaagaagttgctggggctgacaagtatttgcatttcctgaacgtgagctgtgttccaggcactgctctaagcacctcacatgtattgtctcatgtaattaacagaagatgattctgatgctaacatgacccaggattcaagactcatttctcagatccaacatgtttcacagatgagtgcagcacaagtcacacaagacagctgcctgccaagagtgcgctcaccctccccagacctgagctccattaattctgctcaggaaggagggcctttttcaaatccagcacagccctggcccatctgctccagtgtgtcacttagccatagtctgtttctgaatgtgcagcttcaaaaagaagcagattttgtaacggattccccctttgtcccagatagacagcacaacctccatgaaagatgtgcatcttccttcttccagtgaagaagttctgctgacagttctgagcactatgagggccacaggtctatcctgcaacaaacatatcaggctaagggcttactttcaaagaactagagagagggaggctggtttgtttcttctcctaggcttgggtcagacactggcaaactgactcatttgccttgatgggctggcatttggccgcagccttggtcaatgccaatttcagcgttatttggcccttggggattgtccatgggtcctgggtgacagccatgcaccaactgcccccagagctggggaatgagaaaatgacatgaacaatgataaaaataaaaatgagagctactgactgtattggatgtttagtaagcactcagaaaatgtaccaaaggcttcatatacactctcatgctgaatccccaaattcttctgtgacctgttcatctagaaagctgccgatgtccacctcttagagaaatggttctgtggtagtcgagtgtcggtttcaaagctaggattttgaagaagtcctttaactctgtttccccatttgtgagaagagattacccttatgtttcatgttatgcatcatgaagaaaaatgatccacaaaaatatgccttggctattctgcagaaaagaacaaagtaagttctcagtttatgactgttatggttgctgatatactgctctggcttccggtttgctgggtgtatcttatcacactgtcctccatatgtgaatcctaaaccttaaaaacaatgtttc

SEQ ID NO: 17945 - DNA, 524 bp, Homo sapiens
tgggatttccactaatggggttggggagtagtataccttatataagggttcttagtcgcagacaatagacaccactccagctagaggggttttgtttacatgaggtgaaggagcttacagatgacgggtctaagtcctacacagccaggagcaacacttaattttactactccattgggaccactgccccatcacttagtgcagcccccagcatagctgyccccaaaagaacaaaacatatccaccactgtgccctccacctgtggccacccactcactttcactgtgtctggcttggtggaacctagcccacgctgcaaaggagtctgggaaatgcagtttttagtgttccaggggctgagtgagtcagtttggagaatctgctaggaacatcatgaaccgtacacgtattgagaccctactctgtgcagtgggcacaaaaaagttctagggtgtgatccttgccttccaggatcaagactgggcagagaacaatggaagaccttcacgactgctgaccaaat

SEQ ID NO: 17946 - DNA, 524 bp, Homo sapiens
tgggatttccactaatggggttggggagtagtataccttatataagggttcttagtcgcagacaatagacaccactccagctagaggggttttgtttacatgaggtgaaggagcttacagatgacgggtctaagtcctacacagccaggagcaacacttaattttactactccattgggaccactgccccatcacttagtgcagcccccagcatagctgcccccaaaagaacaaaacatatccaccactgtgccctccacctgtggccacccactcactttcactgtgtctggcttggtggaacctagcccackctgcaaaggagtctgggaaatgcagtttttagtgttccaggggctgagtgagtcagtttggagaatctgctaggaacatcatgaaccgtacacgtattgagaccctactctgtgcagtgggcacaaaaaagttctagggtgtgatccttgccttccaggatcaagactgggcagagaacaatggaagaccttcacgactgctgaccaaat

SEQ ID NO: 17947 - DNA, 592 bp, Homo sapiens
aattttaataagttcaaaatagtaatgacaaaacaaaaactcagaggtagacttgtaatctgttcaccgtcacttaccattctggaactcttcattattttgcgtagatccaaatttccctccagtatcatacccctgcctaaagaacttcctttaatgtcttgtatttcaggtttgctaaatgagttctctcagacgttgtttgtctaaaatagatttgatttaattttcgagatcwttttaaccaggtattatattctgagttgataattttttgtctttcaatattttaaggatattgctctactttcttttttcttgcattgtttctcatgagaagtttattgccattatcatcctgttcctctgtttgtaaggtttctttttttcctttcggttactgtcaaggtttataacctcctacaatctgtaatcaggttatttctctgagtttggatttgtgatttgttgtttgttttttttcccatcaaatttggaaattctcagctattatctcttcaaatttctcttctttacttcttctataactatatgtatattagactctttgatgttgtcctacagctcttgg

SEQ ID NO: 17948 - DNA, 540 bp, Homo sapiens
tctttgctcattttacccatgagtgaatgatactaaaaaagaaatctttttacatgacataaactggttttatttattataaaatgtttactctttgacttaaatgttctacgtagaagtcaatatggaaagttgtatatttttaagtcactataaatgttcatgtgcccgttagcataaacgtgaagtatagttttacaaacattatatttaatatgtcacataacttttaaaatgwatgttgacatgcagtcagaaaactgagttgtttctagaatctattacattttagttatgtgacctttactaatttacttaatataatatctctgagtctcaattacttctagaatagaaataatagtatccttcttagaagttttataaatattaaatgggagcatagacacaaaatttaataatttttagtccatataaaattactcttcacccagtgtatggagagtattttaagtactctacatacagtttgaatatactatgtttctgtatatctcaataatatggtttggctctgtg

SEQ ID NO: 17949 - DNA, 1300 bp, Homo sapiens
cagcctcccttccttgtattcttgtgtgctaattaatgtataaaatgaatgccacatgaactaacatattttaagagtaccagttatataacaaacacagtattattctactttggtaacttgatactggtcattcaatgtctttagtataatgtgcactttttctcttaatattttagcttattcacataaagattaatttaaaaaacattcatgttgtttgctttaaatcctcttgactatttgtgttgagaacagactcatttattgtacattctattgtcgattacctgttctccattatgattttcttttccttgactcacttgcaaactaataagacaataaaatcaggattgatataaaaccagtagcagcatccatttcactttaataatatatttaaatataaagcaaaaaatgaatatctacatactatatgaacttaactctttaaaaacacacaaaatgaaacattgcacatttctgatcttatgtgacttcatgaagacttatgatttctgattaatgactaatcagaataattttgtaatgggagcttggtatcatcttgaagcacctggctctacttttatggatagtcatagaatctctgctgtacatggtttatgaccttaatctcacattttgagagagagtgctggacttaaaatactgtattttgattcttcacatttgtgatgttctcttttgtaatcctaaaatgagcatgatgttccgatatgtgtttccaagttctaactcttcatgttgaacatccaagtaataggcatatattatagacaggtcttgttttgcatctttctgtggtaactgatatcaatgtgaaatcatacttcttatatgccctcccaaaaaaagacatgtccatgtcctaatccctgaaacttgtgaatagtgtctttttttttttttttggtaaaagggcctttgcaaacttaagcatttccagatcaggagatcatcctggattatccaacagggccctaaatacaatggtaaatgtccttatgagagaggcagaaggaaatttgaaacaaaaagaataaggaaagacacagagaagaggaggaggcaatggatcatggaggcaaagcctggagtaatatggctgcaagaaaaggaatgcagagagccaccaggagctggaggagacaaagaacacatggagactccagatagagtgcagccctgtgaacggctktaatgtgaacatctggcatcaataattatgagaggatgaatttctatggtttaagtcaccaagattgtgataatt

SEQ ID NO: 17950 - DNA, 2544 bp, Homo sapiens
tgcattttttaacccatcagcttcataaagattaaacagaatggtaggtaaatatatacagtgttgagaagagtgtggggaaatggcgtatggggctgaactggcttacctttcaagaggccagtttcacagtatatagcaaaagccttaaaaatgtgcatccccttttgccttggaattcaacttctagaaattcatcctaagaaataagcaagcaaggatgtttgctttgcattgtttcaacagtgaaatattgcatgccagggctttaaaatcccttccagagtatggataaagatactatcattgtctgatatgctagatgctgcacagagcataatattatactctgagggtataatgtgattcagaaatatgtatggattaatacacataaagaatatactgaatgccaaatatctgattttaaaagtaatttatttaaattatgcaacttgaaataatttacatatttaaaagatagaagattagttacataaactacgtaatatccaagcaataccactattagaaaaaatctatatattttttgacatagatttgcattttgtatgtttttatgtgaaagatgcgtaccacaaaatagtactatcttatttttatacaaaatttacaaaagacagaaaacatatgtatgggggaaaactgtaagcatacacttcaagacattattatgggtattgctgagtagtgggatgatgataacggatttttattttcttctttatacttttctgtatttccttttcttcccaatgaggatacattgctttcacgattgaaaaaaattttaattaaactgtttctagaaataactagcagattaatcagacacagttttctctgtactagcattgttgccagaacccccaaaaatatttcacctgttgcttatttggaatcttacctttcatcacagactttataggcttaccagcaggttctaaccactacccctagagcatttggagtcacatggcagccactgccacagtggcccaatgcacagctgttatgtcttgaacaatagccctgtttggagtccattagaagatcttgggtggttatcagccacttccagtgatcttgctgtgccctgactttttccttcatacctcacaactatctgcttccaatattaatttggaaatggagttcagccttaacatctttctctaacatcttcctttgaaataaaaaataaaaaagctatggaacttttttcaagcagttttccttaaaactgggtttcattacaaatttgaaatgttttcaaatttttcaggtaataaaaagtcagaaaaagggagaaaaatctgtcttttctgaattcttttttatatggtgatcacttttcttatcaggaaaaaaagaataagtgaattcattggctctacattatttcttttttatccacaatataacttttctgtatctacatagcttgtgatctgatatatttaaaaataatcttgttattactgatttcagaaaactttgcaatgtgcttctaaaattatttatttaattacctaatctttaattcatccctaatacctggacattttatttttggcaaacgaattgtcgatgtgtttgcattaacgtttttagtgtacctctaggcttttttagaagttattttaaaatccatttcagccaagatttctgatctgttcttgagttgtatttaaatcggtgtcttttgctttacctcaccttgctaaaatgttggacgtaatggtgctatgattacctaaaggatcacgcatgtattcctgactaaaccagttcttgttcatgacacaaacactttatgccatgaggggttattcccctcttgttagaattagtcatttgtctcatcctaaaacctcactgatgcatttcctcctgaattaggcagcctggtaactggcaagtagataatggaagtttttaatttcttacctggcctaacttttcagcttccccagtttccttggtaaactgattgtcaatatccttttttttcctttatgctttattcagaaagaatacttgcttacaaaaatgtttaatgtcattttgaatggtaatttccctcacaaagaatgatacaaatccctgaaatccagcctagatataacatttcttacccacctatctccaattatgtaaggacaacttatttcacactctcccacataccaccaagcaccctatctcatccatttaataatttccacatttttatattttgacctaacttttctcacatttcccaaaaatgtcaaattgttttctcctgacaaattggacactattttcctcaaataaataattgacttccctccagtgactctagcaacttaccatgtgcttttctttttttttttttttttaatactttaagttctgggatacatgtgcagaacgtacaggtttgttacataggtatacacatgccgtggcggtttgctgcacccatcaacccrtcatctacattaagtatttctcctaatgctatccctcccctagccc

SEQ ID NO: 17951 - DNA, 513 bp, Homo sapiens
tgtagcacattattttataaagttagtatttgagcaaaactaaacaatatatttttacacacacatatgcagaatatgtgtatgtgatttacgtatgactatgccctaaagaaaagcagcaaagtgaggggasgtggacggcagggatggcacatgcagaagcacgcaagattccgcggtgtggagggttcgtgggtgcgtataattatcttccattatttacatgtgtactttatgcgttcgttagctatatttttgtatgttttaatatgcaacaaaacggcgtatgagttacgctttaatgtaaaattgtctacataacacaaaatttaaaagaaatggcatacggatagtagaaaacatgctttgaggaaaaagcgtcatgtactaagtccagaaatcgacattgcaaagaggcaccaactgttttcatcaagctgacttttccaggtgctactcagaaaagctgaccgatgatagagcactgggtcaactcacgctaattatgaaacc

SEQ ID NO: 17952 - DNA, 513 bp, Homo sapiens
tgtagcacattattttataaagttagtatttgagcaaaactaaacaatatatttttacacacacatatgcagaatatgtgtatgtgatttacgtatgactatgccctaaagaaaagcagcaaagtgaggggacgtggacggcagggatggcacatgcagaagcacgcaagattccgcggtgtggagggttcgtgggtgcgtataattatcttccattatttacatgtgtactttatgcgttcgttagctatatttttgtatgttttaatatgcaacaaaacrgcgtatgagttacgctttaatgtaaaattgtctacataacacaaaatttaaaagaaatggcatacggatagtagaaaacatgctttgaggaaaaagcgtcatgtactaagtccagaaatcgacattgcaaagaggcaccaactgttttcatcaagctgacttttccaggtgctactcagaaaagctgaccgatgatagagcactgggtcaactcacgctaattatgaaacc

SEQ ID NO: 17953 - DNA, 558 bp, Homo sapiens
gtgggcggtgccctgaagtgtgtgggtgcagtccactgcttcttgatcacckgtgcttccagttcctgttttgactcctctctcccgggctttgccaaaggaatcttgttattaatggaagcttgaatcgtgcaacatttaatcaaccgtgtggttggtaatcattgagatattgaccttaacagcaagctaggagttcgcacgatatttcccgcctttatttggggaaagtgactcttaagtattgtaggaggtatttttctctagtaagtcacgatctgaatttttttaaagattcattcccattattcattgcggagcctcgttgaaatatgtcgtctttgaaaaaaatctaccactttaacagcacgcggatttctttttttcctgctgagttttgcgacttgtgagaatcgtcgaaaattttagaacggaaaataaaccgtcttacggtcatagagacttacctgaaaagttaggttataactttctgagcttggaaaagagagcaaatgtaatatatatggtgtggaaagagtctttagatttgaagggtat

SEQ ID NO: 17954 - DNA, 558 bp, Homo sapiens
gtgggcggtgccctgaagtgtgtgggtgcagtccactgcttcttgatcaccggtgcttccagttcctgttttgactcctctctcccgggctttgccaaaggaatcttgttattaatggaagcttgaatcgtgcaacatttaatcaaccgtgtggttggtaatcattgagatattgaccttaacagcaagctaggagttcgcacgatatttcccgcctttatttggggaaagtgactyttaagtattgtaggaggtatttttctctagtaagtcacgatctgaatttttttaaagattcattcccattattcattgcggagcctcgttgaaatatgtcgtctttgaaaaaaatctaccactttaacagcacgcggatttctttttttcctgctgagttttgcgacttgtgagaatcgtcgaaaattttagaacggaaaataaaccgtcttacggtcatagagacttacctgaaaagttaggttataactttctgagcttggaaaagagagcaaatgtaatatatatggtgtggaaagagtctttagatttgaagggtat

SEQ ID NO: 17955 - DNA, 2047 bp, Homo sapiens
  misc_feature (1)...(2047): n = A,T,C or G
aaagagggtatattctgtggttgttgggtgcaatattctgtagatatccattaggtcaatattctgtagatatctattaggcccaattggttgtcaagtttaaaaccagaactagtttgttagctttcagcttaaacaaatcaacaagcaaaaaacaaataagcccatttaaaaatgggcagaggacatgaacagacactttttaagagacatacaagcagccaacaaacatatgaaaaatattcatcctcagagaaatgcaaatcaaaaccacaaggagataccatctcacaccagtcagaatggctattattaaaaactcaaaaaataacatgctggcaaggccacagagaaaagggaatatttatacactgttggtgggaatgtaatcctcagccactgtggaaagcagtttggagatttctcaaagaacttacaacagctactgtttgacccagcaatcccatggctatgtatatacccaaaggaaaataaatcatctgccataaagacaaatgaacttgcgtgtgttcatcgcagcactattcacaatagcaaagacgtggaatcaacccaggtgcccatcgacggtggactggatgaagaaaatgtggtacattaactccatggaatactatgcagccttaaaaagaacaaaatcatgtcctttgcacaacatggatgtagccggaggttattatcctaagcgaattaatgcaagaaccaaatactgcatgttctcagtacagtactgagtacacatgaacgtaaagatgacaacgatgcacactgggaagctctagaggaagaggggccaggtgggggttgaaaagcttcctatcaggtactgtgctcactaacttggtgtcaggatccataccctgaatctcagcatcacttaacatacccaggtaataagcctggacatataccccctggatctaaaatgaaagtaaaaattatttaaaaaataaaaaatttatgtttttaaaaaactggcatctaggtaaacttgaagtggaaatgcggatcatagargtagtattacttgggaaagctttggaagcacacagactggttggaagcgctgcctctgccaaccagcagctgtgtgactgtgtgccaggtgctttacctctctgagtaccaccagaatccaggagttagatgnnnnnnnnnnnnnnnnnnnnnnnnnnnnnnnnnnnnnnnnnnnnnnnnnnnnnnnnnnnnnnnnnnnnnnnnnnnnnnnnnnnnnnnnnnnnnnnnnnnnagaaccaaaatggaggcacagcctataggagtctggtagcttaaagaaaggcaaccaatcccatgtaggagtgggacgccacggaaggctcctggaggaatgatggtggtcttaggttctacaggaggagcaggatatggtgagcatacaggggcaaggtgaggctattggggcagagggagcaataggtacaaaggaagaactgagttgggggagcatccagaaacaggcacttcagctcaccgtgctgggagagcctggtgccagacaggcaggggcaggagaaagggccagagatgtaggatgggtcaggtaatggagagcagccaggatctgtggacaaagtagacacacagatgccaagtacagctttgtcgccacaaaggacttgaaacgtacaactttcttagactggggagagagcaagatcccatgggctatgcctacttgcaccacaacagggatttctatgctgactgttttcctgtgtttattgtagtccaccaccctgggactctggcccttctaggggtcagagtgcaggagtagccacaaggaacatgtccataagcggtcagggccagacgtcccccaccatgttgggggacacccttgaactgatgtgttcagtatcatttttaccttagcaagtttcatctcaggtcaactttcaggtggggagaaacaagttgccaggtagagcacatggatggggaggggggcacagcgacatgccatgtgccatcttcaggtgagctgcaggtgactggtgccctg

SEQ ID NO: 17956 - DNA, 752 bp, Homo sapiens
ttctttgcctatagtgatattaaatagcaaataaaaaacataatgacaacttgagagacggatcatagaagaatggaaaaatctttctatttattaccattaacagcagctttttgccctgcttttctaacagagagactcatattttcattttacagtaagccctgcaaattaagtagctagccttgcatttgaccaaccattttaaactgtgtaggactataatatgactatggataataatatgattttgtagctgttaagcagcagccagtttttctagatatgaacactgaagggagaaaaaagattgagatgaaaattaggctaaggctagatttcttggagctggtctaaaatattcacttctattagattattcacaaattttttgtcttgcataaacatgtaaaaatgattggtaggtgacatrttacaatattgacattacactttctacatatatttgacatagaatatgtctcccacactccaaacagcttcatgcattttaatttatcccacacgcagatactgacaggctatcttatcatcaccatttcacattgcaacagaaattatatgcctggctgtgcttggaacagttgtacaactgtgttcaaattagcaacatttacaaagagagaaaatgtaaaactaacaagacattaaggagcagataagtgggggcaaagggagtcagtttcacataatgtccttaaggtgtccaatccaacaataaatatttgcat

SEQ ID NO: 17957 - DNA, 1282 bp, Homo sapiens
gcaaaatttaattgccatccattcaagttgtgatccrtttttcattcgttcagtcatttgagtcaaaggaacagcttcatgcaataaaaatgtaaccatggtgttaaattgtacttcaaagctacaagcagaaagcaattttattctatctcaccactgctgccttaatcccactccatgaatcattgcttcccacctgggagaaaactggagaaaatttcatgtcttttctgatgacttacagatattaaaatgttcagtgtaatttaatatcaaactctaaaactcacttctaatttaaaatttctccattctctcttcctatcttcccttactttcttgtcctttagctgctgtttcttgttcctccttagtcagctgcagaggtgaagaagaattagtgggaaagagaagaatcttcttgacattacaatctgactttggaagtggtaggtgtctactctcaaagagtgctttttgggttctttgatgatccaacctcacaggaaaactaccccagcacaggaactatctatagtctctccctcaaaccctggttcccagcagtgcagccatctagataggcctctgtattagtcagggttctccagagtaggagatatatatgtgggtgggtgaatagatagatagatagatagatagatagatagatagatagatagatagataatagacagatagatggctttattgtaaggaattgtctcacatgattatggaggctaagttccaagacctgcagtcagcagagcaaatggtgtaagattcagttagaagactggcaggctcaagacccaagaagagccaatttttcagtttgagtctaaaggcaagcaaacaccaatgtccaattccagcagttaggctgaaggagttccctcttatttagcgtttttgttctatttgggtcttcaactggttggatgaagcccactcacactggggagggacatcttctttactcagtctacaaaatcaaatggtaacactttcacagatacatcaagaataatgtttgaccaaatgtctgggcaccctgtggcccagtcaagttgacacataaaatcaatcatcatagcctcttaggtggaggctcctttaagataattacagtcctgctattatcattgatccattggtttgaaggaaaatcctacattcttagcttgccactgatacatgttgctgtggtttaaatatttgtccctttaaaacgatgttgacatttaaatccccaatgtgacagtattaaaaagggaga

SEQ ID NO: 17958 - DNA, 582 bp, Homo sapiens
atcacctcccaccaggtctctcccttgacatgtggcgattacaattcgagatgagatttggaagtgagtgtagccaaagcatgtcaacgacccaaagggaaattgcagaaagggccccaaggaggtgagatgagtgctgggaattgaccatagggctcagcaattggaagcacatggtaatagcaytgtcagtgaagttgtgggcatcatggcctggctggagtagatccatgagacaatgacccatgagaggagctggagacagaaactaaagatatggcttgtgaattttggctttaaggagatcagggaaattgggtggtagctttgagaagatgtggatttaagggaatatttctcttttttttctttctttttaaaaaaagattaagagatatgaaatactgatgggaattacccagtaggaaggaagagggcacaactgcaggagctgagtgcttgagtaggtgagaggggctgggacccacttcacaggactttaaggacagcccaagtggttgatggtagcaggaaggttgaaggccaggtgtgaggcacaggcacagcatcctcaggagaatc

SEQ ID NO: 17959 - DNA, 582 bp, Homo sapiens
atcacctcccaccaggtctctcccttgacatgtggcgattacaattcgagatgagatttggaagtgagtgtagccaaagcatgtcaacgacccaaagggaaattgcagaaagggccccaaggaggtgagatgagtgctgggaattgaccatagggctcagcaattggaagcacatggtaatagcattgtcagtgaagttgtgggcatcatggcctggctggagtagatccatgagacaatgacccatgagaggagctggagacagaaactaaagatatggcttgtgaattttggctttaaggagatcagggaaattgggtggtagctttgagaagatgtggatttaagggaatatttctcttttttttctttctttttaaaaaaagattaagagatatgaaatactgatgggaattacccagtaggaaggaagagggcacaackgcaggagctgagtgcttgagtaggtgagaggggctgggacccacttcacaggactttaaggacagcccaagtggttgatggtagcaggaaggttgaaggccaggtgtgaggcacaggcacagcatcctcaggagaatc

SEQ ID NO: 17960 - DNA, 619 bp, Homo sapiens
actttggactctgtttttaaaaccttctaaactattacttaggataactctgaccagcaatggtgttattataaaaaataatcagtaaataaattgtgctagtttgttttgtattgttgtagcagaatacctgaggctgggtaattcataaagaaaatagatttatttaactcacagttctgcagactgagaagtaccaaaagcattgcactggcatctgttcagcatctggtgagagaaagagccacgttttaggtcaaaacatagtgagaagttcaaaggggaagccgacacgaacctcatgaaaagagaagctcctggctttataataactcactctcaagagggaacgaatccactcccacaagaactaatcyagtcttgccagagtgataacttgcttaccaccgtaagaacggcaccaaaccaattattagtaatccactcccatgaaccaacacctcccaccaggccccctctcgcaagatcaccaaattaggatcaaatttcaacatgagttttggtggggacaaacaaaccatatccaaaccataacaggaatcatacttaagaaatggccaaccttagcataatcagtggtagctaactggatattata

SEQ ID NO: 17961 - DNA, 1271 bp, Homo sapiens
atttaaacccaggtattttggctccagagaagctactcttaaaatgtatgctagagaaattgaaatatcactagatgctgatgtagttcaaggatttttaaataaccttgatgaactataggtaaaatagtatagcccttgatcagttaagaacatccaatatattactgtatgcttttaattcatgtaaataatatttatttaattacttaatgttatgtgaataataagagaatagagccattcttattaaaagcataagccaaatacaaagaactaccgcatattaattagctttcttcctttacggttttttttttttkgggggggttggattcttactgtctagagtgcagtggcatgatctcagctcactgcaacctccgcctcccaggttcaagcgattctcttgcctcggtctcccgagtagctgggattacaggcgcccaccaccatacttggctaatttttgtatttttagtagagacagggtttcaccatcttggccagggtggtcttgaactcctgacttcgtgatacacctgccttggcctcccaaagtgctgggattacaggcatgagccaccgtgcccagcctggttagctttcttatggactgtttgcttattgctctaaagcatagtgatttaaaaaattaaaaaaaggtgaaaatataattatctgcctgtacaaatttagatttctaaaaggaaacttagggtaaataagaaattaaagagatagcagaataaaaagtaagttcaaaatatcaatttattagtttctatgctatatctactaagtatacatagattgaagacatctcaaatttattttaataagatggtatggctcctctactaaatgatagacaataaaggcaactacatgccaattttacttacaaaatagataaaatgctaaatagcatactagccaatttagtgtaatagattattcacaataatccaaaataaccaaatatattcatttaaggaatgtaagaaatgttatattaggtaattgattaatgtaacacagcatattaattatttaaaagagataaaccacattacgttctccagaaataccaaagtagaattttggatttatttagtatacacccttaatatcatttgatcatggaaactccctcctcctataatcatatgctaatatttaccagaacaccaatttttttttctatttgtgtaacttctaagtttctcccactatgtttcccttcttctactattgttggagaaaggaga

SEQ ID NO: 17962 - DNA, 588 bp, Homo sapiens
tcactcatcacagactataaatacctgaattatctgctcacttacttattttctgtctaaattcaccagaaggcaaactccttggaactggaattttgccaattctattaatttgcatattctctgcatttagaacagtgcccggcacatagatatccaataaatatctgccaaaatgatcaataaataaatattaaaatagaagatggtgtgctacactgtatctgtataagctatgaactaaatacagcttcatatacaagctactcattacattctgttaatttgcatcatttggacctttaatacctccattattttctatatacaatgctgttaacaacttgtaaaacttaatacagttaataactttttaatgagatcaccaatcttaccaatgctaatactgttctttagctttggatccaaaagctataagaatggtaccatcttttcctgtgccttacacttcatctgccatttgattttcatgttggaagagtcctacaagcacccaaggcagmaaaacctttatatgagcatggatgacatcatgaccctagtataggtcatttaaaataacttttg

SEQ ID NO: 17963 - DNA, 550 bp, Homo sapiens
ggaaaagcattttcctagacccatgacattacaaactgccattctatataaattcagctgtaaaattatttttagtatgtatattctcctccaagacttaatcaattcctctctcaatgcttacagatgttttcattgagctaaggtagataaattcatagactatgtgctagaatgttaattatagtttttctttatagctcctgggtgatcatgccttaactcatctatgaaaaattacattttggccagatgaaaatttgatgtccctgggaaaatgggatttatacaactaagacaaaatcctaaactgcccatctgagatgccaaagcctcatttataatatttgctggrgaggggggcaattagcttggggggaaagacttctcaggtacctgtaaaacattcccaaaagcttaagaccaaactctcactcctcaccgaagttactggtctcaaactctaaaccaaagccctagaatattttgggaaatgtatagctattaaaaaacacttgacaactggggaaatgagaatgagtaaacctca

SEQ ID NO: 17964 - DNA, 549 bp, Homo sapiens
accaagaattgttctaagaatgtctaagggcttaacctcccctacctcagcatagcagagaagaaaatgaaatgtatttaatatttcttgggcctcagaatatacggtacattgaagcaatacaagataaataatttaggctgtttcaactgagattggcaaaatcccaacttgtcataaacagggttttaaaagcttgatactgcataaataatttatagtttctgaagagaagttctaaatttgaaaccacgcattaaatagaagtctctgtatcaaccacagggccctcatctccttcagragctgactgagatactttacaaaaaggtcatcatcataaataaaagcaaaatatcacggcttatttcctatttttgcaaatataaaccaaacccaggatgtttaagagatatgtcatagcatttttaagcaaacaagaacaaaaatgttacttatatgctcttatatttattaagtaaattgcaagctaaattaccctgcctttcttttttatgggagaataggattcattccatatttaccgaa

SEQ ID NO: 17965 - DNA, 547 bp, Homo sapiens
agacctcccagaccaaggttgaaggttgcaattcttactgatgacattccctccattcctagtctatgtgctctttgtctcaggatatgggtgacttctctgatgtgttgagaagagaaaggatctgtgaaccttgggaagtcattgaaatttgggatgctgtaaaatctttgtgaaagcttttttctctgagagaggtctgtcttaggaaaatgctcgattctcttrgcttgaaagatgcttataactataaaaatgtcttaatattctgctagctgatcctgcactcgagggctcatagtcatggagctaggggtaggaaaggggttctgattagctaacaattactaaggtttttataattattattgtagttctattactactattatcgttcccattgccacccttggtcttaatgccatctcttccctaccctcaatccctgatatttcctatcagttaagtaaatctatcacaatatactcagccccatcccaggcagcttttcctaaccatactagcacctggttagaggtgacctgca

SEQ ID NO: 17966 - DNA, 561 bp, Homo sapiens
ccttgcaaggtcggcagggagagcatgccccatctgcccctgtcttttgaaacatcctttttgccccatattgattgattgattgattaactgattgagacagagtcttactctgtcacccaggctggacggagtgcagtggcacaatctcagctcattgcaacctctgccttccttgttcaagcaattctcctgcctcagcctccccagtagctggggttacaggcacctgccacaaatctcagctaatttttgtatttttagtagagacacagtgtcaccatgttggctaggctggtcgtgaactcctgacctcacgtgatccgcccacctcagcctcctaaagtgctgggattayaggcatgagccaccacgcctggctccccatccttgatttgtacatgttttttgtttttgtagatttaggggtttgagtatagatttcttgcttgcatggattatgcagtgctggagtctgggcttctagtggagccatcgcccagtgagccctgtacccaaataggtgattttcaaccctcaccccttcccttccacctttcg

SEQ ID NO: 17967 - DNA, 532 bp, Homo sapiens
agagggctagggcaccaggccatattgagaaccttcattgcaggcccatgccaggcacgtgacccacagtgacccggggcttcacagagcaaccaagggaggaactgccgactccattctgatgaagggaaaagagcctctggggggctccctacatcactgctattggaggagtctgggtaggaatgcagcaggctccaaagtccctgctgtgtcccgtgggccatggagccaggtggcgggtcagggagaggagtggtgcatggttgggcagtggcaggacctaggctctgtcaatatttggtgtgggtcaatcattagccagcctcagacttgtccccccacaggttcctcaggtgggttctgggctaggcctgccctgctgggggctccacagggcttggctaggattggacgagtcgggtgggcagccctggyctctccactcaggagactccccacccacaggggctgcagtcctgcctcagggctcagcaagcaaacacgtaagagcactgcacagttgaaaaaa

SEQ ID NO: 17968 - DNA, 2308 bp, Homo sapiens
ctttctggtattaccacacaaatagactacctaaacacaagtagttttctcaagctcttcttttggaaactacctaatttaaaacaaaggaaacagctcattcacaacaaatatgcttggggtatatatttataaactttttttctgtcaaacaattkcatatatttccaagaactaaataaagggtttacactataagatataatttgagttaatggcaataacgtcattttacagtacaagatgattctactgactgatgatcatttagacatatgataatttgggaatttacactggattgcataaggaagatgcccggaaaaagtcaggattacaatcttggtctggtactgatagggtttggctgtgtcctcacccaaatctcatcttgaattgtagctcccataattcccatgtgttgtgggagggacttggtgggagatactgaatcatgggggtggttctcccatactgttcttatggtagtgaatatatctcatgagatctgattttataaagggtttccccttttatttggctcgcattctctcgtctgctgccatgtaagatgtgccttctgccatagttgtgaggcctccccagccatgtgaactgtgagtccactaagcctctttttctttataaatcacccagtctcaggtatatttttatctgcagcatgaaaatgaactaatacaggtatcaatccaaaatttatatcctgcatgggtaaactatacctcggacctatttaatgttaaatatttggatatattctttaagaccttcaaaatttgacattatattactatttctgtgggtaaattacattagacctaataaacaaaataagactttgaaaagcattaacttacattgtattaataaaatattgaattcaattctggttgttacataaattggatgacagagaatttaaatatgggtaagataattattgctctacaaagaagcagaggtggaaatgaaagttagagagaagcaagtcaaaatctttcaaagaaattaatgatcccataataaataatctattgaagagccgtaagaactaagcgttctgtggaatttttttttcttaattagtgtcaggtatagggatacaacttaatcattatttgactctacggtaataaaaagttgactaacattggtaaagggattccccaattttcatcaatgtccatcaatggtcacactaaatagcctaaactgatgataaaaactagcaaacatatgcatacattccttaaataacaaagcaatttcatatgttactgtctataattctcatgactcataagggagaataaatgaatagataaaattgcttacattttacaaatgctgcttttgaatgttagagaagtgatttttcttacagtttcataaaacaactagcagggtatcaaattagattcaacccaaagtactctaacacaaattccattctttttctctgtagtctttatgatgatgtctgttttggggtgatatttctatctgtgatagtaacaaacagatcctgctgaaatccaaatgtggggaagcagttttaaatcccccatagttccattggacagaaaataaactctaaaatttagaagatacagagtcattctaagaaggggtaaggcaatcagaaatatagtagcagctggtccagaattcctctgctgattgaaaatttcttctatgttttcctacctaactactaaagttactaacccttattttttaatttatgtttcaccaactgtcttaatggccaggtttttaatcatcttattcctctctctagcttgccaaactgcctttgacttttccatcttaagaatccagcttctcaataaagcctaaaaacagtaataggcaatgaaatatcttcattgatagatagctctcgtttaaaacaaatgtcattaggcagagagactgtgaaatgaacataaacacctagattaaaagtagccagagagctctagttgccagtatgtttcaaaaataatcacaaaatcggggagttgaaagaaacttcagaaatcatcagccaagaattaaccaaagttactcaaccacagaactgaaagccaaattttttgacacagtccaggcccttcccaatatactaggttgcacttctagtttaccaactgtcttatttttgtttatttatttattggatatatctgtaaactctttagaggtgaaatattaatagcaatcattaaataaccatatgtattacaaatacaataaggttaccaatccccatggcatatcagga

SEQ ID NO: 17969 - DNA, 552 bp, Homo sapiens
tttttttgagacagagtcttgctctgtcactcaggctggagtgcaatggcgtgatctcggctcactgcaagctctgcctcccaggttcacaccattctcctgcctcagcctcccaagtagctgggactacaggcgcctgccacygcgccaggctaattttttgtatttttagtagagacggggtttcaccgtgtcagccaggatggtctcaatctcctgacctcgtgatccgcccgcctcggcctcccaaagtgctgggattataggtgtgagccactgcacctggcctccttcaaagcattcttgatgccctggctattcctcccctggagccaccacctaatgcggggccacaggcaactcctgtatctgctctccctgcacggaagtggccttctccattttcatggggagagacagcaactcagagaggctggggctgttacttggaaagtccaagcagcagggaagtggctgaggcagggctgggatcctgccagcctgctacggggacagggctaactgtccaggagccacagatgggggcctgca

SEQ ID NO: 17970 - DNA, 552 bp, Homo sapiens
tttttttgagacagagtcttgctctgtcactcaggctggagtgcaatggcgtgatctcggctcactgcaagctctgcctcccaggttcacaccattctcctgcctcagcctcccaagtagctgggactacaggcgcctgccactgcgccaggctaattttttgtatttttagtagagacggggtttcaccgtgtcagccaggatggtctcratctcctgacctcgtgatccgcccgcctcggcctcccaaagtgctgggattataggtgtgagccactgcacctggcctccttcaaagcattcttgatgccctggctattcctcccctggagccaccacctaatgcggggccacaggcaactcctgtatctgctctccctgcacggaagtggccttctccattttcatggggagagacagcaactcagagaggctggggctgttacttggaaagtccaagcagcagggaagtggctgaggcagggctgggatcctgccagcctgctacggggacagggctaactgtccaggagccacagatgggggcctgca

SEQ ID NO: 17971 - DNA, 552 bp, Homo sapiens
tttttttgagacagagtcttgctctgtcactcaggctggagtgcaatggcgtgatctcggctcactgcaagctctgcctcccaggttcacaccattctcctgcctcagcctcccaagtagctgggactacaggcgcctgccactgcgccaggctaattttttgtatttttagtagagacggggtttcaccgtgtcagccaggatggtctcaatctcctgacctcgtgatccgcccgcctcggcctcccaaagtgctgggattataggtgtgagccactgcacctggcctccttcaaagcattcttgatgccctggctattcctcccctggagccaccacctaatgcggggccacaggcaactcctgtatctgctctccctgcacggaagtggccttctccattttcatggggagagacagcaactcagagaggctggggctgttacttggaaagtccaagcagcagggaagtggctgaggcmgggctgggatcctgccagcctgctacggggacagggctaactgtccaggagccacagatgggggcctgca

SEQ ID NO: 17972 - DNA, 625 bp, Homo sapiens
tatccaataaactatttataaatttcaggctggtttaatcttttaccaaactttccatgattgctcctaaaatcacttcacacaaacaaatcttgggacccggatgtatagtgaatgaaattgggctgatttggtaagagctcagagaaagatagcttacaatcttgtgcacatcttcaaaaattttagtccttgaatttgtggatgrtttgtgaaatgtaataaacaaaacactatcctgaaatattaagtttgtttattttagtcactctctaaggggctctgaatagcattttttgtttatacatctacctcccccatcttaacaaacatttctagcaagaagaacacctcaaaatcaaagcaaggggcatctatgaatttctttcctttcgaagttaaagtagatattataaaataagcattctatatgttcagtttattaaagtcaatagaaagcttttctaaacagcacatcatagagctaccatttatcatactttaattcagcacctattgcaagaataaatgcttcagtgaactttggtaagccaagtgacacactcaataagacttatctaacatttacctggttctactatgagactcagatttctttttttta

SEQ ID NO: 17973 - DNA, 598 bp, Homo sapiens
tattaaaaactgaatattcatattggggaaatttacaagatgctgacaaaataaatacagtccttaaatagaggcatcccgtgctacatagaaatttaaatgattcaataataattcaaacactcagaagaattttttaacattttattagtaataattagagattccacagaragttgtgtcttatatacccttccttcagctttgcccaatgttaacaccttgacaaggcctgtgcaatgttaaaaccaggaaattaccattcatgcaaaccacagagagtattcttcaggttttttcagttacacatggactcatttttgtgtgtttgcgtaagtgtgtgtggtgctatgcaattttaatccaagtgagacttcatataaccaccacaaaaattaagttcctaaactgcagactcatttcaagattccctcatgatacctctttacagcctcattctcccactcatctcaaacccctagcaatcaacaatttggtttttgccttaataatgatgtttttcctcacaaatattatataactatacagatatagatatatacacacatatacatatattatatattatataatgtta

SEQ ID NO: 17974 - DNA, 517 bp, Homo sapiens
  misc_feature (1)...(517): n = A,T,C or G
aannnnnnnnnnnnnnnnnnnnnnnnnnnnnnnnnnnnnnnnnnnnnnnnnnnnnnnnnnnnnnnnnnnnnnnnnnnnnnnnnnnnnnnnnnnnnnnnnnnnagaaaatagaaccatgaagagccccctgtcctggggctgtctgaccatgaatccaaattcgtagataacaaggtcagtgatcaatttttaggacagagaatagaggaattattgggatattatttcctgctgaccaccaatagtcatactttaatctggcttctggcacttgccatgcttattcttatccttatacctttgtttatggtggcagacttgtccaacttttctcctrtttttctgaatctttctagtccttggaagtcccattttctccaagatttctcttacttctccagctttcactgatctctctctcctttgaattcttgtagcaatatggtcataccacacagttcagaattttttttttgagacagagtctcgctctgtctcccaggctgtagttcagtag

SEQ ID NO: 17975 - DNA, 517 bp, Homo sapiens
  misc_feature (1)...(517): n = A,T,C or G
aannnnnnnnnnnnnnnnnnnnnnnnnnnnnnnnnnnnnnnnnnnnnnnnnnnnnnnnnnnnnnnnnnnnnnnnnnnnnnnnnnnnnnnnnnnnnnnnnnnnagaaaatagaaccatgaagagccccctgtcctggggctgtctgaccatgaatccaaattcgtagataacaaggtcagtgatcaatttttaggacagagaatagaggaattattgggatattatttcctgctgaccaccaatagtcatactttaatctggcttctggcacttgccatgcttattcttatccttatacctttgtttatggtggcagacttgtccaacttttctcctatttttctgaatctttctagtccttggaagtcccattttctccaagatttctcttacttctccagctttcactgatctctctctcctttgaattcttgtagcaatatggtcataccacacagttcagaattttttttytgagacagagtctcgctctgtctcccaggctgtagttcagtag

SEQ ID NO: 17976 - DNA, 542 bp, Homo sapiens
tggggcacgttcatgtaactgcattccaggctgggctacagagcaaaaccctgtctcaaaaaataaataaataagcaatgtatatggcaatcacagtcctcggtaccaaagaccaaactccaagcctatatgaagacatctgatgttatagtcattggaaaatgaaaagggaaggagkgggctaaggggagcaacaaaaggttgactgtgttttcttctggcagtctgctttcacagccagtactatgcctgtggccatctcccaggctcaggagagcctatcttactctagcccatcagattcactttcccgggaactggaaatagaaccttgatatggtttgcatttgtgtccctgactaaatctcatgtcaaattataatccctagtgttggaggaggggcctggtgggaggtgactgagtcatgggggtggatatccccccctgctgttctcaggatagtgagtgagttctcacgagatctggttgtttaaatatgtgtggtacctccagcttctctttcttcctcctgctccagcca

SEQ ID NO: 17977 - DNA, 2951 bp, Homo sapiens
tggctggcagtggaaaattacagaagcacttctgccgtcacctggccatggtgttttttgacatagatgaaaagagcccagggatctgtctaaagaactggtagaaatgctctctttttaagaccaagcaaattcattcacacatgctatttttttgaaatgtattttcatgttattaaaattctcataatcattactaaaagcagttaagtgtttcttgtcctctagtcagatttagtagtcaattaaaaatatatgaccttacaaaacagaactatctctccttaaaaaacaacaacaacaacaaaatatatatatatatatatatatatatatakagagagagagagagagagagagagagagagagagagagagagagagagaggagagcaatggccattttgcatacagcaaatacaaatttcaacaaaccagattagagaacctatatcccatcttttgagtctggtgaatttttgcccaaaatattaaatgaggctgagaattatgatttttttttctactagagtatactataattctgtctggttcccactgaagtttacatgcctagttaatccaaagtaagcatgaccctagtgaaaaacatttttaaaaaagaatagaaagaaaaaatgcccacagcaaattgggctatttggacaaataactacctatttgacgagataagatcctaaacctacagattcaaagtagttacaaacaaagctcccacacaaatatattctgtagttaatatactctactgatgcccacacggggttcaattttctatacagtattgccatataagatgggttttgaaaattcacagagttggtttttcaaacatcccctgctttgtcaagtttaatttataggagtaaaccccaagcatggaccagaattaaacaacatttatttggcactaaattcagcaatacatacaaaggcaaacagcatgcacatacatttccacaaggggtaggagcacctgctctccacctacaatatagactacttgaaaagcaggtcgaggatacagaatgtgatttacagctgactacatcaatttaatgcatttgtttccttgggaggaaagagagttgagtgcagttaaaataatagtttttcagtgttcttcaaactaaaacactaaaggtccttttagcaatgcctatctgactttcaaaagtaatcaaggcatcatcaacaaatattattgaaaagctaccatgagctcattgtggtgggaaaattatattctgtccaaataagaagcttctggaaaaaaattgtttaatctttatatgattcaaattctcagaattgtttaggtggattaaaaaacagaagaacctgctaggtggttaatttaaaaactaaacaaacacatacatcagcaaacagattcgctaatgactttgtccttatataattcccttaattttggaagttctccgttccctctctagaaaggaagtagttgtcagagattaatgttttccaaaaacttgcttggtaaaacattaatgcattcttcgatatgctaataaatattttgtaaaaataagtacatgaatataagagatgtatggagttttagctaaagaagagaaacattgagaaaatgaagctgaatctttttcattacaattagacatctaaaaaccttaagtatactaatatacattttaactcttttagaaatatttagtttctcatattagtcccatgaacgatatgagtacaatcatactgatgagtttttaagagtcccttccagcttttataaagcataaacttataaaatctcaggccagtggtttggctttataggaaattgcttatcctgctttttgaaagtaatctaagtttgttccacgtcaaggtgaatgcaaggaaaatggaatgactaattgataaactggaagaattaattcactctgagaaaatgcaacataattctgtagtatgctttgtttcctcaattaaatataaattagatttatttttaaataacctgtatcacttttgagcattctacctgtgatgtatcatttctcagcttaattaaactataatgtgtaaagaatacgtacactttggtgatttaacacttggtattgtaattctttcgacagctacaaaaataagactgatgaatgagtcaacataaactaattttgatgttaagcaaaatacaaactaccattaatcaccacattatgctaatcatgataatgatacttgatattttatattgaactttgacttatgtgttaggtgctatgttaaaagttttagacatattacaatttcaatcttttcacataccctaagagataaacagaatttttataatgaaaaaaacaaggtttataaatgttaagatactttaccaaagtcatatacctaatgagttatgttatagggacttgatatctgctgagccatttcttaattaagaatgttgtacttcaaacacacataataatctgacacattttaataacacacattctgactatgatgctttgtggcaatgaggcataagtggaaaaagttttcctctgaatagatataaattggaataatgtttttaaagtcaaatttcacgaatttttaaaccttctgaaagcattatcttctataactggtgcattcacaaattctcttacattcacatgaatggagtaagatgtgaataaaacttgtcaacacttttcttctctatctccttgtggcctacagccactttgggctttgggttttaggtgttctgggtttcagaagctgaaagcaataaagtcttattgcagaagaaataagaagtttctcctatagatatctactataacaaggcaggtcctaggaatgatggcgacagtgaggattgactaatctgttcccgtcagttctcagaccctgtcattaagcagctacag

SEQ ID NO: 17978 - DNA, 2951 bp, Homo sapiens
tggctggcagtggaaaattacagaagcacttctgccgtcacctggccatggtgttttttgacatagatgaaaagagcccagggatctgtctaaagaactggtagaaatgctctctttttaagaccaagcaaattcattcacacatgctatttttttgaaatgtattttcatgttattaaaattctcataatcattactaaaagcagttaagtgtttcttgtcctctagtcagatttagtagtcaattaaaaatatatgaccttacaaaacagaactatctctccttaaaaaacaacaacaacaacaaaatatatatatatatatatatatatatatagakagagagagagagagagagagagagagagagagagagagagagagagaggagagcaatggccattttgcatacagcaaatacaaatttcaacaaaccagattagagaacctatatcccatcttttgagtctggtgaatttttgcccaaaatattaaatgaggctgagaattatgatttttttttctactagagtatactataattctgtctggttcccactgaagtttacatgcctagttaatccaaagtaagcatgaccctagtgaaaaacatttttaaaaaagaatagaaagaaaaaatgcccacagcaaattgggctatttggacaaataactacctatttgacgagataagatcctaaacctacagattcaaagtagttacaaacaaagctcccacacaaatatattctgtagttaatatactctactgatgcccacacggggttcaattttctatacagtattgccatataagatgggttttgaaaattcacagagttggtttttcaaacatcccctgctttgtcaagtttaatttataggagtaaaccccaagcatggaccagaattaaacaacatttatttggcactaaattcagcaatacatacaaaggcaaacagcatgcacatacatttccacaaggggtaggagcacctgctctccacctacaatatagactacttgaaaagcaggtcgaggatacagaatgtgatttacagctgactacatcaatttaatgcatttgtttccttgggaggaaagagagttgagtgcagttaaaataatagtttttcagtgttcttcaaactaaaacactaaaggtccttttagcaatgcctatctgactttcaaaagtaatcaaggcatcatcaacaaatattattgaaaagctaccatgagctcattgtggtgggaaaattatattctgtccaaataagaagcttctggaaaaaaattgtttaatctttatatgattcaaattctcagaattgtttaggtggattaaaaaacagaagaacctgctaggtggttaatttaaaaactaaacaaacacatacatcagcaaacagattcgctaatgactttgtccttatataattcccttaattttggaagttctccgttccctctctagaaaggaagtagttgtcagagattaatgttttccaaaaacttgcttggtaaaacattaatgcattcttcgatatgctaataaatattttgtaaaaataagtacatgaatataagagatgtatggagttttagctaaagaagagaaacattgagaaaatgaagctgaatctttttcattacaattagacatctaaaaaccttaagtatactaatatacattttaactcttttagaaatatttagtttctcatattagtcccatgaacgatatgagtacaatcatactgatgagtttttaagagtcccttccagcttttataaagcataaacttataaaatctcaggccagtggtttggctttataggaaattgcttatcctgctttttgaaagtaatctaagtttgttccacgtcaaggtgaatgcaaggaaaatggaatgactaattgataaactggaagaattaattcactctgagaaaatgcaacataattctgtagtatgctttgtttcctcaattaaatataaattagatttatttttaaataacctgtatcacttttgagcattctacctgtgatgtatcatttctcagcttaattaaactataatgtgtaaagaatacgtacactttggtgatttaacacttggtattgtaattctttcgacagctacaaaaataagactgatgaatgagtcaacataaactaattttgatgttaagcaaaatacaaactaccattaatcaccacattatgctaatcatgataatgatacttgatattttatattgaactttgacttatgtgttaggtgctatgttaaaagttttagacatattacaatttcaatcttttcacataccctaagagataaacagaatttttataatgaaaaaaacaaggtttataaatgttaagatactttaccaaagtcatatacctaatgagttatgttatagggacttgatatctgctgagccatttcttaattaagaatgttgtacttcaaacacacataataatctgacacattttaataacacacattctgactatgatgctttgtggcaatgaggcataagtggaaaaagttttcctctgaatagatataaattggaataatgtttttaaagtcaaatttcacgaatttttaaaccttctgaaagcattatcttctataactggtgcattcacaaattctcttacattcacatgaatggagtaagatgtgaataaaacttgtcaacacttttcttctctatctccttgtggcctacagccactttgggctttgggttttaggtgttctgggtttcagaagctgaaagcaataaagtcttattgcagaagaaataagaagtttctcctatagatatctactataacaaggcaggtcctaggaatgatggcgacagtgaggattgactaatctgttcccgtcagttctcagaccctgtcattaagcagctacag

SEQ ID NO: 17979 - DNA, 570 bp, Homo sapiens
tgaagtcacaccattgccgactctgcaccattcctccttcccaggcagttcgcctgaatatggcaacctgactttgggccccttgcacctcttctctcactccaggaacactgagactaagatctacaccaacctgcttccactttattcttgtttacacattctcctgctcccagatttggagtcagaacactatgtgagctcaacagtcctgctcagagccatgttccatatcccaccagtttcccttttcccaacccccacccacccccactcagtaagtccccttgcccaggttttgctcttggagggaagaaagcagaagaaaagatgcaggactgagatgattgtcctgaccccgctacccycaagtgtaagagaagtcctggatggaatgggtggtgattccaatgagggatgggaacctctttccaaggcacaaggggccatcttctcaacatgctgctttttcagatttgggtagtatgttggccaggagctgggggctgaagcgcctccagctgactgaggaggagaggaatgtgaggacgctgatgcgggtccacggtc

SEQ ID NO: 17980 - DNA, 2136 bp, Homo sapiens
  misc_feature (1)...(2136): n = A,T,C or G
gnnnnnnnnnnnnnnnnnnnnnnnnnnnnnnnnnnnnnnnnnnnnnnnnnnnnnnnnnnnnnnnnnnnnnnnnnnnnnnnnnnnnnnnnnnnnnnnnnnnnagctaattaattaattcaatatttattggttatcttcattgtctccagctaaaacagttggctctgaaatgttgttggctctttaaacttaagtatggtctgttttgtttccagagccctgcacattgcctgccaagaatatcccctgtgctctgccttccctggcaccatcccactcactaactttaccacctctattagcaacattgtatggctaattcccattcacctttctggtctcagcttggatcctaaagcctctgtaaagactttttgcccctccaagagatgaatgggtgcactcacatgtaatcccgctccatcgtagcacctactatactgtgtcatgattgcaggtttccttttccatccacctacttcatgccctgctctgccatatctgtccctgaaccagcactccctaacccaccccaacaagtctctgagcttgagtattggaactgggtcttacttctgttgaattgcaagcttctaacgcaaagcccaacatataactgttgtacagatatgttttggttgaatgacttagttctatgtgccaggcactgtgcattaaaacacttagtatgtggcaggcattggcaacacatcaatttccaaaatctcattgaactctgataataatcctctgaggtatattattatttctattttacaggcaagaaaattgagaattaagggcattaaataatatcctcaaggtcatatagtgaggagttgaaattagaaattatgtctgtctgaccctaatcctctgctccatatgaatcaatcattgcaatatagtttcttaaagtcataatgaagttataataaggcatacagatgatgtaaaggaatcagaaattatcttctcatgattcgtgggggtggacagcaggatctttgcagggaggtgatcctgaagaataaacctgatacacagagagggatcagcacattcaagtgtcatgagctgtaaaatgtcctggcctctttcttcagggagtggtgtggattattctgtaactggaacacagagtgcaggggagaagcagccgaggtgcttggaatggagtatcaagggtacaagagccaatctaatgcaagggggggatctggcaggagtagatgaatgaccaagggatgtatctgccttaattctaagaaggcgagcgtgtgctcccaggggaagagtggcattatcaaactctggaaggcatgctaagttcagagtgaagtcaggtggtgaatcagttgacaaatagaggaaaataattttccctccataatgcataagaaacaagagtccaaagcctttcactttgtcagcaactcttcgaatcacatactatagacagttgagtggagactggaaggagtggaagagtaattactgaatacatcggacatcccctctattccttctcattctcctcctgtaacacatgctactttatctactgttagtattatgtatgtgctagacaccacactacacacatacttttgtttattttcctcgatccttccattgtggagagtattagtacycccactttctggataggagaatgaccgatcaaagaggctaagtgactggtcaagtctcgtagctaattactaacagcccagattaaccccatgtgtatatgacatcaaagtctatcatcttaactgattttatgtagattaaataataccaaatattcagtgcctcctcggagtcaaacactttatctacccgacacataacaaatatgataagatatttgctctgtccctaatcttttagttcattaattcttaaaaagtaaagatttgtctaaaattcacgtgctattttctctggagcaatttcttccctgttttcctctacctcattttctaattccacatttagaaagcatgggatattttgattatttgctgagatattagaaattctcttttagaatcttgtatttgcttttgaagtccacagttggagcctaagagaacaacttcatgaaagagctttaaaaattaatatgtg

SEQ ID NO: 17981 - DNA, 831 bp, Homo sapiens
gactggtaagatataaaccatgacacacagcatattttaaatggtgarctagaacaataccatttttaaaatgtgtaaattgatttttattttagggatgttttggactcttacacttgtgagacaacctgagaatgcaatgtttaattaatttattagtctactttttaaaataatatacctgaaaaaatcacaaagaagatgaatagtaaattattttcaagtatgaactgaataacacctcgctgttatttcaatataacagatacataaaatgtcttttgaagaataatggtcttcacagaacatgtagttgattccaagtgatttcaatttattatctgaatacctaacttttagttgtttttaaccatgaaagtataaatgaaattcttaactaatggctgcaaattcctcaaaaacatcataagtggaattccccaaaatgatgcaagtgtgtaattcagtattatttcttaaccacttatgaaggcaaccaaataaaaaaagaaagaaaaacttttaaaaagttcctgtttcttatgtaagtcataatttaatttcctatatttatttgactcaaaagtaacgagactaatgtacacccacattaaaaacaattcttgccctgtggtcctcgctcaggagtgctgcatttgctctgcgggtgccgctggcagtgtttccagaggctgctgtagtcagcgtgagggggctatgtcatgacttgctccgtttgagaggaaagaaaggagcagagttgctcaaacagcaatggggcaaggaacaaaagtaatagaaatcatttttcagtataacacatacactgaa

SEQ ID NO: 17982 - DNA, 831 bp, Homo sapiens
gactggtaagatataaaccatgacacacagcatattttaaatggtgaactagaacaataccatttttaaaatgtgtaaattgatttttattttagggatgttttggactcttacacttgtgagacaacctgagaatgcaatgtttaattaatttattagtctactttttaaaataatatacctgaaaaaatcacaaagaagatgaatagtaaattattttcaagtatgaactgaataacacctcgctgttatttcaatataacagatacataaaatgtcttttgaagaataatggtcttcacagaacaygtagttgattccaagtgatttcaatttattatctgaatacctaacttttagttgtttttaaccatgaaagtataaatgaaattcttaactaatggctgcaaattcctcaaaaacatcataagtggaattccccaaaatgatgcaagtgtgtaattcagtattatttcttaaccacttatgaaggcaaccaaataaaaaaagaaagaaaaacttttaaaaagttcctgtttcttatgtaagtcataatttaatttcctatatttatttgactcaaaagtaacgagactaatgtacacccacattaaaaacaattcttgccctgtggtcctcgctcaggagtgctgcatttgctctgcgggtgccgctggcagtgtttccagaggctgctgtagtcagcgtgagggggctatgtcatgacttgctccgtttgagaggaaagaaaggagcagagttgctcaaacagcaatggggcaaggaacaaaagtaatagaaatcatttttcagtataacacatacactgaa

SEQ ID NO: 17983 - DNA, 583 bp, Homo sapiens
tcacaaaatcctatgaggcaggtaatattattttatcctcattttacagataaagttaacaaggatcagaggctttaaatggcttgcccaagtcagaaaactaagtggctgaggcaagatttgaacccaggcaatctggtcctaaagttcmtgctacatgaagatagagaaaaaacattgaggccaggcatggtggctcatgtctgtaatcccagcactttggaaggctaaggcaggcggatcacctgaggtcaggcattagagaccagcctggccaacttggccaaaccccgtctctactaaaaatacaaaaattagccaggcatggtggcgcatgcctgcaatcccagctactcgggaggctgaggcaggagaattgcttgaacccgggaggcggaggttgcagtgagccaagatcatgccactgcactccagcatgggcaacagagtgagactctgtctcaaaaaaaaaaaaaaaaaaaaaaaaaaaaaaggcactttgaaattgaaatttataaaactgtaaaccatgttgacagacataacttgggtttatcttttatttctcaaaacactgaaaatg

SEQ ID NO: 17984 - DNA, 583 bp, Homo sapiens
tcacaaaatcctatgaggcaggtaatattattttatcctcattttacagataaagttaacaaggatcagaggctttaaatggcttgcccaagtcagaaaactaagtggctgaggcaagatttgaacccaggcaatctggtcctaaagttcatgctacatgaagatagagaaaaaacattgaggccaggcatggtggctcatgyctgtaatcccagcactttggaaggctaaggcaggcggatcacctgaggtcaggcattagagaccagcctggccaacttggccaaaccccgtctctactaaaaatacaaaaattagccaggcatggtggcgcatgcctgcaatcccagctactcgggaggctgaggcaggagaattgcttgaacccgggaggcggaggttgcagtgagccaagatcatgccactgcactccagcatgggcaacagagtgagactctgtctcaaaaaaaaaaaaaaaaaaaaaaaaaaaaaaggcactttgaaattgaaatttataaaactgtaaaccatgttgacagacataacttgggtttatcttttatttctcaaaacactgaaaatg

SEQ ID NO: 17985 - DNA, 583 bp, Homo sapiens
tcacaaaatcctatgaggcaggtaatattattttatcctcattttacagataaagttaacaaggatcagaggctttaaatggcttgcccaagtcagaaaactaagtggctgaggcaagatttgaacccaggcaatctggtcctaaagttcatgctacatgaagatagagaaaaaacattgaggccaggcatggtggctcatgtctgtaatcccagcactttggaaggctaaggcaggcggatcacctgaggtcaggcattagagaccagcctggccaacttggccaaaccccgtctctactaaaaatacaaaaattagccaggcatggtggcgcatgcctgcaatcccagctactmgggaggctgaggcaggagaattgcttgaacccgggaggcggaggttgcagtgagccaagatcatgccactgcactccagcatgggcaacagagtgagactctgtctcaaaaaaaaaaaaaaaaaaaaaaaaaaaaaaggcactttgaaattgaaatttataaaactgtaaaccatgttgacagacataacttgggtttatcttttatttctcaaaacactgaaaatg

SEQ ID NO: 17986 - DNA, 576 bp, Homo sapiens
gatttaaacacaaagttcagggttcacgtgcacatcctttttttatgacatgcctttcttttacttcttttaaactattcttttagatttgttttcgtgaataagtaaaacaggaaaaaaagaacgtcagcatctatccaaattgccgtgagttgaaatgggtgtagtgagagttgatgctgagacttgtagagagttgacatagtatataattactacagttatctgagtggcactaaatttgttcacctgtcattcttctagtggtatatatttgctaaaatatgattcaaagaagtgtyattgtttttataatttgaagaacaaaaggcctgtattatataaaatattttccatttaatatattctttctataaaagttaaaaatccaaagaaatctttcaaagtaaattattgttctcagaaggaagggtagaagagtttatacatttggaattaaattggctgggtgcataactaagaacatattgaaaatgtacagcacttgaaccctgctgtgttatcatcatagtgaatcacaagttttgcttggttactgtcaaatggaaatagaaa

SEQ ID NO: 17987 - DNA, 576 bp, Homo sapiens
gatttaaacacaaagttcagggttcacgtgcacatcctttttttatgacatgcctttcttttacttcttttaaactattcttttagatttgttttcgtgaataagtaaaacaggaaaaaaagaacgtcagcatctatccaaattgccgtgagttgaaatgggtgtagtgagagttgatgctgagacttgtagagagttgacatagtatataattactacagttatctgagtggcactaaatttgttcacctgtcattcttctagtggtatatatttgctaaaatatgattcaaagaagtgttattgtttttataatttgaagaacaaaaggcctgtattatataaaatattttccatttaatatattctttctataaaagttaaaaatccaaagaaatctttcaaagtaaattattgttctcagaaggaagggtagaagagtttatacatttgraattaaattggctgggtgcataactaagaacatattgaaaatgtacagcacttgaaccctgctgtgttatcatcatagtgaatcacaagttttgcttggttactgtcaaatggaaatagaaa

SEQ ID NO: 17988 - DNA, 576 bp, Homo sapiens
gatttaaacacaaagttcagggttcacgtgcacatcctttttttatgacatgcctttcttttacttcttttaaactattcttttagatttgttttcgtgaataagtaaaacaggaaaaaaagaacgtcagcatctatccaaattgccgtgagttgaaatgggtgtagtgagagttgatgctgagacttgtagagagttgacatagtatataattactacagttatctgagtggcactaaatttgttcacctgtcattcttctagtggtatatatttgctaaaatatgattcaaagaagtgttattgtttttataatttgaagaacaaaaggcctgtattatataaaatattttccatttaatatattctttctataaaagttaaaaatccaaagaaatctttcaaagtaaattattgttctcagaaggaagggtagaagagtttatacatttggaattaaattggctgggtgcataactaagaacatrttgaaaatgtacagcacttgaaccctgctgtgttatcatcatagtgaatcacaagttttgcttggttactgtcaaatggaaatagaaa

SEQ ID NO: 17989 - DNA, 450 bp, Homo sapiens
ttccagactggggactctctctcctgggtataaggatagtaaactaatttgtgaagtgccaggaacacttacctgactatcagtgtccaatattctctgtcttgattttgtttggtctcacatagccctcytaagaagctgatatcttgacatatgttaactgctcattgctttcagcattaatgcagtgggtttattccatctgaggagctgtcttctcctctgttggtacagaacatcagtcagtgaattgtataaatatttctttgatgcctactctgtaaccagataaacacagaaggccatagaccacaagtcatgatctttgaagagaaaactcctgagtgtttggtcagcagacattgcaagtgacagtaggccatagaatctttttagggggctgtggggcaagctcttagggtatgcaggggccctcctcttttcctctct

SEQ ID NO: 17990 - DNA, 576 bp, Homo sapiens
aacttaaactgtgcaaatacattcaagacttaactgtcttgatacgaggcccaggcgggtggatcacctgaggtcaggagttcaagaccagcctgaccaacatggagacacctcatctctactaaaaatacaaaattagccgggcatagtggcacatccctgtaatcccagctgctcgagaggcaggagaattgcttgaatccaggaagcagaggttgcagtgagccaaggttcaccattgcactctagcctggatgacaagagcaaaactcggtctcaaaaaaawaaaaaaaataataataataataaataaaagaacaaataaccaagaggagcttctggaattcacatatacaggaaattttttttcacatttctaggtgtcaaatacagctaacgaaagaagaaatcagcttcccacatttcttttacatttcagttcattctaactatcccatattttatagataaaatcttaaacagacctaaaataagtgtagcatacctcattcattataagaaacaaaagataacaacccagttaaaaactgagcaaaggacataaatagatatttc

SEQ ID NO: 17991 - DNA, 584 bp, Homo sapiens
tgagataatgttgtatttgtctttctatgcctacattatttcacttattatcccacagattcattcatgttgtcacaaacgacaggatttcttccctttttaaagctgaatggtattacattgtgtatatatactacaatctctgtatccattcattttttgataaacaattaggttgattccacatcttgactgttgtgagcaatgtgttttatctcccagctcaccactattgctttagagaacactttgcatttctggtgaaataaatcctgtgcataccttcaaccacctgcaagacaccctccccttgagaagggtggcccaagatgagcatgagaaacacccagagtctcttgtggctacatatcaaaatttctggattattttgtcaccatacaccaaaattttaggtttattattttggagtgatagtgcaaaaggaactaatggaattcagaaaacccaactttcttttgattcacatgaatgtattttagcctattttattrttttactcaatatatttgtgtctttatgtttaaagtacacttacagtaggcagcaaaatgttggatcttgct

SEQ ID NO: 17992 - DNA, 641 bp, Homo sapiens
tgcagcgtatttgaaatgtgatttactttgagaaaaaagagcacacacaagtataacaacagtctttcaatatgataaaaacatatcaggtgtggattttgctgcacttgtattttcaaactagaatactacgaaggtaatagaatgcaacttccttgagtgtacattatctttaaataatttcttggaaaaatacattgtttttattcttaaaaaataagtggtatagagaagagtaaaaaagctaataaatgttatttataaaccttgaaacttctcattttgtgcaagtggctttgagagacacacaactctatttcagtataacccaaaactcatttgttggccaccagacagtagaatgaaaaggttgaaaagaatctcaagtatgaaaagattgagaagaattccctggaacataatgtaayaaaacttattttcaattaaaaatatgcatcttattcagagacactatgcaaggtaagataaatttcgactcagttgtgaatgcaaaggccatgctctctcagtatacaatgttgttgcatataaaaattaatatttattccacatctaattttccttgggcatttttaggaagacattcatgaagttttgcacatcagccaagactcttaata

SEQ ID NO: 17993 - DNA, 598 bp, Homo sapiens
cccctttgaaaagctattgaaagttatatacgcttaaatactaggtatagagaaawgcatttactcagtgtaacttgcagataattttatagggttcatagaacacattagacaagactaaagacaccagttcaagaccctctgggtctgtatttgtcagttcttttcaaaatctctttcaatgaatatatattttcctcctgattttcagttatttcacagcattcttggtcaaaactttaagggtacttaaaggagacagggagaacattcaaattgggcaatctggggatagttaaataaaagatttatttacaaaggcatgcacaaagtgtagtaaaagcaacaagaaatagttcaagacccaataactggcgaatcattacattaaaaagtgagggggagcggtggttatgggagctcataactactgtcatcttatctctgacaggcacattcattgacatataccaaacagaagccagagtacaagaagcctggttgatgtagttcatagaggtcatcctcccgaagcacagagcagcaaagagaagggtagaggaagtacctagagggacaatgtagaatatctgagaaa

SEQ ID NO: 17994 - DNA, 598 bp, Homo sapiens
cccctttgaaaagctattgaaagttatatacgcttaaatactaggtatagagaaatgcatttactcagtgtaacttgcagataattttataggkttcatagaacacattagacaagactaaagacaccagttcaagaccctctgggtctgtatttgtcagttcttttcaaaatctctttcaatgaatatatattttcctcctgattttcagttatttcacagcattcttggtcaaaactttaagggtacttaaaggagacagggagaacattcaaattgggcaatctggggatagttaaataaaagatttatttacaaaggcatgcacaaagtgtagtaaaagcaacaagaaatagttcaagacccaataactggcgaatcattacattaaaaagtgagggggagcggtggttatgggagctcataactactgtcatcttatctctgacaggcacattcattgacatataccaaacagaagccagagtacaagaagcctggttgatgtagttcatagaggtcatcctcccgaagcacagagcagcaaagagaagggtagaggaagtacctagagggacaatgtagaatatctgagaaa

SEQ ID NO: 17995 - DNA, 581 bp, Homo sapiens
ttttcatagggccagtgcagcactggtctgatgcagcagcagctttgggagccactgatctagtccaacmttctctaatcctatttcacccatgacacttaatgcagtactagctaagtactgtcaagatggggatggaaataggtgcaaagacacatacacatacacacacactcacacacacattcacacacacactcacacacacacacacacataccctcccttctacatgttagaagcataaggccttggtaagtaactataggggcagaatgtcttcaggctcaaaaccaaaagggagagggagtgctgaatcctaaccactaggcagatcacttgagatcaggagtttgagaccagcctggccaacatggtgaaaccctgtctctactaaaaatacaaaaaattagccaggcgtggtggtgtgcacctgtagtcccagctacttgagaggctgaggcaggagaattgcttgaactcaggggctggaggttgcagtaagccgagatcatgccactgccactgtactccagcctgagtgacagaatgagactctgtctaaaaaaaaaaaaaaaaaa

SEQ ID NO: 17996 - DNA, 581 bp, Homo sapiens
ttttcatagggccagtgcagcactggtctgatgcagcagcagctttgggagccactgatctagtccaaccttctctaatcctatttcacccatgacacttaatgcagtactagctaagtactgtcaagatggggatggaaataggtgcaaagacacatacacatacacacacactcacacacacattcacacacacactcacacacacacacacacataccctcccttctacatgttagaagcataaggccttggtaagtaactataggggcagaatgtcttcaggctcaaaaccaaaagggagagggagtgctgaatcctaaccactaggcagatcacttgagatcaggagtttgagaccagcctggccaacatggtgaaaccctgtctctactaaaaatacaaaaaattagccaggcgtggtggtgtgcacctgtagtcccagctacttgagaggctgaggcaggagaattgcttgaactcaggggctggaggttkcagtaagccgagatcatgccactgccactgtactccagcctgagtgacagaatgagactctgtctaaaaaaaaaaaaaaaaaa

SEQ ID NO: 17997 - DNA, 1852 bp, Homo sapiens
taccttgcaaaactacccaagggtagtaacagcctctgaccaycctttttccaactttcacttcaaccatactccctaccacagcaaacggtaacagtccctagaaaacaagaatgatatgaattgaattctctagcaccaataaagcttactatattactctcactcctgttataaaaatgacagcgatgacaatattgtaataaatttaattagggatctaccctgtgtctcattttaagacttgacagtatgcgctaattggtttctgtcagcatcagtctcaggctgtgcacacaattggaaactgtctactaagcagagcctaaagcaaggtatcctgctgtaggaaacacaaagaaaaaggatttttagtagacatcatttttctcacactatctttaccctgaaccatcttcaccctgaaccatctttaccctgaatgttgaagaaataacatgcaagtaacttttaactctggtataaaagttaaaagacaaaatattaaaaatcactaccactattataataattgatggatacaatataaaatgtattaataagcaatactctatatgtctcaataaattatgtttattttttgagacagagtctgaccctgtcacccaggctggagtgcagtggcatgagcttggctcactgcaacctccaccttccaggtttgagtgattctcttgcctcagcctccggagtagctaggattagcagcgcccgccaccacaactagctaatttttgtattgtttagtagagatcgagtttcatcatgttggccaggttggtcttgaactcctgacctcaggtgatccgcccaccttggcctcccaaagtgctgggattacaggtgtgagccacatgcccagccaaaagaattttttaaattttacagtacttagcatttaaattcagaaatctatttagtgtttgaggtatcttaaaataaaggtggtgtaaatcataggaaaagagaaatggaagaaatggaattaacagttagttacagttacctgttacattctagactccgtgtgtcagatcctgacacttacacttcaagaaaaaaaaacccttaatagagatgtcattgatcccatagcatagataagttaacagtctcagggaagatgagtgaattgttcaggatcttttggcttttaagcagagaagctaggatggaaatctaaatctatatatatatactttcaaaatttatcatcttttggctgggcatgatgtctcatgcctataatcccagcactttgggaggccaaggtgggtggatcacctgaggtcaggagttcaagaccagccttgccaacatgatgaaaccccatctctactaaaaatacagaaattagttgggcgtggtggtgggcacctgtaatcccagctactcaggaggctgaggcaggagaattgcttgaatccaggaggcagaggttgcagtgagctaagattgcaccattgcactccagcctgagcaacaagagtgagactccatctcaaaaaaaaatcatctttcaaattttaagctaatattttaggcatttactagcataaaatatttacacaaataaagagtttagtcatctttactactgccctgattctaaaaccagagacaatacagcattctgcatccaagccccatctactgtttttgaggctaagtccttggcaagtgcatttgagagttggaggctcccttttaccactcaagacctacttgtgaaataggggcccttccttgtatgcagaaaacagagaagatgggggccctgaccaaccttgcctagttcatgaggcagtggctcattgtgtggggaagcaat

SEQ ID NO: 17998 - DNA, 568 bp, Homo sapiens
tcatcttcctgagctgaatgatagttaagctgaatgtacgtataaaatatgattttctaaccacttgctcgccaacaaggaaaacttttaagtagagcagaacctgaatagacaagacatttctttcttttggtagaaaatgatttaccatcactgtgtagttaattgtagactaggtaattttaactttgtgatttattgccggagacattttcttctgtactgtaaagtgtgtgtcaaaaaaaaaaaatagcgattttggaggattaggggactttgataaattgcctgcaattctggcagtatgaactgcatattaatttctctctttcaagaacatttttatttattaattccttacaaaaactccctaaactttggaacagctctcaattgcctgtattcttttttttcttattatggtactcttctagagatttggcttgcatctgtgaataagccaggacatcttcagaaattgtctgattaaaaacaccaccaatggagtttcattaaatttgtattgctctgactagtgaaacayacacatctatgttgctgaggatat

SEQ ID NO: 17999 - DNA, 621 bp, Homo sapiens
ttgtagtattttgttatggyaaccacaggaggctaacacatctgccacagtaacagtccatgctccatggctcttttgtaaggattaaacgaacatctaagtggtgaacatggtgcctgacacagagtcagcacttctggaacatctttaagggagctgtgtagaatgctccatctatggattaaaccaagcttgtccaacccatagcccatggctgcacgcagcccaggatagcccaatacaaattcgtaaactttcttgaaacattgtaagatttatttgtgatttttctttagcttctcagctatcattagtgttagtgtattttatgtgtggcccaagacaattcttcttccagtgtggcctaggaagccacaagattagacatccctggattaaaacttccattgtgaaaatacaatactgggagataggtgctgtattagtccattttcatgctgctataaagaaatacccgagactggataatttataaaggaaagaggtttaattaactcacagtttggcatggctggggaggcctcaggaaacttacaatcatggtggaaggggaagcaaacatgtccttcttcacaaggcagcaggagacagaagtgcaaa

SEQ ID NO: 18000 - DNA, 622 bp, Homo sapiens
tacatcatcataacaggcagtaaaaagtctgatatagaacctagatgctatagggcaacaggtacttgaaggcagatccagtatcttaatatttgtcaagtaagcaggtaggacatagtctaaagcatgaaattcagacaagactttgatatcttcagagaattttagcaagggttatgtgagaatgtcatcagacaggtaaaaaattaaagtagaatctggaagaaggaaatgttggacggttgggaaatggttgccattaaaaaatctgttgcagttaattattaggataaatgtcactggagcccaggtcctataattctagcctcctgagggactggcaacagccatgtagtatcctcaacttaaaagaactaaaattacaggtagattcaagacaaggttcatgctcaaacactgtttatgaaacccagccaaaccttccattatttgtttctacttgtggccagaawaaaggaataaaacatggtcatatctgttcatatatctgctgcctcataacttattacttcatttttctgtttgttgactacactggctgcctctcaacctcttcctttctactcagagtgtagtttctcttatctacaaggaaggaccc

SEQ ID NO: 18001 - DNA, 596 bp, Homo sapiens
tgtatgtattttttaaagaggttcagaaaacaaataaattcagctcttgttccatagctcgtaaattacttccccatggtggcatgtcttagctggctgtggccaccaagttctgtcagcactgacccacggctatagacagagccactcctcctaatacaattttaataccttttaaacaacatacggtagaataattcattcttccatcagtatccygcattaggcatagtggagccttctccagcatggatttttctgcatcgaatggttcacggaatggttacggaatcaaaagactatcttcgatttaacatgcaggctttcctgtcaaatccactttcagatgtttacaaggtgtgaaatgtttttcacattatcatattctccttcactgggtgcatttgggaaaatgcaacaatgcatgctggatccacaggtcgtgacgcattgtcctgtgcgagaattcctgctgtttccctggcgattgaaagacactgaatggaatgcaatgaagaaaatccaccattgaataaatacagctatttctttcccacacgtaaagcaccgtttgaggaagggtaaaatgttgatgt

SEQ ID NO: 18002 - DNA, 580 bp, Homo sapiens
tgtgtaaatacaagtsctggtttgttgaaggagcagaaaaaaaagattagtttgagtatggggaaagagaaggagattggagagaggtttaagaactaagcatatgccagtttatatagagtttatgcaacaaagaagatattttttgtgcatcagcttgtattgttgcataatactataccccaaacttactggtataaaatagtaaacttgtattatgctcacaggttctgtgggtcaggaatttagaaacaggcacagtgggcatgccccttttctgcacctcaatgatgaggcctcagctgggaagatttacatgtctgaatgcaactcaaatagctgagggctaggacagctgggactggagtgtccacttccaaattgctttttatgcccatatctggcacttggccttgtgtatttgaagctaggaatgaactgggattgtcaaccagaactcctattcatggtctatcctcatggtttgggtttctcccagcctggcaatactggggccctcctgagatggaggattctgaaaaaaagtgagcagaagtcagattgtcgatttaggccaggt

SEQ ID NO: 18003 - DNA, 587 bp, Homo sapiens
caggtaggtcacattagttgaggccatcattataattcatcaactacatactccttcagagaactgccctacagttacaaacacagccatattatcccttaaatgggctatgaaatgagctattggtaaatatctcctttggtagatcactcctttggtaaatagctcattgataaaatattcatgctstctccactttttgtgttcatactattattttcagtttatttgttgtgtttatgacttcagccccataaatttttaggtctattggcgttagacagtttctgtttatttcctgatatgaaatgagagaattaaagcatttatcacttttccataattattcttttgtctatgtcatcttttctctatgctatattttcattaagatttatcttaatatttatcagctttatatacctatgtctttcatactttatcagttgatatcacatactgaaactcactgcacacaattcacagtattataattacatacatattattcactgtgggaccaagaagtgtgtgctactcagagaaggaattgttactcagtgtcagtcatttaaactatgataggg

SEQ ID NO: 18004 - DNA, 590 bp, Homo sapiens
tctgtactttgccctccactcttccattgaaatattagtacctataatctatcagcattttgctagttgatagtaatagaaacacaaacaaaacaagatgaggtaaatctgtaagcaaaaataaaaagtgagaaagtacaaacagaaatactaaataagagcaagtttcagaggaagtattacrtaggtagtgattaacaatggaaggagatgctcaagctcttggctttccaaacagagctatatttaatgaaaacttgaaaaatagacagggctttagctgatagattgatggtgagaactttacacaagaagaaagagtatgtctaaagatacttgatggtgagaaatttccagaataagaaagaatatatctaaagatactaaggataaataaatctgcgcaatgtgttcaggaacaatacataattgagtactgagcattgttctgtgaatttgcctcaaattcttactgttaagaaacataatactgtttgttaagaccagtattatgagagaaatattttgttttagttcatttaagttttataatatatattttgtattttacatgaaaacatagtctttca

SEQ ID NO: 18005 - DNA, 532 bp, Homo sapiens
tattgagagtacttgagaacttgtggctatcacctttcaattgaatacatgtcatgtgggcacttccagctctgctggcagtagccaacgcagatccaagaaaagggcagtaacaataagaattgcctacactgtcatgggagttattaaagagctgactgggaaagttatttaatacatctgctcctattctttcatcttgttcaaattgtgcctgcatcaaatgtaaacttctgctttagttattctgctagtcagccatcttctttcaacataatcagtatttttcttctttgaatataatcttatttttccaaatgaaatgtttttgttattaaatgtttttgttttattactttaaaaaagtaaattttatttatttaattccttgaactggtagcacattcacatagttcaagcatcaaaaagtataaaaagatatacagcaatgtctcctttcctcccttattctctatctgcctatctccamaaaacaggtaaccaatattatcagtttctcatttacacttcc

SEQ ID NO: 18006 - DNA, 597 bp, Homo sapiens
tggcaagggtgtatatataaccagcactgaacatatcatcctttttgctattagagagtatgcaaaagaggaaatataaagaacggctttgctttgatcataatcaaagggcgtgggtaakctccttgagggcaggaactatctgggtcctattaacctagcacagacagtatcaagtagcaagcatacagtcaaagcaccaaatgaatgcaagaatgcctggatacaccctgaatatgactacaatcaaagcccgaagctcttggtaggtttcactggcctctttccttatatctagaagaacgtcctaccttcctggtcatagccaccactgaaataatgaaaacaaaataacaaaataatattttaaacatacatagcataccagttcattaaaaatagactagggagtattttacattgagacactagggagcatcattactttgaaatgtcactttctgctttaattagtatgctctaatgataagtatatgccattcttatctaatgaaagtcttgaatacatacggaatctggttcacagtcctcgctgggaggtacacggatgtacaaagaagaaacagaatgcatgtg

SEQ ID NO: 18007 - DNA, 545 bp, Homo sapiens
ggtatgatcatagctcactacagcctcgacctcctgggctcaagcaaccctcctacctcagcttcctgagtagctgggaccatgggtgtgcaccaccacacttggctaatttttttatttttaagagagatggggtcttactatgttgcccaggctggtctcaaattcctggcctcaagctttcctcccacctcagccaytcagaatgctgggattacaggcgtgagccaccatgcctggcccagggtgggattttttataataaagtctcacatttgtactgtacattgtagcccacaaggtgttttcaatttgtcatctcactcaaggatcattatcagtacccaggagagtaggattttattcccattttagagttgaagaaactgagggtcctagaagcccagcttccagcttccccacccagctgaaaaggtgcggagttggtgctcagccacggcatctggcctcccgtgcaggctctccccggtctgatttctcactctgagctctcagtagactacacatttttatcctgaaaccca

SEQ ID NO: 18008 - DNA, 552 bp, Homo sapiens
ttccctcctcctacacacatayacatcctgcgccacaacagactttttctttcccaaaaggaaggttcttttttttgttttgttttcactttgaactcctgagattcgtttctggcaaggttcctttcctctctctctaccaaacggttttgaaacagtcatcatttccctgagatgataaacagtgagagattgcttttacttttgaaggcaatgaaaacacgtctatggtttcactttgaaacacatcaggaaaaacactcctatcacatttagcacgtgtaaaggaattctccattcatgggccacctgtgtgtctgatgatcgtttaatactgcttcccaagtttcagcaatcgctggaagccactcaatcacatccagcctcgcgatgtgagacccgatatgttttcagcagttacccagcgtcctgcgggtctctccgccactcccgttacatgtgtttttgggtaatcgccagtcttttcacagatgaatgccagaacatggaacaaaggcttgaatgcaacgaaagcacgtcgcggttttttta

SEQ ID NO: 18009 - DNA, 549 bp, Homo sapiens
ataatatttaattatgcaaaaaatacattaaatacattgaaaatatatagtgtagctataagaataaagaacgatggtaaaacaaatgctaatacccactacctgacttaaagaatatgatattatttttttccaattgaaattccctcaactactcagaattactgctatccctcttatcctttcattaattttcttctagttttctcacatgtgaatctatttctaaatacatttctttattttgcaagtttttggacttcatataaatgtaaccatattgtatatattcttcttcagcttcttagtttttcactaaacaatatgttttgctgatayttacattcatatgtacagtaatagttgatttattttaatggctatatattattccattgttagaatacaccaggatttatttttacttattttttttgctggaaaattgggtgtcttttttattttttgatataacaaacaatgttgtaatcattttgtatttacttcctagtccactcctgtaagtttctcttgagtacatactagcaa

SEQ ID NO: 18010 - DNA, 536 bp, Homo sapiens
tttttttttttgagatgcagttttgctcttgtcacccaggctggagtgtamtggtgagatctctgctcactgcaacctccaccttcagggttcaagtgattctcctgcctcagcctcccaagtagctgtgattacaggtcccagccaccacgcctagctaatttttgtatttttagtagagacagcgtttcatcatgctggtcaggctggtctcgaactcctaacctcaggtagtcgacccacctcggcctcccacagtgctgagattacaggcatgagccaccacgccctgctaggagttcacgctttagttggggaaaatatacaataagcaagccagtttttaaaatgagaactgcaattagagttaaatgctacaaagacaaactcacaggaagatgggatgtagaatgataaggctctcagaatagtaagagaaactattgcttcttacgatgtttgtctttctttgtatcggtgctcagctgagtctgcagtgcttcagaggcagctttcattttataaaaatctatgat

SEQ ID NO: 18011 - DNA, 536 bp, Homo sapiens
tttttttttttgagatgcagttttgctcttgtcacccaggctggagtgtactggtgagatctctgctcactgcaacctccacctycagggttcaagtgattctcctgcctcagcctcccaagtagctgtgattacaggtcccagccaccacgcctagctaatttttgtatttttagtagagacagcgtttcatcatgctggtcaggctggtctcgaactcctaacctcaggtagtcgacccacctcggcctcccacagtgctgagattacaggcatgagccaccacgccctgctaggagttcacgctttagttggggaaaatatacaataagcaagccagtttttaaaatgagaactgcaattagagttaaatgctacaaagacaaactcacaggaagatgggatgtagaatgataaggctctcagaatagtaagagaaactattgcttcttacgatgtttgtctttctttgtatcggtgctcagctgagtctgcagtgcttcagaggcagctttcattttataaaaatctatgat

SEQ ID NO: 18012 - DNA, 536 bp, Homo sapiens
tttttttttttgagatgcagttttgctcttgtcacccaggctggagtgtactggtgagatctctgctcactgcaacctccaccttcagggttcaagtgattctcctgcctcagcctcccaagtagctgkgattacaggtcccagccaccacgcctagctaatttttgtatttttagtagagacagcgtttcatcatgctggtcaggctggtctcgaactcctaacctcaggtagtcgacccacctcggcctcccacagtgctgagattacaggcatgagccaccacgccctgctaggagttcacgctttagttggggaaaatatacaataagcaagccagtttttaaaatgagaactgcaattagagttaaatgctacaaagacaaactcacaggaagatgggatgtagaatgataaggctctcagaatagtaagagaaactattgcttcttacgatgtttgtctttctttgtatcggtgctcagctgagtctgcagtgcttcagaggcagctttcattttataaaaatctatgat

SEQ ID NO: 18013 - DNA, 536 bp, Homo sapiens
tttttttttttgagatgcagttttgctcttgtcacccaggctggagtgtactggtgagatctctgctcactgcaacctccaccttcagggttcaagtgattctcctgcctcagcctcccaagtagctgtgattacaggtcccagccaccacgcctagctaatttttgtatttttagtagagacagcgtttcatcatgytggtcaggctggtctcgaactcctaacctcaggtagtcgacccacctcggcctcccacagtgctgagattacaggcatgagccaccacgccctgctaggagttcacgctttagttggggaaaatatacaataagcaagccagtttttaaaatgagaactgcaattagagttaaatgctacaaagacaaactcacaggaagatgggatgtagaatgataaggctctcagaatagtaagagaaactattgcttcttacgatgtttgtctttctttgtatcggtgctcagctgagtctgcagtgcttcagaggcagctttcattttataaaaatctatgat

SEQ ID NO: 18014 - DNA, 585 bp, Homo sapiens
ttcaggaaacatgaattttgcctggaagcacagctgacaatccatggctattcacagttgggtattcagagacactgtctagaacaatgaacaaagtgagcctgtcacttcaaggtaaacaattgatagtactttccaataacaataaaatgtgagcttcagagaaaaactagaattttgggccgagcatgatggctcttgcctgtaatcccagcactttgggaggtcaaggcaggagaatcacttgagccccaagttcaagaccagcctgggcaacatagtgagatcctgtctctctctctctctctctctctmtatatatatatatatatatatatatatttttttttttttttaattagccagttgtggtggcacacacctgtagtcccagctactagggaggctgaggtaggaggatcacttaaccccaggagtttgaggctgcagtgagctatgattgtgccattgtactctagcctttgtgacagaatgaaaccctgtcttaaaaaaacacaaacagaaaaaaaaaaaaaactagaattttggaaaactttaatatcatgtaagtaaaatatgtcaaca

SEQ ID NO: 18015 - DNA, 585 bp, Homo sapiens
ttcaggaaacatgaattttgcctggaagcacagctgacaatccatggctattcacagttgggtattcagagacactgtctagaacaatgaacaaagtgagcctgtcacttcaaggtaaacaattgatagtactttccaataacaataaaatgtgagcttcagagaaaaactagaattttgggccgagcatgatggctcttgcctgtaatcccagcactttgggaggtcaaggcaggagaatcacttgagccccaagttcaagaccagcctgggcaacatagtgagatcctgtctctctctctctctctctctctatmtatatatatatatatatatatatatttttttttttttttaattagccagttgtggtggcacacacctgtagtcccagctactagggaggctgaggtaggaggatcacttaaccccaggagtttgaggctgcagtgagctatgattgtgccattgtactctagcctttgtgacagaatgaaaccctgtcttaaaaaaacacaaacagaaaaaaaaaaaaaactagaattttggaaaactttaatatcatgtaagtaaaatatgtcaaca

SEQ ID NO: 18016 - DNA, 585 bp, Homo sapiens
ttcaggaaacatgaattttgcctggaagcacagctgacaatccatggctattcacagttgggtattcagagacactgtctagaacaatgaacaaagtgagcctgtcacttcaaggtaaacaattgatagtactttccaataacaataaaatgtgagcttcagagaaaaactagaattttgggccgagcatgatggctcttgcctgtaatcccagcactttgggaggtcaaggcaggagaatcacttgagccccaagttcaagaccagcctgggcaacatagtgagatcctgtctctctctctctctctctctctatatmtatatatatatatatatatatatttttttttttttttaattagccagttgtggtggcacacacctgtagtcccagctactagggaggctgaggtaggaggatcacttaaccccaggagtttgaggctgcagtgagctatgattgtgccattgtactctagcctttgtgacagaatgaaaccctgtcttaaaaaaacacaaacagaaaaaaaaaaaaaactagaattttggaaaactttaatatcatgtaagtaaaatatgtcaaca

SEQ ID NO: 18017 - DNA, 585 bp, Homo sapiens
ttcaggaaacatgaattttgcctggaagcacagctgacaatccatggctattcacagttgggtattcagagacactgtctagaacaatgaacaaagtgagcctgtcacttcaaggtaaacaattgatagtactttccaataacaataaaatgtgagcttcagagaaaaactagaattttgggccgagcatgatggctcttgcctgtaatcccagcactttgggaggtcaaggcaggagaatcacttgagccccaagttcaagaccagcctgggcaacatagtgagatcctgtctctctctctctctctctctctatatatmtatatatatatatatatatatttttttttttttttaattagccagttgtggtggcacacacctgtagtcccagctactagggaggctgaggtaggaggatcacttaaccccaggagtttgaggctgcagtgagctatgattgtgccattgtactctagcctttgtgacagaatgaaaccctgtcttaaaaaaacacaaacagaaaaaaaaaaaaaactagaattttggaaaactttaatatcatgtaagtaaaatatgtcaaca

SEQ ID NO: 18018 - DNA, 585 bp, Homo sapiens
ttcaggaaacatgaattttgcctggaagcacagctgacaatccatggctattcacagttgggtattcagagacactgtctagaacaatgaacaaagtgagcctgtcacttcaaggtaaacaattgatagtactttccaataacaataaaatgtgagcttcagagaaaaactagaattttgggccgagcatgatggctcttgcctgtaatcccagcactttgggaggtcaaggcaggagaatcacttgagccccaagttcaagaccagcctgggcaacatagtgagatcctgtctctctctctctctctctctctatatatatmtatatatatatatatatatttttttttttttttaattagccagttgtggtggcacacacctgtagtcccagctactagggaggctgaggtaggaggatcacttaaccccaggagtttgaggctgcagtgagctatgattgtgccattgtactctagcctttgtgacagaatgaaaccctgtcttaaaaaaacacaaacagaaaaaaaaaaaaaactagaattttggaaaactttaatatcatgtaagtaaaatatgtcaaca

SEQ ID NO: 18019 - DNA, 504 bp, Homo sapiens
acccctgggctcaagcgatcctcctgcctcagccttctcagtagctgggactacaggctcatgccaccatgcccacctaattattactactttttttaaagataggagggtcctcactatcttgcccagtctggtctctaactcctggcctcaagtgattctcccaccttgtcctctcaaagtggcaaataattcttttttattgagagttcttcctcctattttttttataactgtgggcctggatcctttggttcatttaccctgtattcattctgtgccttcctgttctccagtcttcaagcacatacatagacatacacacaaattcagcagatagtraaaaaaaccacaagatgatctttcagatgacatacatttttcccacttttaaacataacatgattctatgtggaaacaattttttaagttaattttttgcaccgtaattatttttgtttggtgtatgataatgacatatttaagtgatcatctaaaaatagc

SEQ ID NO: 18020 - DNA, 587 bp, Homo sapiens
tatacttgtctctatatttaaaggcctctaagaatgttctgatgggaagaggagtgttcatacggcctgaggatggaactcagtcacagagacccrgaaaaatcatagacattgatactaaccatggcagcatgcaggaaaactggacaaggcaaattagggtaatttgcaggcctagtggtaactgacactaggataaatttgcatcctgtctgagccaagagcacacctctcctctttagcctgagcatcctcctctctaagtgagctctggttcagatgcagagcctgaccactctttagcactcctaggaaagattaaaaacaggactgtggctaggggcagggaggaggccagggaccaaggcactcaagtggggactgcaggaggggtcagaatgcaagcagcactgacggccttcttcgtgttgctctttagcctgctgagtcttctggggattgcagcgaatggcttcattgtgctggtgctgggcagggagtggctgcgatatggcaggttgctgcccttggatatgatcctcattagcttgggtgcctcccgcttctgcctgcagttggttgggacg

SEQ ID NO: 18021 - DNA, 584 bp, Homo sapiens
actgtgttatcagtaatgcttcaggtcaacagtagtagttaaattttgggagactcaaaatttatacgaaaatttccagttgcttgaggggccagtggtcttaacttctgtcttgtttaagggtcaactgtatattagctgaaaatataatcgagttgcatttatatcatctgtttccatcttctactttgatgaaattagaaatgcagctaaaagaataggttttccaagcagagaacttatatctgcgggatccattctttgcatgtgctacaggtatggtagaaactcaatttctgtttccagktctatatttagatagacttttatgtgttccttccagtgtggctgaacaaagtcatctttgcatgtgagctgcctgatgtgttagtgagaagccctattgtgtggcgtctttctctggcagctattgcaggagatgtagagcttcccattgtagctggtttctgatgatgttcattccggacagcataaagggtttggaattttttgtactccaggaatgctaagtcttgattttgccatgagtacttggtgatgtgagtgagattttactattagca

SEQ ID NO: 18022 - DNA, 540 bp, Homo sapiens
gtgaggtttgttctaacatttgaaaacggaatactacctttcttatcagctctacaaatacaactgcagaatgtctccatagcatgacatttccttctctcagaacctcaactcactcaccttgattctgaactcaagatatcaaccaatttgaagattccttttccttctgatatcctgcttaacaagttttgagccgggcacaccagtaatcgaaaaccatgttcactttccctaatgaaaaaatcatttgcgaattgtctatgtagtttttctcactgtagtaagtcaatacaactcaattattattaaagcttctttgtctgagaaggggacttttcataatttggaggacctaacaaaattcagctgtgrcttcccctaacgatggcatagaccagggctctgggtcagatcacttctcttagtgtcttttgaggcctcttgcatctcttctactggaggctgctggccagaggggtgagtccatgctgggcctctgctctgatttgactgaggtcactaagtactaagctttat

SEQ ID NO: 18023 - DNA, 540 bp, Homo sapiens
gtgaggtttgttctaacatttgaaaacggaatactacctttcttatcagctctacaaatacaactgcagaatgtctccatagcatgacatttccttctctcagaacctcaactcactcaccttgattctgaactcaagatatcaaccaatttgaagattccttttccttctgatatcctgcttaacaagttttgagccgggcacaccagtaatcgaaaaccatgttcactttccctaatgaaaaaatcatttgcgaattgtctatgtagtttttctcactgtagtaagtcaatacaactcaattattattaaagcttctttgtctgagaaggggacttttcataatttggaggacctaacaaaattcagctgtgacttcccctaacgatggcatagaccagggctctgggtcagatcacttctcttagtgtcttttgaggcctcttgcatctcttcyactggaggctgctggccagaggggtgagtccatgctgggcctctgctctgatttgactgaggtcactaagtactaagctttat

SEQ ID NO: 18024 - DNA, 640 bp, Homo sapiens
gacttccaacttctagaactatgagaaaataaatgtctgttgtttacgcctcccagtctatggtgttttgctatggcagccctcactaactaacacagcaagggactaggttcctttagcyatgtgggcaccgtctctaagagctgccaggcattaatggtactggacctgccattcttgcttaagggacattttcttgacataacaatgctctttggcattctggcttccaccaggatatttagtatgtggttgtttcaattatgtcagtttaactccagttttctttctgactgtttgtgttttttccctcacttatgaggcctagaatccttggagagaaatttagtattttgcatgtcatttttacctttcactcttctgggttttgttcaatgagggcataaaactgagagttgacctgctccattattctgaaaacttactagaggaaggaagcacatgactgcagaggcacagagggattatggagaataagtgggtgacacatacatatgaaaagtcttaagaaagttcatattttttggccccaaattatatttcagcaaatgtatctttaaaataactgaaaatacaaagatccatgtacaagaatggttgtctctgcactgtggtaata

SEQ ID NO: 18025 - DNA, 640 bp, Homo sapiens
gacttccaacttctagaactatgagaaaataaatgtctgttgtttacgcctcccagtctatggtgttttgctatggcagccctcactaactaacacagcaagggactaggttcctttagctatgtgggcaccgtctctaagagctgccaggcattaatggtactggacctgccattcttgcttaagggacattttcttgacataacaatgctctttggcattctggcttccaccaggatatttagtatgtggttgtttcaattatgtcagtttaactccagttttctttctgactgtttgtgttttttccctcacttatgaggcctagaatccttggagagaaatttagtattttgcatgtcatttttacctttcactcttctgggttttgttcaatgagggcataaaactgagagttgacctgctccattattctgaaaasttactagaggaaggaagcacatgactgcagaggcacagagggattatggagaataagtgggtgacacatacatatgaaaagtcttaagaaagttcatattttttggccccaaattatatttcagcaaatgtatctttaaaataactgaaaatacaaagatccatgtacaagaatggttgtctctgcactgtggtaata

SEQ ID NO: 18026 - DNA, 640 bp, Homo sapiens
gacttccaacttctagaactatgagaaaataaatgtctgttgtttacgcctcccagtctatggtgttttgctatggcagccctcactaactaacacagcaagggactaggttcctttagctatgtgggcaccgtctctaagagctgccaggcattaatggtactggacctgccattcttgcttaagggacattttcttgacataacaatgctctttggcattctggcttccaccaggatatttagtatgtggttgtttcaattatgtcagtttaactccagttttctttctgactgtttgtgttttttccctcacttatgaggcctagaatccttggagagaaatttagtattttgcatgtcatttttacctttcactcttctgggttttgttcaatgagggcataaaactgagagttgacctgctccattattctgaaaacttactagaggaaggargcacatgactgcagaggcacagagggattatggagaataagtgggtgacacatacatatgaaaagtcttaagaaagttcatattttttggccccaaattatatttcagcaaatgtatctttaaaataactgaaaatacaaagatccatgtacaagaatggttgtctctgcactgtggtaata

SEQ ID NO: 18027 - DNA, 640 bp, Homo sapiens
gacttccaacttctagaactatgagaaaataaatgtctgttgtttacgcctcccagtctatggtgttttgctatggcagccctcactaactaacacagcaagggactaggttcctttagctatgtgggcaccgtctctaagagctgccaggcattaatggtactggacctgccattcttgcttaagggacattttcttgacataacaatgctctttggcattctggcttccaccaggatatttagtatgtggttgtttcaattatgtcagtttaactccagttttctttctgactgtttgtgttttttccctcacttatgaggcctagaatccttggagagaaatttagtattttgcatgtcatttttacctttcactcttctgggttttgttcaatgagggcataaaactgagagttgacctgctccattattctgaaaacttactagaggaaggaagcacatgactgcagagscacagagggattatggagaataagtgggtgacacatacatatgaaaagtcttaagaaagttcatattttttggccccaaattatatttcagcaaatgtatctttaaaataactgaaaatacaaagatccatgtacaagaatggttgtctctgcactgtggtaata

SEQ ID NO: 18028 - DNA, 528 bp, Homo sapiens
tcgttccgttggctattttatatactcattgagccacttcagagtaaactgctgacatcatcactctattcctaaacacttcagcatccatctcttaagaaggttaggaaagacaaggrcattctcttgcataaccacagtatatctctcataatcaattcctttaacaatgtgtgcaatgtatagtcattcaaaatttgccttttgacagataatgttctttatagaaaaaatttctgattcagaatctaattgaacatgatacattgtgtttaatcgtcttttcttgctcaactcctttaatcttgagcagttcttcagctttcctttgttgttcatgatgttaatatttccaaagagtagataagggttgttttgaagaatgttccaacttgagatctgtctgatttttgtcataatgttataattagattatgttatgccttttgaactgaaatgcaatgattttgcactttattgttaccacccctagggcttagaaacagtgggaaagcctatgatctaccc

SEQ ID NO: 18029 - DNA, 571 bp, Homo sapiens
agtgaagttaaaaaaacaaggtattttacrtaacaagatacaaaatggggactagctaagaggggagtaagacataagagtagggagccatatattgccagatttcaaaaatcattgctatgtttagggtctggcaaaccctccatgtttattaatttatcttaatgaagacaactgctttcctttttatttcaggaaaatgatacgtattttcctcagaaaggtttgcattaggaactttatttttttcttgtttttatagtaacttagtgttatccaaatagcatcaatagtaacataacctcattttttatgccattgtaccttgtacaaaacttgaacaagaaagtaattttccacattatatagagtaattgaggtatatttagaaataaagtaggaatattaaatatttagcattgtaattctaaaatgcaattacaaatctgaaaaagtaatgagtctttgaaataaaaggtttaaattcaaattctattagtttctgccacttaaagcatgtggataataaacaattaagctattttgtctgtctggccaagactattcaaga

SEQ ID NO: 18030 - DNA, 571 bp, Homo sapiens
agtgaagttaaaaaaacaaggtattttacgtaacaagatacaaaatggggactagctaagaggggagtaagacataagagtagggagccatatattgccagatttcaaaaatcattgctatgtttagggtctggcaaaccctccatgtttattaatttatcttaatgaagacaactgctttcctttttatttcaggaaaatgatacgtattttcctcagaaaggtttgcattaggaactttatttttttcttgtttttatagtaacttagtgttatccaaatagcatcaatagtaacataacctcattttttatgccattgtaccttgtacaaaacttgaacaagaaagtaattttccacattatatagagtaattkaggtatatttagaaataaagtaggaatattaaatatttagcattgtaattctaaaatgcaattacaaatctgaaaaagtaatgagtctttgaaataaaaggtttaaattcaaattctattagtttctgccacttaaagcatgtggataataaacaattaagctattttgtctgtctggccaagactattcaaga

SEQ ID NO: 18031 - DNA, 1899 bp, Homo sapiens
gttttcataagctcgacctgtcacaagccaggcaggggctcatgctgacaactccacagtaagattaaacagcatgcttcgtcatgctaaatactagatactaacacagctccgacgtcagggggacaatgattaaaactgatgtcgataatttatgaaacacaatatggtcttcagatgctcttttgaaaaaagggaagggcggggaggggggaaggggcctagcaacccaggtggtttacaactgttcatgcattttgccttgaatgtacacacagccccaccatgcatgggtacttctttacacaatgaatgtgaatgcacatgtgtataaaagcatgtgaacactgctgatacatatgggcggaagaaagtatttagttattccactgagagctgtcaaggccgtaacattatacatcgtcttgtctttcatattgttttgagggttgtttgttccccccccccggaagaaatccaaaactgcatttaaagtataactgggctttatgaacgttcacattttattccatagaaagcttgaccttgaaacaacaccgaaaagaaaactggaccaaagaaaacatataggatatgtgcatttcttagtcatctataaggaccatggccctatgtcgaaggactgttcagtcaaatgataatattggtaaattggtaaattttagggggttttctttgcgggagggtggggcacagggttaacctagggaagggtaccatttcaatttattataaatcacatatcattattttataaaagcaaagaccaaacagcacagtaataggctcattgttattaagactgattatgggaattaaaaaatatatacttcttgactttgccatagttgtaaatactctgggtagcttgactttatatgtcaacagcgtgaaattcgcaagaagagattatgttgggaggaaaatctgagcctctgatagtccaaagttacttttgaaggatttattaatgctttttcctagcacagtgccctttagtatctcagaacacctgtcaaatactaattcattcacatatctccactacagggccttttcataaaaagctcaacctttaattgtaaatcacccctaaattgtccttgctgtctttctcttttacagaatgatggaaaaatcactaagacttcaattaagactttatgggaacttcaatctgatgttcccagctatatctacaaggtatcagaacatctattcaaaaaggaaactataaataactttaacatagttgaattggctttgcttttatgagatgactgaataattggcaagatttaaagatactttaactactgggaattaaaataacttcagtaaaacccagaaaaatattgttagccaatcatttgtcatgtagattatgtacttattaagcctaattaaactttttgaacaaaaacggttactaattacattcgttaatatgttgattgctcaatttagccaataaaaaaaaaggtcaatccaatttgtgtgcatagttagtgctttggtcaagagacaaaatcccaaactatagagattatttcaagtgcatgaccatcattataacaaacgcaggttacgtgtccacatccaaactgacggcaagacctgggggtgggtggtgaatctgaacaataccaacgctaaggcaaatcttcaagccagagaaatttcaccaccacatcaagtttattcgcctaaatgtattcacttgcatttgtccaattagaccctgmtggtgacaagacaaagttatctttcatatgcacatacaaactaaaactgatagcaaaaccctgggaatccctttaaatgtcaataaagggcttttacgcacaaagggaagaaaagaaaagaggaaggaggggg

SEQ ID NO: 18032 - DNA, 991 bp, Homo sapiens
aaaaaggacatttgtgggaaaatgagtgaatcttaaacaaagtttggagtttagtaaacagcaatataccaatgcttgtgtttttaattttggaaaaatgtagcaccaatgtaatattttaataatagaggaaaccccattagtaatatatgggtattctctgtactatcattgcaatttttgtgttaaaattctattctactctaaaacaaaaagttaattataaaattagtctgttccctattgtgtctaaatatgttgagaccatttagaataagaatatggtttgaccccttaaaagtctagtgttggaagaaattataaaactctataatgaatgccatttgaaatcaaagggaaaaatggagaacactggctgttaagaaaactttgtatgattgagtggtaatgattctgggatttatttcaggttttaaagatatgggaaagaggtagatatggggaagtaaaaatatgccaaagaatttcccttaccagtaacttataaaatgaacagtaataattaaaattttaaaattagtaaaaactcattagcaacaaccataaaaaggaagaaaaccattatacattcaaaaartggtggttaatggaagaaacagaaaattatagtttggaaccctctaatatgttggccctacccagaaggtaaatatgagagaaaaagttgaatctaaaaattgttgagatgtgtcactgatattctttagtttaaggagaaagtaactaaagaactaaagaagcaggactgaaaaaagtcagaggaaaccctacaaggtataaacctctccaggtaggtatgggacctgagagaggcagtaaggcagctgggggctactatctcccagggcactgtccagagttaggtaacaatctaaaacctagaaaatgggacataatggttaggtggagtaggactttgcagaggacagctaatacagagttcaactcagatcactcagaaagggtcatt

SEQ ID NO: 18033 - DNA, 548 bp, Homo sapiens
tttggtcaccagcaccaaaatccatttctggttcttcctggacacacagctaatctaacttctcagcctctcttacaggtaggtctgaccatgggactgaccaggctctgtgcaatgaaatgtgagtgaaggtgtgtgttgcttccaggtctggcccgtaaacactgcccatgcatgtgtgctccttggaatgccttttctctgctggctcactgggatgactcaccgtcaacggtgaccttgaaaagcatgtaaagtcaaatacagcctgatattagaactttagagtgaattatccttgctcagactataaactcagcccaactgaggcatcagtaatatttaaattaacatgcttcctccaatatttcatcacagctccccatgattatrccttcaagctctcaatataatggaaactcagcccctcagctccagtgacacaagctgttccaaaatttctagtggatggttctctagatattgacacatcctaactttcaggtatagacaaatggttaactatggaaagcctcattaactgcatg

SEQ ID NO: 18034 - DNA, 586 bp, Homo sapiens
tccgggtgtgaagtgaggaggaattgatgcgggtaaacatacagcaccggcccgcgccgcatcccaggtctgcagctacagctgcggcgaaagtccaaggtgcgcgtgcgcggtacgcactaggcagcccaggacgcgcgggctcggagccgggcgaagggccgcggaaagcgcgtgcgcagagcgacaccaggcgcgcgagaaggtcctcagtacgcgtgcgcggggcgggcgggtgcgcgcgcacttcctcctcgcccccacccagacccagaaggcgccaccatggcggcgcccccgcagcccgtcacccacctcatctttgacatggacggacttcttctgggtgggtagtgtgcagccgccgcctccagtaagggcggtcttgkgtgggcgtggggacggtcggcgcggggtacgtcacggcctgggggccgcggcggggcggtgttcatgcagggacgctcgggctcccgcgcgctctgcccccggctggccccgaagtcgggcggaggccaggagcgcccgcgggcccatgtccgggctggcgggcgcgcgtggccgcggcgtctacgcggccccagca

SEQ ID NO: 18035 - DNA, 546 bp, Homo sapiens
aaaccattctcttcattttatgaacacagaggtgtaaactgatgaattccaaaggaaaaaaaaaatccccgtagaggtcactaattggagccaacggtgtatgcagctactaaatttgaaatgactcaatttcagaaagcttgtgggatacataggtatagtttgtagacatgaattttcctactccggtggtcaaaaagttaaattgtcaaataaatttcttatcctctaataaaggtccagagaacctgttctgggagtctcatgaattttaataccaaacaagatgtctcattaaaattaaatttattaaacttctaaatgagcttggtgcctaattctgattctagattcacacatagccatgccctgaagtgatgaatgtgacttaaatggcattacaagcattgacctcacattgttacccaatcctctgatctagtcagataaccaagaattagtgctatttggaaaaataagccctgcttctttttattcccycccctcattttctgcccatttcctcctttcctgccctacctcttc

SEQ ID NO: 18036 - DNA, 645 bp, Homo sapiens
taacctaccataccctttaactccacccatgtaatttgtctccatcctggggagtttctcctgctgtcaacttaaaaggaatttaaaatgattttttttcttcttggaattcttctggggcaasatttgcccaattattcttcagaatgtcaccatccctcaagatgttaacagtggttgcacaatttaaaagaattccaccatcagataattttggcaaatgctacatattaatagcctcctcttaatatttacaattcttattaccatattaaatgctctgagaacccctgctgtaaagatacctatttaacgtgggattggaatcacagaattctttttgtaatggcacagccattaagacttacgaaattctataggcaaataccgtcccaaaggattacgcaggattcagtcagatagattcctgctgtttcctcatttctgtgcatccagactgaaggatacctaatgacgttgagaggagctatgcataaggccaatgggtctgtacaggcctcaaaaagaaggcttgcattttttgctaagaccaaactcaatgtcagaaacctgaaaatgttattcagatactactctttgtctactgaattaagtataaacacttcagactgtcttttgctcctt

SEQ ID NO: 18037 - DNA, 645 bp, Homo sapiens
taacctaccataccctttaactccacccatgtaatttgtctccatcctggggagtttctcctgctgtcaacttaaaaggaatttaaaatgattttttttcttcttggaattcttctggggcaagatttgcccaattattcttcagaatgtcaccatccctcaagatgttaacagtggttgcacaatttaaaagaattccaccatcagataattttggcaaatgctacatattaatagcctcctcttaatatttacaattcttattaccatattaaatgctctgagaacccctgctgtaaagatacctatttaacgtgggattggaatcacagaattctttttgtaatggcacagccattaagactyacgaaattctataggcaaataccgtcccaaaggattacgcaggattcagtcagatagattcctgctgtttcctcatttctgtgcatccagactgaaggatacctaatgacgttgagaggagctatgcataaggccaatgggtctgtacaggcctcaaaaagaaggcttgcattttttgctaagaccaaactcaatgtcagaaacctgaaaatgttattcagatactactctttgtctactgaattaagtataaacacttcagactgtcttttgctcctt

SEQ ID NO: 18038 - DNA, 645 bp, Homo sapiens
taacctaccataccctttaactccacccatgtaatttgtctccatcctggggagtttctcctgctgtcaacttaaaaggaatttaaaatgattttttttcttcttggaattcttctggggcaagatttgcccaattattcttcagaatgtcaccatccctcaagatgttaacagtggttgcacaatttaaaagaattccaccatcagataattttggcaaatgctacatattaatagcctcctcttaatatttacaattcttattaccatattaaatgctctgagaacccctgctgtaaagatacctatttaacgtgggattggaatcacagaattctttttgtaatggcacagccattaagacttacgaaattctataggcaaataccgtcccaaaggattacgcaggattcagtcagatagattcctgctgtttcctcatttctgtgcatccagactgaaggatacctaatgacgttgagaggagctatgcataaggccaatgggtctgtacaggcctcaaaaagaaggcttgcattttttgctaagaccaaactcaatgtcagaaacctgaaaatgttattcagatactactytttgtctactgaattaagtataaacacttcagactgtcttttgctcctt

SEQ ID NO: 18039 - DNA, 349 bp, Homo sapiens
gatgcastgtgaggcctctggctccagacagcacgggagcccaaagcaatgagccaggcattgatgttgttaaaaaggagcttataaatatttaaagtgtgttctaatataaatactgtgaccctgacatcctggggattgagagaggaagtgatgttactgtgggaactgccctgtggagacaaggacattcctcgtcctctgctcctgctcagagtgacactgatctggtaaagcccccatcctggcctgaccctgccatgggcaccaggctcctctgctgggtggtcctgggtttcctagggacaggtgagtcctcagaacattaagtagttttattttttctctg

SEQ ID NO: 18040 - DNA, 643 bp, Homo sapiens
ttgaataataatttatatttagcttagccattaaagattattaaaataaatcaatcaattgatgaaagccaaatacaattcctcagacacgtagattagagaaaagcagtttttatttttaataaaaatcagaatgaggtagattacataaaatgctaaaggtattacaaagcaataaaaatactttttaaaaattgatcaaaatattgcaaaaaaagatgtagcgcatggacataggagacttatctgaagatttattttccatgctttaactgacatgaatcagaaacagtaacataacaattgtgactaaaataataattaaagtagctaatgcttattgagaactttaagtgccaggttgagtggtamatgttttacatgcaacgttttatatgttcttatgcccattttagattaacaaactgggttattaaaaatagaataactttttaaaggtcgcacattatacgtgtcaaagctagaattaattctagatctcactgactccagagcccattgactaaatgatttaattacgttatctgaaattttacaagtacttatacaactaaagtggcctttactcactttgacaaccataaaatcattctataagtttaaatgaaatgtgctttaacat

SEQ ID NO: 18041 - DNA, 643 bp, Homo sapiens
ttgaataataatttatatttagcttagccattaaagattattaaaataaatcaatcaattgatgaaagccaaatacaattcctcagacacgtagattagagaaaagcagtttttatttttaataaaaatcagaatgaggtagattacataaaatgctaaaggtattacaaagcaataaaaatactttttaaaaattgatcaaaatattgcaaaaaaagatgtagcgcatggacataggagacttatctgaagatttattttccatgctttaactgacatgaatcagaaacagtaacataacaattgtgactaaaataataattaaagtagctaatgcttattgagaactttaagtgccaggttgagtggtacatgttttacatgcaacgttttatatgttcttatgcccattttagattaacaaactgggttattaaaaatagaataactttttaaaggtcgcacattatamgtgtcaaagctagaattaattctagatctcactgactccagagcccattgactaaatgatttaattacgttatctgaaattttacaagtacttatacaactaaagtggcctttactcactttgacaaccataaaatcattctataagtttaaatgaaatgtgctttaacat

SEQ ID NO: 18042 - DNA, 643 bp, Homo sapiens
ttgaataataatttatatttagcttagccattaaagattattaaaataaatcaatcaattgatgaaagccaaatacaattcctcagacacgtagattagagaaaagcagtttttatttttaataaaaatcagaatgaggtagattacataaaatgctaaaggtattacaaagcaataaaaatactttttaaaaattgatcaaaatattgcaaaaaaagatgtagcgcatggacataggagacttatctgaagatttattttccatgctttaactgacatgaatcagaaacagtaacataacaattgtgactaaaataataattaaagtagctaatgcttattgagaactttaagtgccaggttgagtggtacatgttttacatgcaacgttttatatgttcttatgcccattttagattaacaaactgggttattaaaaatagaataactttttaaaggtcgcacattatacgtgtcaaagctagaattaattctagatctcactgactccagagcccattgactaaatgatttaattacrttatctgaaattttacaagtacttatacaactaaagtggcctttactcactttgacaaccataaaatcattctataagtttaaatgaaatgtgctttaacat

SEQ ID NO: 18043 - DNA, 505 bp, Homo sapiens
aaaaaaaaaaaaaaaaaactaactaataatgcttgctcattataaaaaatttgaaaaatgcagcaaaataaaaaagaaaaagaaaattcaccyacttctaagagacagcttctattaatgtttaattatatttcctgtcttttactgggcatatttgtatgtattctgaccatcctgtatatagaaatttgcatcctgaccatactctatatgcaaatttgcatctggcacatttttgcaaacaatttttattaacttggaatgaacagctgtatttccttcaactactcaaatatgacctgacctcactattgtacaccacctttttgctctggaaagtaaccaaagagatgatcctcacagtccttagggcagaataaattatgttttttcttttttttttcttttttcttttttttcactctgttgcccacgctggagtgcagtggcgcgatcttggctcactgcaacctctcactcccaggttcaagtgattcttctgcct

SEQ ID NO: 18044 - DNA, 631 bp, Homo sapiens
ttttctctgttatctctgaaacaatctgagaaacacctcctttttttgtttttactgtttttaaactgtctttagagtacaacagaaattataagataaaaatagtgattaataataattctaattataattcacaaacatattattaatatgtgaatgtgaaatcraaatgctttttagggactctctctcctcttacttaatctgtgtttctttctttctttttttttgagatggagtctcactctgtcgccaggctggagtgcagtggtgtgatctcacctcactgcaacctctgactccctggttcaagcaattcttccacctcagcttcctgagtagctgagattacaggcacataccaccacgcccagctaatttttgtatttttagtagagacagggtttcaccttgttggccaggatggtcttgatctcctgacctcatgatccgcccaccttggcctcccaaagtactgggattacaagcatgagccaccaagcccagcctaatctctgtgtttcttggaagcagaacgtctccttatctgggtttctgagctccctctggaagggcctctgcagactcctgttgagccttcagaatgggactggtactcattagtaggcaa

SEQ ID NO: 18045 - DNA, 631 bp, Homo sapiens
ttttctctgttatctctgaaacaatctgagaaacacctcctttttttgtttttactgtttttaaactgtctttagagtacaacagaaattataagataaaaatagtgattaataataattctaattataattcacaaacatattattaatatgtgaatgtgaaatcaaaatgctttttagggactctctctcctcttacttaatctgtgtttctttctttctttttttttgagatggagtctcactctgtcgccaggctggagtgcagtggtgtgatctcacctcactgcaacctctgactccctggttcaagcrattcttccacctcagcttcctgagtagctgagattacaggcacataccaccacgcccagctaatttttgtatttttagtagagacagggtttcaccttgttggccaggatggtcttgatctcctgacctcatgatccgcccaccttggcctcccaaagtactgggattacaagcatgagccaccaagcccagcctaatctctgtgtttcttggaagcagaacgtctccttatctgggtttctgagctccctctggaagggcctctgcagactcctgttgagccttcagaatgggactggtactcattagtaggcaa

SEQ ID NO: 18046 - DNA, 617 bp, Homo sapiens
aaaatcttatattacagtctgtttggagacactcactttctgggtaccacagaaagcactttcagttacatctctctttccacatgactgaacaaagtgacagagtggaaagaccaaccccagggacccctgtgcagacaggatacagggtgggggcaccgaggctctgcagggamggtgctgggggctgcaccacaggtccttggtgaccatgctgctgaggactcagaaatattgaaaacagttgtgaccacagtgcagaattcatgtagatttcactcctcaaagggagctctgtccagatccaggtgcccacaggggttctgggcacccacaggctgtgctgccacctctggtcctcaagggctttccgcctttggcagcagcccacagttaggcttctgcccgtgtcaggtggcatctggggtccttgtcctcccagctgtctttataaatggcaactcagaagctactgctgaaacattttgtggtcaagctaaaaatagtctgctggaattgtgataatccagcaagtccacatttcagatgctctgtgctcagtgcagggcaaaaccacatgaccctggttccaaccccacgacttcccagggaagatg

SEQ ID NO: 18047 - DNA, 590 bp, Homo sapiens
aggtgtagtggtatacgcctgtagttgcagctacttgggaggctgaggtaggagaatcacttgaatccaggaggtcaaggctgcagtgagcaaagrgtgtgccactgcactctagcctgggcagctgactgtccctaacaaacttgtgacttaggcaagccacataatgcctttggggcctagttctgcagggacagaatttatcagatccctgactaccaagatgctatgattctaattcttatgtgagcagatggagggagacagggattctgagaatcctaggcagtatgtactttaaggaactttctctgtggctttgaaactggttatataattagctccaggagattgaggtcctgaataatattttttcataggtaagtattattttgctagaatatatccagcaaattagaaggatggggaaaggtagaggagttcctagcttgaatttatatatagataagtaaataaactgcagcagtctgtcaataaagggggtaattcttgcatctgtaaaattggctactttgcagagagccacatctacttgggcttcctgccctctcccatcccaaatgcaccaa

SEQ ID NO: 18048 - DNA, 590 bp, Homo sapiens
aggtgtagtggtatacgcctgtagttgcagctacttgggaggctgaggtaggagaatcacttgaatccaggaggtcaaggctgcagtgagcaaaggktgtgccactgcactctagcctgggcagctgactgtccctaacaaacttgtgacttaggcaagccacataatgcctttggggcctagttctgcagggacagaatttatcagatccctgactaccaagatgctatgattctaattcttatgtgagcagatggagggagacagggattctgagaatcctaggcagtatgtactttaaggaactttctctgtggctttgaaactggttatataattagctccaggagattgaggtcctgaataatattttttcataggtaagtattattttgctagaatatatccagcaaattagaaggatggggaaaggtagaggagttcctagcttgaatttatatatagataagtaaataaactgcagcagtctgtcaataaagggggtaattcttgcatctgtaaaattggctactttgcagagagccacatctacttgggcttcctgccctctcccatcccaaatgcaccaa

SEQ ID NO: 18049 - DNA, 590 bp, Homo sapiens
gcacagggcctgccctgggccgcatactgtgcattgtcagctgctgtcggagctgggctagtggccgccttgagagccagcagtccacgggggttggcgagcttctgggaggaaagggtggaacgtgactgtcaggtacagagctacagagaaccccagcatgaaggagtaggtggcaggggagaaggactcaacagagatggagaaagactaagcccaaaggtgatcaacaacaagagtgaaggaggaagtggtcagctrtggctggggcaaaacaagcccagtaagttacattggcctgtgtttggtcatccagggacaaagtgacctttttagtgccggtaggcccagtgggttggggaagaatttaggcggcagtgggcttaggcatgagaggagcggaggaagagaagattgagttgagaccactggctggagaacttgaccaggaagggagggcagagagcggcgtggagtcgggggagggaataggtccaatgagcgtcttaggatgaaggagttgtgagcactcagcacaggataagctgatacaaagaaagggatggaggatggatagactgacagatgca

SEQ ID NO: 18050 - DNA, 528 bp, Homo sapiens
taagatccagaagcaagacagaagagagtgaggacacttgttygggctgaaggagtgaaaataaaacaatggattaggttgtccatatatgaacattccgaatcctgcatgcagcccagtgtcttaatagcaagttgggggaatcctgttcaggaattggaaatgttggtttgttcatctctactccaccccatccctatagtcccccatttcccagtatattttaattttgggaagccatggtggttgaaaacacacacatacatatacaaaaatgggcctgttttaaagtaactttgaaaattcattactttacccatgacttttgtttctgactagcatatccatgtgtaacgtatttctttcctggttcaaaaagaaagttggagtcaactgttagaaaagaaaatttgagttaattaaatattatttagttatcaaaattgctccaaattacaaaaaagaataaaataacattttgtttgtttgtttgtttgtgtttttgagacagggtcttgctctgtcgct

SEQ ID NO: 18051 - DNA, 522 bp, Homo sapiens
tatatttctgtgtttggtcatgggccgaacattagtttgcataaagtgtaacattcctccagcccctgattggttgtaggctgagcctttacctctgccttcaattggttctttccactaacatgtctctttctgattggtgcttcctccaagttggcccgcagaccaatcagtgcattcctcctccttccaagtgtataaaaaccctgaacttagcctcacagccagaaaccctatctcagatcccttctccttggtgagagcttctctgctgcttaataaatccaactctgcattactcactctctggtgtgcatgtggcttattattcttggttgtgggacaagaaccyggagcttgccagtggtgggagtaaacgagctgtaacactttctctcactagctgaaaacctagagtgaaaaagctgtgatggggagaaaaaactatggaaaaaactatgatggggagagggctggtgggaaaggaagagattggtcaatggttacaaagatacagttaaa

SEQ ID NO: 18052 - DNA, 600 bp, Homo sapiens
atactccactactgatacttgctaattgaattacacttctgatgatcattttttttttcaaatgacatagtgagagttatgatcggttatttgggttgtaaggattgaaaacatacctagatcatataaatttgtgaaggttttgccatcacaagygttatagggaataatgaacatcaactatcctacagctaaacctaatgaagaccaaattgcctccaaggtcaaaacaatagttctttgtgctcaaaagtggttcatataattgatgctgcattgacgctgtctatagagattctagttttctccacattttctctatttttcaatttcctttcttttcactggggtctattgttctttaacagaagtaatggccttttataaatatataattttcacgttgtaagcattctttccaagctagctgcccatcatcacgttttggctagtcccagtctctgctcatagaacacttgtccacactctaaattctctctgttctccatagcccccactcatctaattcctatagtcttttaactcaaagccttcaacttatgtacagctttctctgcctcacgtttcaagcttaatgca

SEQ ID NO: 18053 - DNA, 555 bp, Homo sapiens
cccatgcaaaactgggagtcaattaaacctctttcctttataaattactcagtctcaggtatttctttatagcagtgcaaaaatggactaatagaatatataaaccaaaagtgttacatcttatttaatccatgtccatttgtgcttctgtaaaattaccagcctggataattcagaagaaaacagaaatttatgtttatattacagtttgggaggctggaaagtccaagtccaaggtgtcggcaggttgggttaaggccagattttcacttccaagaaggagtcttgttgctgcatcatctggaggggaagaatgctgtgttcttacatggcagaaggaatggaaggagcacagacactactcaagctctttcataaattygctaatcccattcatgagggctctgccagcactatgtaatcaacccctaaaggccccacctcttaatactattgcatttctaattacatttcaacacatgaattttgggggagcattcatatcatagcaacccacttggaagagtataagagaaaacttgaatatgtttaaat

SEQ ID NO: 18054 - DNA, 747 bp, Homo sapiens
tggccactgagtacagagtagaattggagtaaactgagggctgtttcaccattgccagagcagtgactttggccctgggagaagatgagattgcatgggcttggcctgagagtgatgccttttctctgggtttgtcctctggaagttttccctgcagattcatgaagatgagcatccggattccacccagactcctggagcttgcgggcggagcctgctgagggaccaagccttggccgtctccaccctggaggagctgcccacggaacttttccccccactgttcatggaggccttcagcaggagacgctgtgaggccctgaagctgatggtgcaggcctggcccttccgccgcctccctctgaggcctctgataaagatgccttgtctggaggccttccaagctgtgctcgatgggctkgatgcactgcttacccaaggggttcgtcccaggtgaggtggcccaggtgggctggtggggagggcccaggtgtccaactgaaggaacagctgggtcatgtgaagtgaggaggcccaagggggatggtggtggtgaggaagccgagaggacttggccattcaccagctcctcagggaaagcactgctcaccaggcaaggtccatagaggtaacaggaacctctcctctaatggcactgaaaggcaccatgaaaagtgagaactgggccgggcacggtggctcacaatgtaatcccagcacattgggaggctgaggtcaagagttgga

SEQ ID NO: 18055 - DNA, 1015 bp, Homo sapiens
ggcagagaagggagagagagaaamtagacttggacagttagctatcttaagcatatttcttgctttggatttaatatcaggagagtctctatccaagtcttgctgtaagatacagtagtggataataggtggtgaacagagtggttatgaatgaagttgctggaaatgagaagaggaaataaaattgctgacattaaactttggatcccagcaacagatttcctctaaacattttgagtactaatttcaccccctctggaatctcacttgttctgctttttttaaataaatagagagctaatttaacatcatttgacattaagaattgttaggaataagaaagagagacatcaaaagagggtgtggcactattctgtggattctttatgcatcaacctggcactactttgaatatccatccatccattggacaaatctttattctgaacctactatatttgggccattgtattcggcactagggatgtctctattaataagataaatatggccactgacttaatgcctcttttgttctcccaggaaagacagacattgcgtcagtggaatgaaaggcttgaaggaggagtctagagaacacacagaaccagtaacaggcagaccaaatatactttgaaggtcacggaagggttctctgtggaaatgacgttgagactgaatcctggagaatgggtcagatttagctaggtaaacagtagttgcctaagaggttcaacatgatctgccactgcctaaatttccaacctcatcataagccactttcacgtttgctcaccattcgccagccacttgtcttctctcagttcctcatactgcctgcctggaacattatagtctaaacccactctctcctcactctgcatggctagctcctttttagtgctcaccctcaattattctttgtttctgcattttacttgtttccatcattttatacaactctatttccaattgtttcttttattttttggattccttgttttctgattgcttt

SEQ ID NO: 18056 - DNA, 514 bp, Homo sapiens
agatcatcagaggtggatagggtacagcatgggagaagatcatcatcagaggtggatagggcacagcatgggagaarggacacaccaccatccaggagtttccacatgttcaactttcaggaagctccccaacccagtccttttgagcttttatggaagcctcactgctaaggcatcactcattaaatcatttgccattggtgataaccttcatcccctctctcctccccagaagttggggaggtgcaggggggcgctgaaaagccccaaccctctaatcctgccttagtctttcctatgaccagctccaacctgaggctacttaggggctgctggccaccaggaatctcattcacatacaaaaagacacatcactttggagattccaaggatttcagtagttgcatgccagaaaatgggaacaaagaacaaacatatatttcacaatattacaatctgcttttaagggtaatcaccaactttggcatattagacacccatattcgaaaaagtc

SEQ ID NO: 18057 - DNA, 602 bp, Homo sapiens
agctatccatattaagttcatgaatcaagaaattgacagtgttaggaatagggtggaaatcaagaattcactcattaaaggccgggtgaggtggctcacacctgtaatccctgcactttgagagtccaagttggctggatcacctgaggtcaggcgatcaagacctgcaaggccaacatgatgaaaccccagytctacaaaaacacaaaaattagcctggcatgatggcaggtgcctgtaatccagctactcaggaggctgaggtgggagaatcgcttgaatccagggggcaatggttgcagtgagccaagattgcaccattgcacaccgttctgggtgacagaggtagactttgtcacaaaaaaaaaaaaaaaaaaaaaaaaaaagaattcattcattcatgaactccgcaaacactgatggaattttactgatatatgacctatatagtcctgagtttgaggcagggaagggtttgatctgttctggatagtagacagaaaaataaaacctgaaagtagtgttgggagatctttggccacatcaaaattataaaattgttttatagttaaaacagctttatagaaacaaagaagtcatcc

SEQ ID NO: 18058 - DNA, 597 bp, Homo sapiens
gcctcttcttttttaacagtgaatgctttcaaacaaaatcttcgatgaaaccctayatatggaacaggcgaatgtggagctgctgttactgtatgcaacctgaacaatgagatgcagtaccctgggtaggtgccctgcttgtgtggtctctccctcttttccctcccacagtagatgcttcttaaacacgccttctaattttcttgtccctgtctcttattcgacccacaacagtggcaatcagtttcatacagggtccaaccagccttacggaagtgtgagctgactgtccccactgcagccccacccctcccttctgccctggaatttttctagtcctctggtgcaggacattcttgcaaataacccgttgtcatccatgcacacaacccagaacagggaagtaaacaccctgccctgtggtaatctttaaggtatataaatgaaggttctgagagtagaaatttacgtgggccattgtcacaatcaaattgataattgtggaaaacaaagtgtggcaatccttgaccagaaagagttgggagttgaggggcaaatgcagctccctttcttgtcccaggcagatggtcctaatat

SEQ ID NO: 18059 - DNA, 538 bp, Homo sapiens
tgggtctccctctccctggctggttttgaagagatgagctgcagtaaggaggcaggtgtgctggggaaggcagttagcgaggaacggtgcaccaactcctgaccaacagaaactgtgagatcgtagacaagygttgttccaagctgctaaatttgtggtgatttgtttgcagcagtcaataactaatagggttacccacttttcagagctgtcctgaggacggaggtaatatacatatatacatatgcatacggacatacacgcattacattacgtatataatatacatgtagggctaggcgtcgtggctgcaatcccagcactttgggaggctgaggtgagagaatcacaggagccctggagttcaagatgagtctgggcaacacagcaaaaccccgtctctacaaaaaatacataaattagctgggtgacgcatgcctatagtcccagctactcaggaggttgagacaggaggatcacttgagcccgggagttggaggctacagtgagctatgatgacaccactgcactccagcct

SEQ ID NO: 18060 - DNA, 538 bp, Homo sapiens
tgggtctccctctccctggctggttttgaagagatgagctgcagtaaggaggcaggtgtgctggggaaggcagttagcgaggaacggtgcaccaactcctgaccaacagaaactgtgagatcgtagacaagcgttgttccaagctgctaaatttgtggtgatttgtttgcagcagtcaataactaatagggttacccacttttcagagctgtcctgaggacggaggtaatatacatatatacatatgcatacggacatacacgcattacattacgtatataatatacatgtagggctaggcgycgtggctgcaatcccagcactttgggaggctgaggtgagagaatcacaggagccctggagttcaagatgagtctgggcaacacagcaaaaccccgtctctacaaaaaatacataaattagctgggtgacgcatgcctatagtcccagctactcaggaggttgagacaggaggatcacttgagcccgggagttggaggctacagtgagctatgatgacaccactgcactccagcct

SEQ ID NO: 18061 - DNA, 517 bp, Homo sapiens
taacaaagtgcacagcagataatcaatagtaaccagcccaggaaataaagaagaaagcaattgccctgtagacctacatctcatttgtttagtrtttctgcgaggtcaggggccgatgtcaatccatcatggttcttaaattcagaagtaaatatattcatgagcagcaaggggcaagctgtttgtcatgcaagaggcctgcacgtgcaaaggccggggaaggtatgagagtgccccaggaagcttctggccgtaccctccaatgccaagagctgggagcctgcaggctccagaaaagccccagagggaagccggggggcccacactgcctcctagtggcaggatgtgtaggagtcataaattctgtggtctctagtttgccaaactaatctgggaattggatctggtgggttgtttgtccaaagatgactgcaaggatgtttcccattctccatggcacatggtctttcgccatgtggcctatggagaggtggagggatttcctgaccttggattt

SEQ ID NO: 18062 - DNA, 517 bp, Homo sapiens
taacaaagtgcacagcagataatcaatagtaaccagcccaggaaataaagaagaaagcaattgccctgtagacctacatctcatttgtttagtatttctgcgaggtcaggggccgatgtcaatccatcatggttcttaaattcagaagtaaatatattcatgagcagcaaggggcaagctgtttgtcatgcaagaggcctgcacgtgcaaaggccggggaaggtatgagagtgccccaggaagcttctggccgtaccctccaatgccaagagctgggagcctgcaggctccagaaaagccccagagggaagccggggggcccacactgcctcctagtggcaggatgtgtaggagtcataaattctgtggtctctagtttgccaractaatctgggaattggatctggtgggttgtttgtccaaagatgactgcaaggatgtttcccattctccatggcacatggtctttcgccatgtggcctatggagaggtggagggatttcctgaccttggattt

SEQ ID NO: 18063 - DNA, 557 bp, Homo sapiens
tgacctttgatcgtcctcatggctcattatatgctaattataatgaattagcatgctaaaagacactcccaccagcaccgtgacagtttacaaatgccacggcaatgcaggaagttaccctatatggtctaaaaaggggaggaaccctcagttctgagaattgctcaccccattcctggaaaactcacaagtaatctatcccttatttagcatataatcaaaaagtaacaatatgtatcctcggtcaagcagctcaagccatttattcagacccgagtgacaatgaggaggcagagtgacgaggaagtctggatgaagagagttccaagaaggaagagcaattgcaaagtacttgaacatgcttggctagttcaggggacagaaagaaggtcctaaggaggagagatggaagcagatgctgggtgaagttggagaggtgaggagggcygggccctgtgggggtcgcatggggcatagaattgggattggcattgatcctggcagcatgaggaggccctcggagggagaagttgtacttcatggtgcttatacgcaag

SEQ ID NO: 18064 - DNA, 653 bp, Homo sapiens
gcaggccgccctggagcgacaggctctccagaagcaagccctgcaggagaaaggcaagcagcaggacacggtcctcggcggccgggccctgtccaaccggcagcacgcctcctaggaactgtgggagaccagcggagtgggagggagacgcagtagacagagacagaccgagagaggaakggagagacagagggggcgcgcgcacaggagcctgactccgctgggagagtgcaggagcacgtgctgttttttatttggacttaacttcagagaaaccgctgacatctagaactgacctaccacaagcatccaccaaaggagtttgggattgagttttgctgctgtgcagcactgcattgtcatgacatttccaacactgtgtgaattatctaaatgcgtctaccattttgcactagggaggaaggataaatgctttttatgttattattattaattattacaatgaccaccattttgcattttgaaataaaaaaactttttataccatatctcatgtaattcctgagaggtgtggtgtcctggggtgggaagcagggagggtgagcaggtgggcgatggtgatgggttcttacctgagcactgcagagggagcagcttcctgagggtcagacacttgcttcacacctaggaac

SEQ ID NO: 18065 - DNA, 1928 bp, Homo sapiens
tataaaattgcgtcctttgtaattaaattgccttttatttttctgagtgaaaatgagaactgcatgtagcattttccaaaatggaacacattttcccataattgggactctttggcattcactggaaaattaaataattttagaaatattgctattagtactttcaataaagaggggactrtagaatgttatacaaatagatctttaaagaaatatccttttatgcactgctataggtaaatggacatactaatttgtgaagctgtacaaaagatacacattttatcctgggaatacaaaaccacagttttaaaaataatttctggctgggcacggtggctcacacctataatcccaccactttgggaggccgaggtgagtggatcacaagatcaagagatctagaccatcctgcccaacgtggtgaaaccccgtctctactaaaaatacaaaaattagttggacgtgctggtatgtgcctgtaatctcagttacttgggaggctgaggtaggagaatggcttgaacccgagaggcagaggttgcagtgagccgagatcacgccacttcactccagcctggcgacagagcgagactccctctcaaaaaaaaaaaaaaaaaaaaaaaaaaaaaattccttcaagcacaaaataaattgaactatagagaaacatatgttttattaaactataaatacatggcatactaaaataattcttcaagctgcgaatgttcatgaaaattcacatcactattaagtgattattttattcgaatcctgaaagttatcatgatacttaattttgcctttgtcataggagagagatattcaagtagatttcaactccagcttggggaaaaaaaaaatcatgactcacagaaaacatcgactttcaactgctttcatcagctgtgaatttcagatcaaaaaaccaattcaaatgatttataagttcagtgcttactccatgatggtcagcattatattattcaggtgaaggacagagaaggacagagaaggcacataaactctagttgggggagaacaattactatacaaaagaattcccccccaaaatggtaattaaggactattataggtaagctagcctacaattaattttgagaaaatttacaaaaaatgaactaaaatatacagccaaggcagaacaagcttaaaatgtttattaagcattctgtttggcaaaactacatgcaaccaccaaccagtaaaaactgaaattcctaatactctgcagagcaagtagccaacttaataatcatttacaaatagaagatataacaggtattaaatatcaatattcctagaaaaagccccttcaaagtaaaatatatgtatcagaagtcatccaaacaattcacaataattagtattatcaaattagtgctatttaactagtactagttttgctcgttagcagttctatcagaaggcactcaaggcactttgaaagaaaatatctgaagttttttttgtctgcctggtaatgacatattataaaaaatttattactaaaagtgaatatactacaatttaactttttaaatgaaaatgtattttacatgtttctttttcttttttgggagggtggggggtagggggattaagtcttgctctgtctactccaagctggagtgcagtggtgcgctcttggctcactgcaacctttgcctccccgattcaacttattctctggccccagcctccccagtacgtgggactacaggtacgcaccaccacgcccagctaatttttgtatttttggtaaagaccaggtttcgccatattggccaggcttgtctccaactcctgagctcaggtgatcagcccgcctcagcctcccaaagtgctgggcatgagccacagcgcctggccaaaatttgtctatattcaatagtaaactttca

SEQ ID NO: 18066 - DNA, 1928 bp, Homo sapiens
tataaaattgcgtcctttgtaattaaattgccttttatttttctgagtgaaaatgagaactgcatgtagcattttccaaaatggaacacattttcccataattgggactctttggcattcactggaaaattaaataattttagaaatattgctattagtactttcaataaagaggggactatagaatgttatacaaatagatctttaaagaaatatccttttatgcactgctataggtaaakggacatactaatttgtgaagctgtacaaaagatacacattttatcctgggaatacaaaaccacagttttaaaaataatttctggctgggcacggtggctcacacctataatcccaccactttgggaggccgaggtgagtggatcacaagatcaagagatctagaccatcctgcccaacgtggtgaaaccccgtctctactaaaaatacaaaaattagttggacgtgctggtatgtgcctgtaatctcagttacttgggaggctgaggtaggagaatggcttgaacccgagaggcagaggttgcagtgagccgagatcacgccacttcactccagcctggcgacagagcgagactccctctcaaaaaaaaaaaaaaaaaaaaaaaaaaaaaattccttcaagcacaaaataaattgaactatagagaaacatatgttttattaaactataaatacatggcatactaaaataattcttcaagctgcgaatgttcatgaaaattcacatcactattaagtgattattttattcgaatcctgaaagttatcatgatacttaattttgcctttgtcataggagagagatattcaagtagatttcaactccagcttggggaaaaaaaaaatcatgactcacagaaaacatcgactttcaactgctttcatcagctgtgaatttcagatcaaaaaaccaattcaaatgatttataagttcagtgcttactccatgatggtcagcattatattattcaggtgaaggacagagaaggacagagaaggcacataaactctagttgggggagaacaattactatacaaaagaattcccccccaaaatggtaattaaggactattataggtaagctagcctacaattaattttgagaaaatttacaaaaaatgaactaaaatatacagccaaggcagaacaagcttaaaatgtttattaagcattctgtttggcaaaactacatgcaaccaccaaccagtaaaaactgaaattcctaatactctgcagagcaagtagccaacttaataatcatttacaaatagaagatataacaggtattaaatatcaatattcctagaaaaagccccttcaaagtaaaatatatgtatcagaagtcatccaaacaattcacaataattagtattatcaaattagtgctatttaactagtactagttttgctcgttagcagttctatcagaaggcactcaaggcactttgaaagaaaatatctgaagttttttttgtctgcctggtaatgacatattataaaaaatttattactaaaagtgaatatactacaatttaactttttaaatgaaaatgtattttacatgtttctttttcttttttgggagggtggggggtagggggattaagtcttgctctgtctactccaagctggagtgcagtggtgcgctcttggctcactgcaacctttgcctccccgattcaacttattctctggccccagcctccccagtacgtgggactacaggtacgcaccaccacgcccagctaatttttgtatttttggtaaagaccaggtttcgccatattggccaggcttgtctccaactcctgagctcaggtgatcagcccgcctcagcctcccaaagtgctgggcatgagccacagcgcctggccaaaatttgtctatattcaatagtaaactttca
